United States Patent Application Publication US 2025/0297208 A1 - sequence listing, part 2

SEQ ID NO: 178 - DNA, 62533 bp, Xanthophyllomyces dendrorhous
ctcgacctcctctcatcaaatgatctttgcctctatcttgatcgaagaatggacaaagctgcacgacatcagccaatcttccgcggagatttctccttcgaccatcaccgcctcaccagttgcccttccagagagaaacgcgaacgcaaaatcattcgttactcatctgatcgctgtcctcgaaggtagagttccatcaagttactatgagatgctcctcgttctcggccggatctacaccgaatgtcaatctcttctcaacacattcgctaccgatggaaagatttctcccgatctgattccttcccttccaacatcgcttgttcctactgaaccacctgtcgaggtgttcacgatcgagaccgcaggagagatagcaaaaacgacgttcgatcggctgttaacaaagatcactaaaaagacgtccagcccagaactatctggtctgttgagagaacgacagatgagaatcatctcttccatcgggttctacatggccatgaaggaaaaacatgacaggcaggtttcggctgcagtagcgggagcggtgatcgcgttaaggactatgccagccaagtttaacccggtgattcgaagtatcatgaacggcatcaaggttagtatcaccaaaactgactggagaatatggcttcaaaaagactgacatgtttttaatgtttaaaatctcaagtttgaagaaaacatcaatctacaaactcggttctctcattcggtcgcctctcttattgaattctgctctcaccctgcgtctaccgttaaggcaaaccctacggataagatcatcaagaacctatgcacatttgtctgtcaggatatggcccagacccccgtgttttcaaataacaagcatatctttgacggcattctttctctccagcagaccaccaagccgacagccggtggaggacgacaggcgaaggatactcctgtagaaactgaggaggaagtccaagcaaagatcactagacgaggtgcaaatttcgctcttggcaagctggcgaaccgatttggaccgaggttgttcacggatgtcccgaagctttggtcttgtgtttctgatcctctcctcgctaatttttcaagtgagtttgtatttttggatcccttcttcttcttcttcttttttgtaatttttttaaataagaacatagaaagaaagaaaaaggaatataacgttgactgtttcttacacgctttctcttccagcttggagcgaatctgcggatcagagtgtcgctgcatccgaccaagtcggccaagacgtgatcgatagtctcaccgctctatccgttgtggttgtccaactcaatccagagcttcattcccaagtcctcggtctacttcctgcagtcatgaacgctcttcagagtcaatttgccgtactaaggcaggcggcagctaggtgtatcgctgcagtttgtgatgtcgcgccagctttgggaatgagggacgtcattcaattggttcttccctacttgggagatccaactgtggctaaacgccaaggagctaccgaagctgtctctcgtatgtctgcttttcgctctcaatttgtcagtcgagctcgtttgggatattctttgttgatctttgttccattctttcttgatgtgtggtagaccttgtccggacactcgacactcgagctcttccctatgtgctattcatgatagtaccgattcttggccgtatgagtgatcccaacgatgatgttcgtttgctttctaccagtgtctttgcttcgctcgtcaagatggtcccgctcgaggtaagtgctcttcttaaatcctatgaatcgagcctgcttttgctcaacgaatgaatgttttttttttctttcgtttgtgaacaggctggtattcctgaccctccaggattccctgaagaactcctcgccaaacgtgctggcgagcgagagttcttagaacagttattggatggaacgaaagtcagctcgtatgagatcccggtcacgatcaaggcggaacttcgaaaataccagaaagaaggaatcaactggcttgcgttcttggccaagtatcagttacatggtatcctttgtgatggtcaatatacttttttgctcttctctatcctttatgttgagatgctcaccaagtaccttggggtttccgtggatacagatatgggtctgggtaaatcgttacaatccctttgtatattggcaagcaaacaccacgagcgagccgaacggttcaacgcaactggatcaccggatgccgtccatcttccttctttgatcgtttgcccctcgactctgaccggacactggtaccatgaaattcttaagttcacggataatctccgacctcttctctatgtcggaaactatcgagaacgagtcgtcctccaatcatcaatcaagaagagggatgtcatcatcatgtcctacgaagtcgttcggaatgatatcgaagaactaagccagtacaactggaactactgtatcctcgatgaaggacatatcatcaagaacgcaaaaacaaaacttacaaaggctgtcaaacttatcaaggcgaaccatcgattggttctctccggaacgcccatccagaacaacgttctcgagctttggagtctgtttgatttcctaatgcctgggttcctgggtaccgaaaaatctttcaacgagagatatggaaaacctatatctgtcaatcgagatggaaaggctaccgctcgggagcgagaagcaggtttgtatcctttttatctttctttcttttggttaatacgacggtcgttctttgaaagtttgtcgagattaattcatatcttcatttgtgacttccctctcacagctgccctggcactcgaagctcttcataagcaggtgcttcctttcctgcttcgaaggcttaaggaggatgtcctacacgatttacctcccaaaatcattcaggattactactgcgatctatccgacgttcaaaaacaactctacgacgacttttcccactccgctgccggtcagacggccggtgacgttgtcaagtccaacaccggtagagaatctggaaaacaaggtcaggcgcacgtattccagtcacttcagtaccttcggaaactttgcaatcacccgtgcttggtggcaaaagaatcggattatccgagtatctcagccaaggtgaccaaagcgggaggtacgcctggacccaactcgatccgagacttggcaaatgctcctaaactattggccctcaagtaagtccattctcttttagcatcagatatgtcagatcgacaagaaccacgactaatttatgtttcgttttgaacagacaaattcttcatgattgtggaatcggaacagccgaaccttctcctacggatgccgaagatctttcgctttcctccattcctcaacatcgggtcttgatattctgtcagctgaaattgatgttggacgtcatcgagactgatctcttccgaagacacatgccttcattgacgtacatgcggatggatggatcgacagatccttccaaacgacatggcgtcgttcagacgttcaactcagacccttctatcgacgttcttcttttaaccacccaggtcggtggtttgggtttaaacttgacgggagctgatacagtaatctttgtggaacatgactggaacccgatgaaggatcttcaggcgatggacagagcccatcgactgggtcagaaaaaggttgtgaacgtctatcggttgatcacgaagggcacgttggaagataagatcatggggttcgtaatactcttcaagatttcccttcttaattattcattatggctaacgattgaaccgtggcctctcatagtctccaacgattcaagctcaacatagccagctcagtggtgacccaacaaaactctggcttggaatcgatgaacactgaccaagtactcgatctcttcaagatctctaccggagaagaagatgctgcagatgctgcagcaaagaagaaggctcagcaggaacaatcaggtcctgtcagccaacaaaacttgttggaaggtttagaagatttacccgatgaggacgaatatcaaggcttgggaatggatacgttcctgggtagtctttgagcaatcgtgatcaagaattctggatgagccctctcttcttgacacctcaagtcaatatgaaagtctttctagatctttcctttccttttgagcttatctttttcctttcactatattcacgtcttcttcaatgttttgacgtcacgaacgagctaggttcgctctaaattattccatctttgcatgccaccaaagttctttctcttatcttctttacccatcgattcccagtttgtacttgtactagacatagcatgaatcctgtacgaacacaagaacagaggaagcctgctgtgaggtgacatctggatgataccgacaactcaaaactagaagccattgttcggaaataggatcacacctccacagcaacaagtttattaattctccgatcgttcatggtatacctcccgatttttgcgtggatgcatttattagggtatagacaatagagtattgtgagagaatgaaatgaaatattcctatatcaaagtagagcttgggaagaataatggggttcttttaattaaattaaaacagtagaaaaggcgaaagcggtggaagtagagcagcgcttattcttcgattgttgagtgtaatgaacatgggcaaattctatcaagcatccacacggtcagaccagcaattgctacatcaagaaggaaatcgattcgaaaccagagcacatggaacaaaggatagagcgagagaaagcgtagatatgagacattatggagagattaccgccgatggcctctcagtctgactaggttttttcagtccgtatttgaccacggtcatcctacgcggcaacaccgctgtgctcttctcgcagatcttggccaaggtcatatctctttgaaatcggcaggccagctcgttctgataaggcggttcaacaggatgccgatagttcaacgagaatttggcatccaacccatgggtcgggtgatagatgacttctttcagtccctcgtagtaagatttggcctaaaaccatccacaaattcgattgatacggacatatcaatgagtattacataccttttccatatgaaagagttagcagcattgtgtgcttactgcttgaatttgtgctattcttagaatatcgaccgaggcaatatcgagcttctgcttttcaatatgttgacagacctccgtcctcaaagagactagggacccaagatcgccaaggatggaccacaacctataatggaacttggggatgatctcggaatctccacccttcttgtcttcgagttgtgagtaagcctgctgaagtctttgtaggaagatggatagctatatgaaggacatcaagagtagaaggcatacgagaagaggtcaagttttgtgaacctcgttgagttcattcaatgaaccataacttacctcgcttctctttctataagattcaaagatatcgaaaaagaacggcgaaaatgctcgcatccgtcctcgaaggagcattcgttcagtattcgacaacggatcggaggttcttactctgtgcacgtcatgcggcgcctaaggcataggtattgtggaaaggatcgtatcaaggagatgttagaaaacaagaacagaaacgtaagagacctgacaaaactgtttgtttgcacctgttgtaattcagatttttgatcaacctggctgagtgctgaataacctcatgacggacgcaaaattaacctatgagagttagatacaatatctacattgacgaagcgatgctcgtacaaaagaaaatacaaaaacgcttacgatttggagtaaggtcattcatggagaccaagacagatggatcctgcaatactatgcgctggaacattttagacaaagggaatcgatatggtggctgaggaagacttttgaagtcgaatggacggagcgcgtgtatgccatgggtgggatggtacatgatttcccgaagcccttgctcgattttttgtcgctacagttcaccataaatgtcatcaaagatcgggtggcaaatgcaaggaaaagaagccagaaagacgagaaagaaccgagagacgaagagtgagcaccggaatttggtatatcgcacttttcaaggttttaaaataaaaataaaaatagaagctatcgcttacaacctcgttttcggcaatttgttgagatctcagttgttgttggtggttcatcttttgagccgtaaatacttcgtatcttagagaccgccagggttccaaattcgtaggcgatgcacaaattcgtttgagaaagtttgggacaatctcaggatttggtccttcttgcaagccttcctctcgctttgcacgaacgaacgcgaattgaagacctttcaattcttgacccagctgataatatgtgtttgacaaacacattgaaaagatgaagaggcgacaattaagtcagtttgaagatagacacttgacagggatatgaaagcttacacgtataatctccatagcatttctcaatattatgtagcagctcagcgagaaaactctcatctgttgagttccaatgacacaaacgaattgttattgagcgagaaagtagcatcaaaatgtatctagttcagtgatcatcaaagtacaggtatgtgtaggttccggtttcctacattctgatacttgagaaagacaaagaggatgtccatgataacatctcaaagtggaaaacatttactcaccgtcctgatcaactcatcgttacccattacaggtgcggcatccttataattgttcttccggaaacgttgcagcaacctgggtccagcatcgggcccatccgtgcgtttggaagatctagaaatctgtgaaccggctatactgttcgtataatgctttggtttctctaagtcttgaggcgttacctaaattccaaatagtaagtcataaaataagttaagataaacagatgcgtaaggacaagttggtaagagaagaatcaaacgaactatttcgagttgtaaagctctctacacgagtatgagaagtgggagcatcagttatggtttgctcaaaaagactctgaaagcgtctgattccaataaatcactgaccccgtgtatgactgacatctgcatggacatcaaatctcttcttgcttcaacggacggattcaagagcttgaacgtagctgctcgaggattgattcggccgataaattcgacagctggactcttttccccgccggaaaacaaatttcgaacttgatcatctgtcaggttaaaagggaagttgtgtatctaatcaaacgaaagtaaaccatatagagcacggctcgcggcagataaatcagttgattgtatcataagaaagtaaagagggtcaacaaggaaaagcaacatactcggaatatgtcccacgccgatttagtcgggcctttgatcgatcccttcgtttcaataggcatagcccgaacgtccactggaacctatgaaaccccgatgcagatgtgaagtcaggaaagataggagagtggaggatgatcaacatcttagcacacagtcatcaagaagaaagcaaatcaaaaaaacgtactcctccgataggttgctgatgcacgttcaacactgactcaaacgcctgctgacctgatacagtgacaatagcccaagtctcacgcactcgcttttcgatccatcttatggagcttagtttcaattgaggggcgagttccagaaggtatctgaggacaagcttgccagatgtcgtgggcgagagggaggtgatctacttgaaacagtataacattgagtcacagacacatacacacacattatgtatggtcgcacgcaccaggagactggttcttgagttgacctcatatagggcagattctgaaaagaagctcgatctccatgagaaagcaacgacttccaacacattctgttttgggtgttgaaatacaccacatattggtcagactagtgaattataaaaccgcatactcgtatgtacgtcaagggcgcagacgaaccgctttgatagtgggatggcttttggccaagatctccctgaatccctcagctgaaaggtctccaacatcaaacagaatcctgttgtccttgatgtgataagcaggtaccttgtaccctctgctagtcagagcctctataacggctgtttcattcagcgttacttcggccttgggatctatgtcaatcttttacagatcaggattgtaaacaaaatcaaagaataagatattgagcatgcaggaaacaggaaaatggataacataaatagtagcatttacttggagcgttttcatgtttgggattcgctgtaagtacagttcttgcctcagctcatccgattgattgtctgaggatatctttactgaggcctctgatgctacatctgtcatgtcgtccagagattcagctttcgggttgctagtgacgttcttgtcaatagtatatgacgagtcaggattctgactggaagctttttgaaaagcgtgctcgtccgcttctgacagtttgatcattgtagatgcagtatcacctggtttggctatgagaagctatttaagcgagcaaggcgggacggcaaagtaggatagcatatgttagttagtcagtcttaagccaaagatcaagcatatcaggatggagaagacacttactccccaaggcgcctgtgttccatccattgtatcgcatactaagtcttggtccgatattgatgtctggatgattcctgatctcttccctgtggctttccaagcctcaactacatggactcctctagaccagaaaaaatctcggaacgtgattgaatcaagctcaagtggtagtcgatggatctgatggttgccaccagaaaattttaatcagtacagatgaaattggtattgatgtgtttcatgttaggcaggtaataatcactagagaagacagaaaaggaagtatacgaagatggagagagggaaacacatacgtatgtaatgacctggtcattgtactctatctcatcgtcttcctctgcttcgttttcccactctgaactaccttctccttccgctcgctgtgtacacaaatctttgtctttcgctttctgaaattcattcttgatggttttgcttcctgcggcctcctgtaatcctagctctgcttggcccgccatcacctgcggccgatcctgaccacctttcgtatctacgccttgtgtattatgatcttcatgcccagtggttgaaacggaaccagaagtttgttcaaaccgatgtattctccggatatatctggatgatcggatcgaatgtgggccagcggcattcaccaaggagaacggcgacttagcaggcaagattgaaggtgatcggatgcctggattaaatcgatacaagagatcaacgatagtctcatcagctacgctacaagaacaagcttggaagacgtataatattctcactcttcacagttctaaatatcatagacattttggatccgtcgatgtagcaagccaggaaggagaccgttgtctactgtctggtgttgatgcttgttctattgatgagcaaacaaaattgagatgacacgtgcactttgatttgattcatagtatccattaaagctaaccttgaaaaagaaaaacattacgatattcgtattgtagtgtctaagtaagattcaaccactgtctccttatttatacaccttaaagagcaatcatgtttcgttgaagagaaagtttccatcgcatcgcacgatatcacaaacttgatcctggatatcaatcctttgattctttcactccggtctttgacctcgccatctttttctcagcctccaatctttccaaaatcttttttttgagcacccctacatccggcttcttcctctccgtcccgctactttcggataatgaaactttcgtcggagcctcttgctccgacagactaggctggtttgatttatgaggagaagaagcaagcggtagaagagtggtgactgaagagacgttcagctcaaccaggccagtatctgcatcggcgggtactgaaggctgctgggccttcttcagttgagcttgtaaagcatcagccttagcctcttggagtctctgtaatagaacgttccttgacactgtcgacttcgagttagattttccttctctccgagattctttcgacgtcctctcagtgtccctatcagctgcgcctcccgcttcagtcgacagagtattgacgagagctgaagaccctcggatagcgagctgagccatcctgctaccgcccaagccagctttcccacgcgatgccgctccagtgatcctgagttcacctcctccttcgcctccagatggtcccctaggcgaaggcttgttgtttttagaagcggcagaggtattcatccgtgataacagtgatggatttaggtgggctcctgtcgaatcgtcagatatcgagatggatggcacgttctctgcctctgctgtccaggcacgcatcccccctctgcttgagtcgtcatcaattttcaagattgaactagacgaggccactaggtctgttcgatgaggtggtggacgataatgagaaggctgtctggtggctcgagtggagaacacagacccctggtctggtagggctgctcgtttcggtccatgctctgccacatctgatagtggaggtgatcgagatgctcgccgggctctcaaacgagcggtctctccgggagcaatccatgagtcgtattcattccatcttttggggattttcttcccttttctgtccggaggaccatatcgacccttcaaattcataaaaaagaaagacaaatggtagcgctttgtcagtgtgtgagtgcgacacatcagattagatcaagagaagatcatgatcttaccactacagagcctcgtgaacgtctttccaaacttggactcctttccctgtagcttcttaaacttgaattcgatcgatcagagaaggaagatgaacgcgaaaccgaccttcctcttctttgactcatctgaacgtcttccccctccccctcgtccagcgctctctccaacctcatcatttcatcttcatcagaatccacatccacccgtgttcctgatggtccgatagcctctccgagtccgccatcaacctccagtccagggattgtttgcttaactggcgacttcgatcgtcgacgtttaggggagggtgatcggtctcgatgatttgaacgaagggaacgtgagattgagcgagaggtgccatcgtcgttgtcgtcttgctcaaggcgtctacgggaaggtacaggatcatattgagctgctcgatcatatagatgcagttctcggaagggagatctgatgaatgaatacacctctgtgtattgaagccaatgaataagaccggagataatcgagttaagtatcgatggaaaatatatggcgaaataaaacaaggagggagataaagacagaccatgcgcgaaatgctccgcgtttctcctctgttcaccttccccgacatccaaaaactctgccaaaagccgaacagccgcgtcggatcgaaggtcaatcgatttcattaacgagatcgtatagctaacctatatcgattcaaacaaaagtgccgagcaattttaacaaatgtatgatcagattaggaagaagacatagactgacataccataaactcgacatccacgccagtccatactctaaattctcttcggaggaaaactgtcgcacggccgatcatgtccgtattgagcgcgaattgctgaggggtaggaattggcttgtaccgagtagtcacgttcgaaccaacatgcttcgtgtataggccccatcgatagatctctcttcttctctccactctgcgctcagtatcatctgcttcgttttctgggttgattgaagctcggtcgcgccgacgaggctgtcttctagttatcgaagctggaggaaggtatggattttggggatgaaccgaagaaggctttgaaacgagtggagaaagaaagaactggagatatttaaggaaagatgtagagacgtgattgtcagttgaccaaaagctttcagcttcgacagaggtacaagagaattgactgactcgaacataaggcggaggggtctccagatcgtgcagcaggtagtctcccatcggcttggagcatagaggacactgtatttaaagggttgatattagacgaagattgtttcatgcacggatagcatcaatcgaagatgtagctacttacttttctagactgctccgaccacgtacagatgcagccaaaacctgatgaagaacaagtttaacgtcagagagtgcgctcgatatgaaattcaatatacagagaccttacagaaagcatcatgtccacagtttacctagaagattggaaatcgaagaaagagtgaatacgatcgttagcacgtacgtttgaccattcgtcgacatcgatcaaatggaaacccataccaatacagtcctatcccgaacagtctgtaggcagatgatacaattctctccctctagttcctcgtcttcttctcgccaccttctccccgaatgtttttctccttccatgttggagtcggttggattggcgtcaggtacaggatcgggaatagtaggagccgacatcccggcctcaacttcgatttcgggttcaacctctatctcagtttcaccaggcgtatgataggattcatgatcggagggttcatctagagtgttctgagcggaagaaagagcaggaagtgggtgagatagagattgggaaccggacaaaatgtcagctcgccttggtttcaagatggattcggaggaaggattagtagtggcggtggtatccgcgatctggtccctgagtgacacaagatcaggtagaagatgttgatttcagcgcgtgatacacagaggggcatgtgggagatcactcacaatgtgtccatatggaaagatcagatcagatattgatgatgtacagatcaagtgtggtcagtttttgagttaatcgccgttaggaggatcaaaaacggaggcgtccgtttgggtggatttatcttttcttttcttcagcattaatcattgcacttacaaccatcttgatcttaccatggacgaggacgacgatcttagtgagccttttcacataagtttactactcgatttaacaggtattgtaatgttcctctagattagctgtctaatcatattgtttgtgtattaccttctttcttcatcaaatccggtccttgctagacgctatccgagctcgacgactagctcaactccaagctcaaggaggaggaggaggaggaggagggagaggaggaatgggaggccctccctctggtggagcacctggacaaggtgggaagcagctgtctcaggaggaacaggaagctcagagacgagctgaggaagaacagttgaggacgataatggctaccgtcttggagcctgcagccagagaacgatgttcgtctccttttccttcagtccaataattcctcttgcattcttgagcctaattcgaaggactctctctcctcttgcttctttgtttcttcttggggctgcggcgtgatcttgatcgataaaaagtatcgaggatcaacttgacccgacctcaactctcgaaacaagttcaaaacatcctcctcaggatggctcagggtggtcaacttcgaggaaaagtgagcgacgagcaattggtcgggcttctcgagcaggtcagcttccttctttcttctctgtctttatttcatgctattcgctgctacttcaaccgctgctacgcgcatatcaatatggtctcttggatcagatcactctaatcttggatcgcgcgcccaaaaacacgtttcattcagagactaactactcctctgttcttctctccttcttatcatattctgctcactcttgtaaaggctcaaggagttgcagcctcgagtggtggatccggaaaaattgtcgtaagctctttcccttgttcctctgtcaaagatcttccatcatctagttcagcatgagaagagtgcatgaagctgatccacgaacttaaccttgacgcatgattcttttgttttgtcgtttgggatacagttccagcgaaagagtcgagagtcagttcctattgtttttcttccttcacaaagcaatcattttgttttcgttattaaacctgttctcttcgtctcatcctctatttagctccgacgacgacgatgatttcgatctttaaataggaaaagaaagggatgatggtgatgatatttccatcacatgtttcacgtatccaagttctacactcaggcatccgaaagaagggaattcatcaaagcacgctcggtatgagaaggcaaaagcaggttgtaaaatacagtcgcacactcttcctaaccctttcgtctactgtttcgttctagtctatgtctactctaagttaaaagaaaaggatgaccgagaaaagacagatgtcgaagaagaagaaaaaagattgcaggaaaaagaacacgtttcgacaaaacgagtacgcaaagcgagaaaaaggaccaagaaatgactcgtatcaacaaggatgaatcgagactgggaattaagatggtatctaatggaatataataacagagtttttattttaaaaatagagagaaaaaaaaggaaacccgtttacgacgagacggtgttagaggcggccgcgtcctcggcgacctcgtctccgaacgtaggagctcgagcgtgaacagcagtagactcaacatctgatccgttgtttccgtggatgtccaacttggtggtcatctcggccacttggatgtcggtcaatgtaggcatcctcttggcgacgtgagtaggtcgggccttctcctcataagcctgggcgaagatgacatcgatagcctcgagggttcgtccctgggtctcggggtagaagaagtagatgacaggaatgaacaatgcgttggcgcacgcgaagatgaggaaggttccccaaccgatggtggccgtcatagtaggagtgacctgaacaacaaggaagttgaagagccagttggacatggttgacacagcgttggccttggttcggattcgaagcgggttaagctcggccgggtacaaccagggaaggggaagccagcaggacccgaagaacacgatgtagaggaagagtccaaaggcggctcccttggctgcctgagctgttccaggaataaggcaagcgaatgtgataaccatcgcgaggcactgtccagcagatccagccaagaacatctttcttcgaccgactcgctcaaccaagaagaacgacgataaggcggccaaggcgtagacgacagagaggacacctccgagaacaagagcgagtcgggtctccaatccgatggagttctcgaacaagacggtagcatagtagatgacagcattgcaacctccgagctgctggaaaatctgcgacgaggcaccgacggccattcgtcggaagtgctgcttctttccaccgacgaaaagctcggagaaggaagctccagtctgagcgccagaagcggcgttgataccctcgacgataatggcaatctgtcgctgagtatcttcgtcctcaagctcgtgtccgttcaagtcggcaatgatctgacaagcggcatcgtagtgtccgtgaatgaagagccatcgaggagattcaggaaggacggcaactccggcggataggaagatggcaaagatgacctgcagagcaatagggagtcgccacgagacactgttgtcaatgtaggacaatccgaaatcgatccagtaggcgatcaaagtaccgacggcaaccatggaggcctctacacagatgaggaaacctcggttgtgcgacttcgaggtctcggccacccaggacggaatggtcgaggtgttggctccgtttccaagaccggtgacaattcgtccgatcatgaactgcaagaaacccttgtgaggcccaaaagcggtgacctgaatgattgttccgatgaccatgacgaaggatccaactagaggaagaaatgtaaaaccagaatcagccagcagaaccaggcgcaagatttaataagaaatgtctacccacgccacatcatgttccttcgaccgagagactctccaaagaagaaagcgaaaatggcaccaaagaagcaaccgacctcgtacacagcggtgactgtgccctgaatagtggcatgaaatcttgagaagaagagatggagtgctgtggttagcgagacccgtgcgaaagcaaacaagcttatcagagtgggaaaagaaaaggaaactcactcatcatccgcaccagaactcctgacctgatagaagtctgttccgaactgtttagcgttgatgataccagacatgactccctgatcgtaactggattttaggtttcagtgcgcgcagtgacgacaacgtcagcgatcgagaaatgttgcgttagaaccgagacaaatatcctatcaaagggaagactgattcgacatctggagaaactcacccgaagaggaggaaacccatagtagcagtgacggtgatagcgttcacaagcttgtttccccgaagacccatccatcgtttactgagagtgaaaaagagtgcgcgcacgatagtggttagattacaacaagaagaaaaagaacacttgttgtttcaagagaagaaagaagccgacaggcacaaaaggtttcgacaagacaagaacaagaaaaaggcgaacgaacgggtcggtgttgggctgctgctctcgagggtttcgagcgctgagctgcatgttctttttctcctgggtaggagaggaagcgccgctagacatgattgtgaaacggaggactattgattggatggaaaggtaagaaagatgtatgtagaggttggatgtcgaagagctaccaacaaaggcgaaagcgtgtcttttaagagttggtcgtgtgtgtctttgccctggacctattcttgaaggaaagtgaagcaaaaaaaaaagatcctttatgagtctcctctgcttcttatattttttatgtccgtgtcttttcaagtgaggtgcttgtgttctttgcccggcccctcttccggaaagaggaaataatatgcatttttacaaattgggataaatcgtatgaaggactcaaaaccaaagggttcaaagggtgcacaactgagtttgtcagttcggatgggagtctaaaaagatcggccgctggaccccgcggcatcatctgtggagtcccagctggcaatttatcagtcgtttgagctccctttataaaacttgtcagaaatgttcgcccttgaactatattaagatacactagtaggaggtggagtatccacatgtgacatcatcggcatcatccttcttcctatatttcttggcaggcctcataagtcaaatgtctacagatctgtttatccgagctaggtcggatgattttgaccggccgagacaaacatctaaccgagcattctctattaacaatgtctcgttccaatagatagaaattcgggtcttgtctttgagagatgaacaaaagagaggacgagacaaagcaaagacaagactgatagaaaactcgatgagacgatcgggattcgtttacagttggaactgctaaccttgttttcattctgtcagttctttctctcgggttcatatcgcttggcccgtcaaagaaacgaccactgataaagagaatgaaggagaactgtacagtaacccctcgtgcggacgtgtctcaaacacaaagcctcgttcggagtaatgaaggtatgctgacctcctgtgagccatcgatacgacgaaaagaccgacctttcggattctaatagatcgggcataatcgtataatctagtctcggtgctattcgtatgggtttcgtagatctaatagctcgcacccgggaaagccagaatagaaaaaaaaaaaagaaaaaaaaaaaggacgccgcccgctagacggagtcgtattcatccatctcgtgcattagaccgcttgatttcatccttcgccaagcagtctattctgaccaacagccgcttaagagatcgcataatctgatcgaaccatcttcgatagaggtaactctttcgttagacgggggactacctgcctgactattgaacaatatagctttgtcttcttggagcggatttgtgaaaacgtctaaaaacggcccgagtacgtttccgtttatatcagtcgtgtgctcggtaagaatgtgcacgagatgggattactatccaaagagtagagactcagtgacagctggggatacgttcgcggcacagtggaaagggacctatgtccagcgtctagatgacggatcctctctgcggagtccatccgaggaatttatagacaagtaataaccaaagagagaaaaaaaggacgagataagatggcagcagaggctgttgagaatactcggatatagtgcatcgtcttctgattgtcatctacctacctaagacttagctagcgcatcaggctagatgatatctgcttctctcttctgttctgccgttttctttcttctccttcctttccttctccttcagctttcactagaactgtttttgagttgctgagatcattctgttcgatttccgagctcctcagagaccatacttgctgtttgaggcatcagcgttcatattgaacagttctgctggtttcgttcagttatcgttcacactgtacttagcacatcattttcaccatcattattctaaattgcttcaagaggcgtaccccgatgttagtcttctatgtttctgaagatatatgacctggtatctgattcttgttgagctatctgtgactggtaccagtgtatagaggatagaatcaaacagtaatgtaattgttcaacacattctttgttgtccattcacttttacatcccaaactggcaccagtatagaaaatcaaaaacaacgaggaagaaatctaggatgacggtggatttcctcaaatctaaacatatcgctgaacaggatgaaggaactcacttgatcgaggaaagcattcgacaactcatttcacaattgttattctcaactctaaacccttccccggtgctgatctctagattgagtccctcgatttcctcacatacacgccgcatcatctgtcagacattcaagatagaatgatatggaagtcctcactgggagctgcatcgtgtttgacaacctgaactaatgatgagtgtctataaagtggcaggcacacagtacggagacgaccaagaactctgagccttaaatgttataggcgctcgtgttgtgcctccgaaagaaatcccttcagttagggttataacggattgatcttccatagtatctacttcaacaccagatttagccaaaacatcagtttattccatccaagaactttctgcaatatctctattctcctgagatttggcaatgtacagttaaacagaacatattcatcatattgtggatggcttgttacaagcggggaacgttggagaaaccaagctgtcaaagagggaaaaggctgggtctatcatcgtcggccgaatcaaaagggaactgaagacccaaacaagagtattgacgtagtcctctaaggaacatcgattgtctctgccgaggaagaagttgatgtagatggcattggctatcatatcacagggcgtttacggtccagatgttttagcctacatgcgcggtttcagccggttcggcctcagtctgaagcagaccgattcactctatgagagtatcaggattatgtactcgaaattgaacagcaccacaaggttgagcaaagccaccaagcaagcatctaaacgagctgtatgaggctgaaggccgttatatctaatcttgaaagactcctctccatgggcgcgtcaaatagacgcgttcagcggctgaagcagacgcgtctgtctctcaacatcagatgcagaggaatattcacccgaatcaaacgagaaaagacattgcttattcatgatgtttcaagtagacgtctgaagcatgctatgggcatgtaaaaaggagaacataagaggattggctttttacgccaatcctgcacttagtctgggcgtcaggggagtaaaaagagaaaagaaggaaatagagaataaacaacacaagccgatttttttcttcttaccccaagtctaatctctctctatcctcgacctcgctttcttttttctttctccaacttctgctctcgacctaatctgtttcatcagcacattcgtttaatttacatacatatacatctaccctctctcaaccatccagcccatcattctctatcgtcatgtcttcccgccgatctagagctaacatggtcctacacgctcaagcacgcgccgtcgtgtctgcttctcctctttcctctcctgcatcttactcttcttcttcttcttcttcttcttcttctacctctacacctctgccttcccgaacgatggctgcgttccaagaagttgtgaccgttcgttcgactgagtctgcatcggcaacagctacagctgccgccaaggtgaaactacctgtcggagcaattgcaggtggcacggtcgcgggggttttggtcgtgatatttgccgggttattctggtggtggtgggttgccaacaagcccagagttagttctatctgacctctctctttctctcgatcactgactgcgttcaaaatgctgactcgctatatgttggaatccggtcttcaaatcttcttctaaatttctttggtctcttggcacgcacaggaaatgactcctgaggaacgacaggctcgacgacgaccgttgcctaagactgctcccggcgtagtaccccgttcgtttctattttctctctttcttgcttcgttcctattcttatcacatcttctcgcaacctaactggacgtgaaaactaaccacgaccatatccatcctgccatacgcaatcaagaaccagtctcgacaacacgaccttcagcatcaaaaaatccttattctgagaaggctgtgccattatcttccctgagatcttcacccactcggtcaacatctggaacgcctcttttggcagctgctgcctctgcttctgaatcatccgttgtcttgccaattgtcaacaagcacgctcctgtaaaaccatcgccactagcatcatcccgaatagcagctcccatcgaggagagtccaacgtatcccaaatggggtgaagttccattcgtggctcctccccttgcacccttcagcggatcccatcaacagtcgattcctcccccgactcaagaaacttactatgaacaaccggctggatcttctaacgggatttattcagctgatcctcgatcagtcgacaacccttttgctggaggatcgcccccaactgaggtgtatccccaagagaagatcggatacctcacagtcggcactccagccgggaaggaagttcgaaggacatccaatgtgtcagctgtgagcgagggctcaatgtattcgaacgcagacgaggacgcgtatgacatggtgtctgtcaatgcttactcgggacagcagccgcaataccagcagcatgccccaccatatggcgatcagaggcgataggattattcaaccgtccggatcaatttacaatcaagacggaaactttattttccttgctcatatcctaccatgcgtatcaagtctttcgcgtgctcttcttctcaatctttagctttatttctgttgtacctattcctgtttgcgcggtccgcgtattcatctctgcctcatataaacattagtcttctcctctctttcacttttccttgtttcgggtttctttctctcattccatcttttctggctctactctctcctaggatttgttccttgccattatcttcttttctggtcttctcatggactcttttactgcgccctcgagggttcattcttccgtagtatatatatccctgcttctcttctatttcttgatcatcctccaggtatgctacaaagtcttctttatcagatcctctgcttctctatgatatcgagttcttagtttatgcgtgatccttttgagctcgatcattaaatgcctcttttctttccttcggttttatattcttttctcaatttaatcttcagcattagattttattttgtctagaagtgtttgaggtgtattgggatgaggtgaatcgaaattcgaaataaatgtagtaaaatcagctaacggtagaaaagactaaatggatagtacaagtagaagagacaatctcacattctccctcatccaagtgatcaaatcacatcgatctgtatcctttttgagtcctgcaaatgccatctttgttcctgggatgtaacctgaggagtacatgagtgggtaagagtgtgattgaaagatagggcgaatcgtccaaggaattgtatgggatttgttttggagggttcattttcgtttcgcttgatcagcaacgatacacgacgacgacgatgacggcaaacaagaacgttgctaacttgcctttaggattgagaaggtactcgaataacgtatgttcatccctatcaaccaaacaagtgcaaaacgtataagatcctccgtacgtcttgagcgaaacaccgacgaaatgttataccaagcagagatagctgccaacaagtttttgacagagagagaacgaaccatacgattcccttgttgacattggcagctgtataattataatccggagactgccccgtctttcgtccacttctcaacccaagccgacgaacggtgacgttcgaaagaaactcttgttagaacagactcgatgatgccaaccccattcgagtcaagtacaggcgctactgaaagggaagagcgtacaaaagcccgaataggttcggcccaactttatgtggaccgtcctgatcgacagtatgacactgggcgcatctggtctattgatggttcatccaggtatcgagaagataaagaagcgggcgataagcacatgcagctatgtgttgtaccaccagtaagctgaaaatgttactgactttgaacatccgagctccctgtaggactcgttagttgtcaacatatcatctccacgcatctccatgtattcaacacagatgaatcggacgaacctttgagatatctccttcgacaaaagacatgatgatagctaaagtcttgaaacacgaatgcctttaactgcttacaaggatgaagtatgaggtacccgatatggagagagtttgtatgtggttagcacgatgagtaggtgagtatcaatatcgatcagaactaacaaacaaagaaagagaaagaaggaggggatcaagtagagagagagaaatcgaaatgggatcaacggctcagttaagtccctcaagactgaggggacttggcctgggaccgtcggaaaagaccgcaaaagaagtcttgagaatctaggagtcacatagacctatctgattgaatctcacatccttccgtcggcaatacgcaacgatctctaatcaagtgaagggctttgggattatacatgcttttgttatagacaatcatgtcgatttcgtgcgcaacgtattatttctgaagctttcttgtatcccctgcaaagtacagcatgcatttcaacctatttactctagccctttcccactgcctctgatggatactttacgcggcgttataagaccaccaaggatgaacacacccggatacatgtatctgttcaatcgatctcagcgtattgactggagagagcgcatacaaacactagtagatcaatccaaacgccagctctctggtgatctttgtcgtttgctatgatgagctccctccgtctttgtccggaactggacggagagaacggacggatctggttgaaccaatcggaaagtaattatatatacatgtaactaccacgaaggaacaaaccacgatgatacagattactacacaacagggagagattggcaaagccagaaacattcgattaaaaccccaatccaacgctgccgctgatgaggcactcgatgagccgcactctgaccatcagagaccgacggagaagaccccacggtggaatgttatgcaacagcaaccgccgaaacgggcgaatcagggtggatgttttaggcgaccgtaaccttgattacgtaaaatcgcggaaggcgggaatcgtttcgacgactgcgtggcgaataagaagcttgcaataagaagctctccggtttttttttcccttcgaccaccaccaacgacttttctttctctcactttcattctctttcttttctcgttactctttctactctttaatcaatctatcaacaatgcctttcgcctctggagatactaagaagggagccgctaccttcaagaaggcttgcgctcagtgccacactgtgttcgttcttcccttctctcttcccttcgcatcaccttttttctctttctcgctgttgtatcgactaatcgatcgatctgttccttctcaaattacagtgaggctggaggagccaacaaggtcggacctaaccttcacggtttgttcggacgacagtccggtcaggttgagggattcgcctagtgagtcccttttttcccttaacacctgtataccattcctccctccgtacaggaatctatagaactaaccgatcacgtttatgaaaaccagctccaaggctaacttggctaagggtgtcacctgggaggagaacactcttttcgatgtatgtttcttgcttatcagctctttcttttctccatatggaagctgattggctgaatccgattcatttcctacctttttttcttatcagtacctcgagaaccccaagaaggttagtcttgtcttccttctcatcgtagagaatgacagatattgtccgatcagacgaactcttgtcgatccgatccgactagatcatccgtctgtcaatgtcgttccctcccaatcattgttctgacttctcgccttattttcgcttttatagtacattcctggaaccaagatggcttacgccggtctcaagaaggagaaggacagaaacgatcttggttagttgccttcacattatcaatcgttacatgcacttggctgacgatcgctcatttactcttgatcttgtttctagtcacctacctcaaggagtccaccgcttaaaacacctttggtgaacccctcattcgtttgcactcgactcccttcccacacatatataacaatacccacacactcctctctagctatctagttctcctttcgtgtttcgattcttctgtttgtttttctacatcctcaacatacatgggtttattttcattatgaggaaagaaacccctctatgtgcaaagtaatgagaagagaaaagagaacacaccaatcatagtaaagtagaaccagaaaaaagtgacgtacgtacttgctatccaactcgaccaatcgggtcatttgtgtgagtcctcatgggtttaagggaagaattcgaacgacgagatagtgattacataatacgcacgttttctcaggtgccaaatcagccaatcagtcgagctttatgttccttctctccttgccgattgcatctctcgagcaaaagattgatggatcaaaaatcttgggcgatccctggggcgcttggcgggctctttgttctttctttatgttcttgtcggaaggggaaaaaagttgtagaccaagacatttacacccgttgctcttgatattagaacgtatatcgtaggttgcgccgtcttgacatcaatcgatctccacaggatttgtacaccttcttcaacatacatggcgtattatataaaacagcttattacaagtctgatggcctgatagaaacaaagggtgaagaatacacacagccgctattcatttaaggccaaacctaagtctttcctttattctttctgagcttggctacagctcgtgtgggtttgacaacgctctcgttcacttggactgtcattctctttggagggttttccatcaaccggcccgctttgatctgttccgagccttatgtaatcattcacgatcaactgcgttatcttttccgttctacgttcgcagctcacgagagaaaaaggacaaagaggaagaaagacatagattgaaaggaggcaacagactcacggacaaagcttgataggagagaaggaacatatatgggcgccagtttctgaatgtccgtagtccgtaacacggattgaagcctcatcttgctagcggtgactttatgcgtcttactcctctgctgccagtttgccttgatgagcgaaccgaatgtgcgagccaatgtcgttgcgtaaggaggattagggataacctcaccatcgaaggggaaggcaccgttaaaaccgtgcgtagggtgacgaacgatctccagaagcccttccacatactctgcgcgctgggaaagagtgacgtttgttcgaaacatagcgcatgaaatcggaggaaaatcgtagggttagttctaccgatgtcggtttacaccgaccagcaccagccgtgagggaaactgagaagggactaacagctcgggtggagaccagcatgtgtaaaaaatctacgcaaggctgcaagccatgcctgatgaggcctctgtctatgttgttccttagcttttgtaaaccttttaggttttttttgtgcgcctcgaatcgtcggtcaaacccttggacgagatcgttgaagacgttcatcggtttctgaccatccacttgatgagattgataatatacagcgcgacaatacttgatgtacgaaaccacctgtacgaaagggagaaaaaaaacacattgagaaaaataaatcacaggacatggcagtattggtcttaattgcagggggcaccgattgagagaccgaagaaaaacaagtgatgtcgagatcatgcctaccattaagagatccctggcatcatcgatatgagtgcggatcgacgttgaataatttgcaatctgcttctcaagatccttaacaacaggcaccgagtagctatcagaaaccccactttgaacgagatcctgtactattcttccaaactacacacaaatgccaagtagagggatcagcctggagggggaagagtgagcatgatcaatgtatgataactcgctacctttacagtccattcggaaacgtccatggaccttgcgctcagttctgatttacttctcagtcctgggcagtgatttgaacgaagacgcggaagacaagaagaagaaagccagatatcagccaaagataaaaatgtcataaaatcagcatgcgtatgccaatcaagcactaaaagtattcgcatcgatcggttcaagacttaccttgcatcagcgagccatccggatagcccctcacttccttgtaaaacatcttggcacactctgtgaggtatggagggctgtatcgacgatcaaagtcgaaggaagtgggtgtaaacaagccacaattggggtggtacaagatctctctaactgataagagatccgattcgatctatgtcacggaacaatgcttagtatttgacaaggttcaatcaaatcaaggtatgaatggaatggatcccacacttaccaacagtctcttcgttgtttggtggtcttgctcgtcagacttgtacatctgtttggtattggttatcgtgccttgagaaatacctttcaagaaagaacgctttaacaaatgacaacagtagtcacggtaagcaagctacatgacagcaaaacatgtgtgaagcatgatgcacgaagagctcttcttacctggaatttagcttggctcatgacataaagctgaagatattgaggcgcataagacgcgaaaagactcttgaggtacgaaagttcgtcgaccaatcgtccggtgtccttcggaacgttctctctgtagtcgccatcgtgtgtctggattaccaagatcaagacatacatataaagagttagtgccgactcttctttaggtttcctctattgtcttctgttgaaatcgttgtaatggatcactataatcaagcgataccaaggaagaactgcgtaccggtgattgttgtatcgatacatcttctacagctagcgcacctttagttgagcttcttaaatcctagtaaaatcaaatcgagggaacatcaaaagattaatcaacaaactgcttagtcggacagcactctcaacaacaacgacaaccgaaacacggacctgaggaagtatttctatcgttatggttttctattcgaatcaatacaaacccatcagtaataagtctttctctgtagaattcgctcgtcaacggagagatggcagaagacatactccatgaatactattgccatgaactctctttatgctctcccttgattcctcggatggatttgatagtgaaaatatggcagtccggttcgactcccatcgcagtagcttcattggaggcataccgcctagactgtccaaacaactatcaatctgatccttttggatattactgggaagattgtgtacctgagaagatttcaaaaagagaccgaagagaaacatgtttccaagaaaagaacggaaaagtagatgaagacgtaagcatatacgattggcatggaaaaaattggatatgatgagtgctagagatgagttttaaagatagagcatggcgtgtctgagataaaagacaaaatacgcacacgaaaagtattccatttctcatgttctagcccgattatatctgatgagtcagtcttagctgggataactcgaatattcacgggacgctgtagagcacagtatcaagaaagacaaaggagagtggtatcaattgcatgttcactttgattatcaaagtgaaaggcaagtattcactccgccaaaacagcgtccatgtaaacctaagatagattgtagagtttcgcggtcctgaaccggaatgactgccgtgcattctcctatcttcttcctgatccggtttatagaatttggatgtatatcgggtatcagtgtgcgaatgtacagcatgatatcttgacaagacattgctggagatagcgaagatatctgggtcagattgataatgattagaaatgaatgttcgttagaatcggtgcacttgcgacaacaaaattctcttattcagtgatagaaacacatacaagcagagtacgaccagataagcaatttcggttggcatttttatcggaggagctggacatccagtacaatggagctatgtcgagcatatcctttcattaaaattagataaaataaaatgagaaaaggccatcgtacgtacgaagatacgattaatggagagtcagaataagttgttccaaatcggtcagcaatttatggcgctgcaaaacttgatggacgaacactctgaagttcaggttgaactctcatgaccatcttcttcagttcatatacggatatacccccaatatctaccagaatttgttggtttaacatggctatgctgggtactgcccaaccttcgcgaaggagtaactcgcgtagatcgtttgcaatgtgtttgcgaggaaactttttcgaaaagctgatctgtgaaagatgtgtgacaattcgaaagtattgtctgttagtacaaaggataatactgagatgaatagacaggacaaactagactctaacctgcatagtgactaattcaggtatactgcttaggaacagtatccggctatcagagcgggatatatcgcggctttcatacttatttgccagaccaacttgcgcggaagaagacacgacacggggattttgccctctttttgaggtcgagagagcctctaagaacttgcgctcctgtttcggggacggaacgatagctgtcatcgccggactcgcaggcacagcggtaagattctgttgaaacgacacgcgtgtaatcacggtagactcgacggtattggcaatctgctattcaggataagagaatatagtatatgtcgagacagaactcactccccaatgtgcctgaatatcatggattgaactcaacaatttctgttggtcctcttgtgatgtctgaatgagcccggacacctcgcctgtcgacttccgagcatcgagcacgtttatactattagaccaaaagaagttccttaaggagtaagaattcatatcgggaggcaatggaaaaatctaggtagtgatcccattgaaagaagtcagatgtctctaagtcactgaaagggcctagagtcttagctcgatgatacgttaaacgaagagagaggcacgaacagaggtgatgacctgatgtccatctcttggtatctcttttgtctctgtccgaactgatacaccattttctttgagtcgagaggcagcggttgatgaacgtgatctaaagaatgatgccgatggtggaggactgtagcaaggcttgcctttcaaagtcactaaagatgacgatgaggacgagcgttggaatgatgatcctaagaacactaaacaagacgaaagctccaggagcaacaccatcaagtcagtctggagctgcagctctcacagaagaacgacatcaaatgcagcgtacggttgatataacgacgttgtatctttccgggcaacatcactttctactgaagaacaagccaacgatgatcagcgatatggaagtaaaggatggaggagatgtttcaggaacatagatgtttcagggcctagggttaacattggttacaaagatttggttacgatccatgatatcacaaactttggttacgatcgcccctccgttgtattccgtccgctcgtgcttacgctggtaatctggttgaagctcattcgatcctcacttttctccactctttctagtcgatttatcgatctggccgctcttcgttattacccacaacacaccaggtcagccgaaaaggagtaaactggctctggttctggaaagagacatcaaaagacgagaaaaagccatcccgttaggagaagtttgaggtttaatgagcccatgaatttactacgacaatttcaactctcgtcgctgccttctccaactatttcgtctctatcgcctcgtcatgatccacaattctcgtcggttggcgtttgttccgctgaaaggaacacccaatccgagtcctatgagctgtacgtactcagttgtgccatgctgtatgtgttctgtttaccatgcagctgaaactttacgcttctgtcttgttcttctataattttatttgtacgtttgggtttctctttttcttttttcttttttcaccttcctttactattcagtatcgactcgtcgacttgcaaagatcttgacaccaccttctttacctccaccctctcagttatcctcggctcgttcgcatactttggatctaccagttcatcctactcgttcccatgcctctcgcccaacatcacctcctcggtcttcatccaatgtacgactcaaatacatgcccatattcgaagatcataccctgtatacaccgagattttctgattcttcagaaccaccgataccgacatattcaatcggttcaaccgaacggctgactccttcgcctaaacagatgaaaccatccaagaaacggccggctttatcctcgccttctatgtccaattctcttcctgcttctgcttcctctccacctaatagatcgactgcaccatcatacatacccccatcaaaatcaacgaccaacgcatcttcattatcaccatcgctaccatcattatcatcgttgcggccactgccatcgacatcatcatcatcatcgtcatcaccatcattacctgcgcttgaagtagtacatcccttaccctccaaagttccgccatcaatattgatatcagaatccgtgaggctgagcgccgatgaattggcgcaactaccagccgacgaaaaagtctacctagtagcactacagtcgatatcaaacccagaagaactcgcccgattcttaaatttcgcaaaagcatgggtgaaggtggggaaaaaagtaccagagcgaacaggatgggttatcgcaggttggtttacataagcttctctctctctttctgtagacttgtatttactgactgactcataatactaaatcccatgcgctcaaacgaacatttatattaacaataaaaaggaaagctaccactgatcgatagtttaaaagtacttcgttcgacccgacaatatgagattggtcgcgtcccatctggtcaggtcgctcaagttctcctccgaaagcttctagaagagattcaaaagccaaaagggattccaccaccagtcaagtcgatggccattcttgaacgaatatacaatctatggcctaggtcggagaacgtctctccagctacttcctcatcagtctcaccgccgacctcgttttcatcagacgatccatcttctattgagaaggtaacggtgtccttcgtcgaggacccactctcttgggcgctcctaatcgcggcatacagcttaatccttaaacaggaccggtacccattcaaatacaactttatcgagcgtgaacaggaatccaactcgacatcgacgttcggaataaaagagaatcttttatctatacggaactacaagcttgaggacaggctggctgcgttgagttcgatctggtccgcttatgatgtacgagatgagaaagagcgatcgactatcaagaaagtcgttgacgggtttccctatcttgactccaacaagttcgaaagctggttcgacatgtttaaggagactatcgaagatgaaggaggaatttgggcgtcgagacatcggttagagaacatggttcttggccgagcacgattggttaagttatcgaaagactggacggctggaacggatgtgaaccggttgacttatccttgtcttccacccgtccgaccaccatcatcatcaccaccatcaataacacactcaccacaaccggcaacgacaacaaccccgtcctcaccacctcgattagctcctcttatcctatcgtttcatattcccccttcctcgcccatctctcccgagtcttccaatcctaatgctgtcttccgaacgactctttcgacaacaagggatcttgtatctgatcttcggtcttcctttgttcgatatccatccgacccgattctcctcctctttgcttttcgactggccttccgggtccctccttcggaccctgacaggtcaactctcctttctgatcttcttagtcgagtcaaagtgcctgtgtcgtggagtcaagtcatgaagttggagaacgagagaacgacgggaacagttcagaggaagagacggcagtggaccaggaaagtcgtgaaagagggcttggatgagttgggaggcgtgttgaaggggaggtcaagattgtgggaggatttattgaattcttgaccaaaaagaccgacggagaaactcagcgatagcctacaccatcttagtagtacacaagtgctgagactgagcaatatcaaacagaaggaaagctacagaatgtgacatcagcaatctttcctacgtcaaccggaaaacgtcttgataaggaagaatatagacaaagcacaagaagaacgagacgatgcccctcgcgcagaggggtcgaggtggggggttacggtcaagcttaatcgtcttcatgaataacaatcgttggttgttcaaacacgacctcctttacaacaaccttgtcttcctctcccttctctctctcgacgtcaacctcttcctccctcactttcaccacgatatcctcctctccatcttttgagcggtcgacatcagatccttcatcgtcatcagatgcgtctcctggccgtttaaatgtcacagcagccgctccacctcccagctttcttttcttctctgccccaccatcactcgcacccgtattagcaactcctgatgcatcggcagacgcggctcgaccggcgttggatcgggcggctttcttcttttgacgtttcagtcggttcttagacgtctttgcctcagactcggccaaggccgcagcttgtcgttcttcgaactctttctgctccgcttcctaggagagggacaaaaggaacaaacatattgaatgcgaggtagagggtgtgaatgacgcgtctgtttatgggtgaagacagaacctaagggacaaactttcttcgacttctcgtccatcatcttgagccgctcgtactctcttcttctattctgtttgtagacgtgaaactctccggaaccggctccggcagaagaaccctgaacgttcttcatcatctctctaggcgcacgaagcgtcttttccttcgtaggtttaggaatatgaacctccttcgaagggtccttgagaagcttctcaagctgcatcaagtttgagccagagaacgaccataccaatgacagaggaaacacccaaggcactgtcagtcgaccgcaaccagtaggtcccagaaagaataagggaaaggacgaacgtgaagtcgctgggcctcgaccggagtcagattgtgcttatttacaggggtagacgatccagaaaccggaagagacgaaggatccggagaagctgaaggagccatgatgaatgtaagagcaaaggatgagcggatggataagctatgagtaaagacgcaaagatagatggatggccgttggtggatagaagtgtccaaacgaaagaggattacgggcgttcagcagaaaaaaactatccagactacaaatcctcctaatcaggtctacaagaatttcctaataaaatctcgatcacaatttccatcctctctttcttctcttggctctttctttcgtttgtttccatcaatctatctacaaacagcactgactcttagcgaacaacgactcgtgctgttctcctcgtgttctatcccgatagatagtcttggttcattcaaggcccgtcagagaaatatatattgaaacctttggcgtctttttcggatggctgtttatcacccccatcacctgcttgccccttcatcctatccagccaattcttatccaatctcactcgtctttgatccttatgccgatcttctttggtcaggctcatctaccggtcttgtccaatcattctcatctcctgcgtctttcacgaggaacgtctgttttcccgctcatggaagcaaaccgcttggcatcactcaggccggactcgctatcaactcacccgccgtcagagagatttgggtaggcgatagagagatcatcagcttgacagaacgagggctcggcggacggaaacgaggaggagcagccaagtgggcactggatgaaggagcaacagcgttgagcagcatgtgtatctctcctacaaactcgtcagagatcatcgctggtggcacccaaccggcagcgctaatcgtcaacactcatacgggttcgctgattcgaacggtacgcttcatctttactcttttgaaagctcaaacatatctatcgtccaaaactgatcatggagtaatctgccgctcaggtcgactgtccaaacctgagattcgttcgacgagcagctagattggttgcgaccgggtcaaccgacggcctcgtcaggttccatgatcccagatcgatgaaagttgagcagagcatatccgcccatcttggtggtcttacaggacttgaggccgtggggtggaatgttatgactttaggatataccgtcaagttcgtccttccctttgtcttcatatccctcacgcgtggatttgtgtatgagcatgatgttcaagtatctatcatctggactcgttctcaacttgtttatcagacaaggtcacccactccctgatcccatggtcaaggtgtttgatgtccgaacgttcaagcctcttcctgcaatctcgttcgagacaggccctgcattcgtcctgccggatcttaagaaacaagactcgatgattgtcgtgtccgtccaaggatctttcatggcggtagagattggtaaaccctgggaagccaggttccatcaagtgagtattcatcttgaatcatcaggtttggagaggtcgtcgacatcaaactgaacttgacttcctgaatgggttgatcttgcaaagctcgacgtatcgacgtacgtgacatctgcagcaatctcctcgtcaggctcattccttgcatttggagacgccgggggaaatcatcatatctggtcttccatccaggatccgctttcttccgagatcgactcagtcaccttcaatggatttgagggtattcaaacagaatggcccgatgcagtcactgaggcttctattcctacgttgactgttgacgcacctcctccaccatcagtatctgtcgcgccggtgatgggaatgccaacgtccaacaatgaggaagatccttctcgactggaaccattgaatttgattggaatgcctcattatacgacccctctcctgtcaaacatccctgcatcgacatactgtccaccaaccagtcctttcttcaacccgcctgcgaagattccggcgagtgtgctcggcacaatgcggatggttgatttcgtgggctatgcacagacacctagggagttgaagggaacaagaaacagagtagggccgagaaagaagaaggcaggcgaaggtggaccgggtggaccgagattcaggagtgaacagacaagggagcctagggagggagatagggttgggacggaaggtgaaggagaggcaggaagaggagcggagggagagggaagcaagtacagaaaagttgaaatccaatacagcaaattcggttcgtactcacgttggcgatctctctgtgttctcatttttgggcgttataaagatgacgaggcaaataatgactttccttcattgtgtccgggaaattctttatttgggagtaacaggggtggaagactttgatttcgggtaaatatgttgttaccgttaatctgtcacctggcgtgttgctctgcgaatctgataccgtctcttctcgttataccctttccagatattacaatcaaacgcaatactctggactcgagacccatatcgcgagctcatacacgaactcgcttcttcaggcacttcactataccttacccttccgattgattgcgaagtctcatatttccacggcttgtacgagggagcattgcctgttatgcgagtgcgggtttctatttaggatgctggaagatgcagcaggaacgaattgtcaggctacaaatttctcgagggctgtcggaggaattccacaaagtacgcaattctctttgaatcttcccaatcccaagagtgatctgagttacactgttgaccacttgtcgtttcagttcatgcgctaggtttgttcgactcggaagacgagtcaggcccaccgaaagcgtatggtacactccttcaaaacttcaccagattcgctcttgaacacatgtcagccgaagcaaagacgtacaatctaaacccaaactcaagtcagtctcagagccagacgaatccctggttattcccgatgttaccaatacctcgatcgatcccttcgacagtcgcccaggttacaggtttggagttgaagcagacgaacacctgtctagcttgtggaacaaggacggcgaggacggggattcatcatatgatcgatctgacttatagaagaaaggtatgcattacatctcttgttctgcgctagaagtatcccaaagagacacacagaaagagaggaggaggaaatatcaagcgaggctcattatccggttttatctttgatgttatccaggccctaccaaacgaattacctaccaacaaagacttttcctctgtcttacacgactctataacccgagataccaccactaaagcagtctgcatacactgtaaacagttcgctcccctccgaaatcgacgatcgctttcttctccgtctgctatagaaagctcgacaacaatgttgcctcctgtgctttgcttgaacgccgctttacattcagcggatatcatggaggatttctggatggatcggccgaataggccaagacctttcttgcccacggcgtttggcttcgtacaggatggtgaggatttcaaaattttgggaccagaatggagaggatcgtggaaaaaggcagaggcaatgtatgagctcagagtatgttcctttctttcaaggatggcatgtttgttgagtgacagctcaggcgctaactcttctcttcttgactatgttaggctctgatcgtcgagactcatgctggaacagatgaacgtcatctagtctcaattgtgaaaagtgagttctttctcccttttcttacactttgatatatatcttttgtctccatactgaaatttccatcattgctgtggctcttctctatcatgatcagttcctgcggaagagttggattcagaagcagcctcgccatggtacatcttcaacgatttccttgtctcgaacatctccgaagaagaagccttgagtttcgccggatcttggaaggtgatgatctttcttcattcttcattctacttcttcactgtttggctcacggattttctctttgcttctatgaaacctttttctccctcgtctggatggggctgaacagacgcctgctgtgatcatctatgagaggacagactctcgacagcctcttgatctatcaatcttacctatgggaatcgagccttctatccttagtcgggatgtttccgtttcttggtaaaccttctccttccttcgtcatcctgttcagtttttgatccattctgggctaacaattgtatggtttgttctgttgttgtctttggtcatatcatgcatcaaggaatcgaaacccggctcgtatgaaacaccgatacttgacgcctgatgagttaccagaggccggaacgctggttgcgattgatgcagagtttgtagccatgcagtttgtaagtttaagtcgttctactgaaacacctgactctttcggcacgcacatcggactgacacgacgagtaaaaaacacaataataaggatgacttggagcttcgatcggatgggacaaagaaggtgcttcgaccatcgaagttgtcgttggcaagagtgtcgtgtttgaggggttctggatctcaagaagaagtgccattcatagatgatcatatccatacaagtgaaccagtggtggactacctaactgatttctctgggattcatcgtaagtttgcgcctgttcgtgttcttgtctccagtcgccttccatctaataatcgtattcatcatcgttatctacccttacagctggagacttagatcctccgttatcggaacatacattagtccctctcaaggtcgcctacaagaagcttcggttgttggtcgatctaggttgtatctttatcggacatggtctcaaggtttgtctcattctaacactcagaacggaagtattatgaagctcatcttttctcgattcttaatcatctctgtatctttctttcacagaaagattttcggattatcagttagcccttctcattctcagaaatgctttattctctccattatgtatgaatactgatataagtttcactccaccacaacctcatcataatacagacatattcgtcccgccaagtcaagtgctggacacggtcgatctctactcgagtccgcaacgacaacgaaaggtgtcgcttaggttcttgacttggttcttgctaaaaaatgatattcagacgggcgagcacgattcgatcgaggtgagtctgtttcatatgccttccttggttctcatttcgcttattttggctttcttcccttataaattcaatacatgaaaggacgcccgagctgctttgcaactatatcgattgtatcttggtttccagaaggaaggccgatttgatgatgtgatggatgatatctttgccgaagggaaacgtttggttagtttctcatcgttcggaagattcttcttcctagacccaggaactgatcctggctctcattatgtcattcggggcatatagaattggaaacccccaggtgctgcaccacctccgccggatagatggccaccggtggctatgtccacgacccaaccatcaactcccgaacctcgactcgctctgcctgcccacgcgtcgtccgcacaaactcagatgacatctactatgcgtcgattaccgaatggaccacctttccctcctcgaccgccaccgccttcgacttcatcgtcaggatcggtcccgatgcctcatttgtcacccattgcgtactcaaatccatcccctcatcctctctcaccacctggtcaagtaggtagttcttatttacttccccattctcatcttggtccacaccaacaacaggccttcccggtctggccttccatcggaggatctggtcaaggacaacatggtggtaataatggtacgggacattacctaggcccttcttctcagcctccctctcagcagacacagagccattggaggtcctatggaggaggcgcagataatgggatgccttggagttgagataagtgaggtgaagagagaaaagaagaggataaagaagaaaaggacagtaaaaatggatataatgaacacaagtacttgaacggttatggccatgaaagtttaagaatgatctctcgctctggccgttctcttttgcttattcctatgcttttcgttgagctctcatcaagtgataagacagagacacacaaagtaactgtttcttatcttcatttgcagatgaggctgtcatctctatctaggtcgttgtcgagagattttgttcaaatcctccgacgcgtgtctgtttttctagttattcagctgcttgccactctaggcagttctatcactcgtcatctcatccatctaatttcatctgattcactccttccgccctcatccatcctcttcctctgctctcccccttcccacagatgcagtcctcccgtgagtgtactcggccgagctcgccttcagtgcctccaccggatctggataattttgactggccaggggttgtggtgggaggttaccacgcctggtcggatacaagccttcctcatgtacacgatgcagaatgcgactcaatttcaaaacccaagacccacgtgtcaggaaaaaagcaggaaaaggtcgatgcagggattgcaccctggttggatgcagaacatggagggacccataatgtgagtccttcgatcaagaaggaggaggaggctggatacgtgtctgctcttcccaggagattcttcttatgagactaactgagatcgatcactggttcttttgtcgtggcttgcttgtccttgcatgccttgatttatctctataggcctctggatcagcatcagcatcgacatccaactctgtcagtccatcgggctactcgcaaccagttcgaacactaagttcatccacatcatcgcctcacctaccagccgttcgatcctcatcaaaatcaacgagcacatcatcttttaactccggcccatttggtcgatcacgacatgccagcaattctggaaagtctggtatctcgactccaagcatgagaccatcaccacctggagaaccagcaaccgcggggaaggtcgcttccgcatcaaacaatgcgtcgcctcatccggtagctccgatcgaggagaagaggaagaagtttctaggtcgactaggaatctcaaccaaacgaagaccagctacagttcagacagtagaagatgcgactccttcatccaatccaagacttgcacctgctgccgctcagcgaaaatccactcagcactcgacggacctcaagagccaacatcactcccaccttacaagtcatcttccaaaaggagtcgtcccgcctcatctagctcttccccacctgacatcattcatgccgatagaacaaaggcagaaggaagctccttcactggaagacccgaggaaggttcgaaagtctagcaagaaatctacttggtcagataattcgagtgaggaagctatgaaatcggtctcaggatcgagaagctctcagctgtttactcttgacaccaacctagaccatatggaaggcattgtcagtagggactgggacgacgcatctggaagcatacatagcggctcggtcgttggcttatggccggagggaggaggcagtgtctcttctatcgggtcatcctcagttggatctagatccggcacactcccacagcatcataccactttcactaatccttttgcgcctgcttccaatcaagcctcaagaaatccatcaaattcttcaagctccatcaaaggagcacccgtcttcacaacttcactccctcgacgtccatcccagcttcgatcgatggtcactccaagtgatgaacttggcacaaatccatttgaccaactggcctcaaacaagacccctcaattctctccaagtacagagttccgtaatccgtttgagatgactgaagtagatctcactcggggttccctcgatcccgtcacctcacctctttcgatgcctggtggttcgaaatcatcagatggccaaccagatttcatgggctctagacaagcgaatgtagcaccacctatccggagtcaatttcaggcatggacagcaccagagtcgtggggtgtcgaaggcgatcaagaggatgagtcatcagatgacgaagaggttgccgacgcgccaacgatgatggattctgcagctggtccttccagcttgaatgtggtaggtggaggtccaaggttggacggcacaagaacgggatcgaagggtgataatcaaagaggttcgcaatatacggtggacagttcagatggagttctagggaaagacacgttgcgtgcctcatcaaacggatcgatagctgtgccaggtgggataggaggtccgtcgacaaggccaatcgctagccgtggatcacaaggaggaaaacaaagtatgacaaacgcattcggaagaccatcgactggcagtactatcactggtggtattggtgagataagtagtagaccggcaacgaccagcgggttgtctaaaatgacctcgggtggttcattgggctcggttcgtattcgcgtcgcatcttcattctcctcttcatgggcctcaatagaagactgataattcaagaactggtttggtgtcatatagaccgcttttatccggatatacatctctgatggatcgtataaagtacttgctgtcgcgctgacggctactacaatggagatcatctatcacatctctgcgaagcttcttatttctaaaggtggccatcggctatacataagagagcgagggaatggtacgttctcactgcgataaatctatgggctctttacaccctacttcacctagctccatgccatccaatctgttgaccttcttcttcgtcctcgttctatgtgcagaccgacccttagacgctagagaaaagcccgcactgattcagagaaggagactgattcaagctgggtatcagggcattgatggcttagacgaacttgggaaggacgacgtgagcatgttgtgcaagttcgtcttccgactaccacaactcccgggaatcgagagtgtaggtcttctctcttttctttcaacataattcgtttgataatcaggttctgaaacaccgacttcgtcgcttttttcaacgtgggatgcgtacaggccgatgagaactctttcgattcatcatttgagtacgtcgatatatccggacgagatctacaagtctttcctatctttctacatcgacacgcacacaccatcgttctcctcaacctttcaaaaaacccacttcaagagctcccatctgattttatccaggcttgcacaaccctcagagaactcaagatgtcccatatgtctctgaaacgaataccacagtcaattcgccaaagttcctcccttacccggctagacttgtcttgcaatcgaattgccgatttggaccaaggtggcttcaatgatatccccgggttactttctctacgcgtacagaataatcggctttccgtcttacctgcttacttcggccagttacgtactctcaagtatcttaatctctccaacaactcttttgaggcgttccctagtatcgtttgcgagataaggtcattggtcgacttggacatctctttcaacgcgatctcataccttcctccagaagtgggaaaactagtgaatctcgaaaggttccttattgttggtaacctggtgacctcgatcccaagcagtttcgctaggctggagaacctacgcgagtttgactgccgacggaatcggattgtcgatttcgagtacgcatatgcccttccgaaactagaggtgctcagggccgagaggaacgatgtgaacgtatttggggccaggtttggaccgaagatgagcgacgtcaacttatcatataactcaatcaccaagttctcattgtcatcccgcagtccagacacagcgttcggccttaccaacctggatctatcgttcgccaagctttcctcgattgacgatgaggccatggcccatctggttagcctcgtcgtgcttaagctagacggaaacaagttcacaagtttgccagatagtatagcaaacctttctttgcttcgggaaatccactgcgccgataatgctctcactgttctccccgatggaatttctcagcttcagaaacttgagatcatcaacgtccataacaacaacttgggacaaattcctcctgggatctggtattgctctagtcttgtcactctcaacgccagttcaaacttgctagaaacgttccccgatccaccggaggaagccactcaggtcaaaagagatttctctaacgaggatggcgacgaaaacgatagtcctttccctctaggcgccagacttcgtcaattatacctatgcgacaatcagctcacagacgacgtcttccacccggtctctctgctcacctctctgcgaacgctcaacttgagttttaacgagattcttgaaatcccagcgtggactcttcggaagaaccggtcacttgtggcgctctatcttagcggaaacaagctgacaagcttgccagcagaagatctagagaatctgatgtctttgatggtcttccacgtgaacgggaacaaattacaatctctgccggcggagttatcagatatgcgtcgactaacggtgttggatgtcggaagtaatgtgctaaagtataacattgataattggcagtttgattggaactggtacgttccaacaaattccttgacctttttcaccattcactatatttcattctaggcgcttatctcttctcttttgaatctcttccatagggcaaaaaatgttgagctccgttacctaaatctatcagggaacaagcgattcgaaatcaagcccagtgccgatcgaagccatctcaacgagtactttggccaaggcaacagccgaaacgagtttgctgcaagttttgctccactcgtgaacatccggacgcttggtctcatggatgtcactgtccgaattatccctcccgatgagacagaggaccgacgagttcgatccacagtttccgaagtcaacaacatgtcgtatggtttctccgatacgttgggaaagtacgaacatctccttctcaatgatttggttgtgcctagtttccgagaaaaggacaacgaggcgctgtttggaatattcgggctcagtcatgcgacaaatccgggactagtcagtcggattccttacctcatctccgaatggtttcaaaagactttctcgaatcagctcagtaagttaaaagaaggagaaggcgtggcagatgcgttgcgtcgaacgttccttcttcttaacaagacctgttatgaggccctaacatcagaaagtatgaccggccggaaaggatcccaagcgagcgctggagctacgatgaattctggggcacaaaacggaccatcctccctaaatgccgccgttcttcgaacaggagcctctgctgtggttgcttatgtggtcgacaaagttctttatgtcgcaaatgccggagcttgtcaggctgttgtctccaagaagggaacagctgaagcactctcatccaagcatgaaccctttgagcgatcggaagctgctcgaatccgatcagccgaagggtggattactgccaaagggctgctcaatgaggagctcgacgtatcccgtggatttggcttttaccatcttattcccgctgttaattcttgcccggatgttcgctcgtacacgctttcggactcggacgaatttgtcatcctcgccaacaaaggtctttgggactgcatgacatatcaaacggcggtagacatcgctcgaactgagaaggacgattcaatgatggccgcccaaaagttgcgagattttgccctcagttatggtatggacggcgcaatcatggtcatgattatcagtgtcggggatctgttcaacacccggatgctagctaaaaaggccgcgttcgacagctctacactgaccgaaggttattacccgaaacgagctctgagaaagggcaagatcgatcatgtcggggaccgaacgctcgctcgacttgaccgagaaattccacctcccactggatttgttgctatcgtctttaccgacataaagaactctaccgcgctgtgggagacaaatcagggtatgcaaacggccatcaaaatgcacaacagcttgcttcgtcgtcagttacgaagtattggtggttatgaggtcaaaacggaaggagacgcgttcatggtgtctttccccacggttgcctcggctgttctatggtcatttacctgccagctgatgctgttacaggaagattggccgagtgagattctagaatgtgaggatgggaaagaggtgttcgacgaagatggtcagattatttaccgtggtctgtgggtcaggatgggcatccattggggtaacccagtgtgcgaggcggatccgatcacaaaacgaatggactactttggcccgatggtgaacaaagcgtccagggtaagtagtgtagcggatggaggtcagatcatggtcagtcagggagtcgttcaagagatgaaggctctgtttgaatccttggatgctcctcaaacggatgatgcgatggacggagaggtcgaggagaaatttggaccgcatgctgctcaattgagaaagctcggatttggtgtgtcgttcgtcggggaaaagaaattgaaaggtcggtctacattatgtttatgatcacgttaattggaggctgatcattgacatgttcctctttactcttctgaaggtctcgagaaccacgagaaactttcattggtttacccagcagccctttccggacgactggcaagcgtagcaaaccaagacaatgtcaagaccggacagatttttgagcccaagcaagggctcctcaatgtcgattgcgtccgatatctttccttcctctgcacccgactcgaggtgctttcctcgacgggcgttccgttcgctcatacatctcaattgccaaagaatacaccgcgacgaattcctactacttcaacgcttgtaaatcctcagatcacgttggatatgacggacgaggagctttttgcgatcgttaattcttgtaagcctcgatttgttttcttcatcgagagatttaagttggagcgcgactgatggatgtaatcatgcacgacggtttttttcccaataaagtgacggctcggatcgagaattcgttgagcacaatgtacctcaaacaactcgatgggttttctactgttctggccgcgctttcgcaggggctcgccatggattctaggttgctcgttcatgccatggggttgttcagtaacctgatgaacccggctgaatcttcttctttgccttaacttcttttttctctggcaaatcggtcggctgttttgtcctttttgttcatattctattctcgcctttcctctctttccttaagcattctcaagcctttttccttatcagccttttcaattgttgttctttctcttctgaggaaagtagagaaggatccatcttccatcttgcctttcgggctcgtcgttgtatatcaagacatcttcttctctccttctacactttatcctgtctcgttcatgattcttctgactcatgtctacttcttccctacatctgtccctcattaaatctaatctaactacttatccctttcccctcatcttcctaattctgttgtattttcctttcctccttccctctgcgtccacatgctggaaaatgttgttttcactcctttctcaaaaataaaggcgtatgtccaggccaacgggggatgtgttacatttctatgtcctatatcttcgtgtttcgtatctcacggtcttctataacttaaggttccaatgtttcatgtctggtgtgttttacacccatctttcttggaaggagagaagtgacagacgatcgtccgtttggctcattatcagccttatcaacaacaatatcatcatcatttgcgcccctagttgtttctaaaatttcctccgtgtcacggaatctatgaaactgaaaaaaggaaaagagaaggaagacggatctatggcatgcggcatttgttttagggtttcgtatataaaatcctcaagaggatgagcaatggggaataggggaggggcagggaagagtggaatgaagaggacagatggacggatggatgggggtttatacaatttgtagacctgagttgaataaatccaaatctatgacacacgtacgtgcttgaaagggggcatgaaggggaaggagaagagaacggagaaaaggaaggaagagaagcccgtgcgcatttgagtcgtcttgactactcgatcccaaaccaacgccttttcaattctcgagtaatcctggacgtctcggctgatgctcctccttctcccttgagaactgtcttgttttctatcgcccgtctgtttttcgcgcccagatagaagagaggaaaaggaaataaaggaaggaagaacaaaaaagagaagaaagaaaagttcagcacttgattttgcgaagaataaaagcaaatgaaaagtcgaaacgcaccggcctagataaggcataacatcttgaagaccaccccaggggacgtatttcaggacgaggggggacccttctgggacgaaggtgtttgcgatcgatgatgtcaatgcgtcgcacatgcctatcatacacaagtcaattgtttgttcttcaggtcaggattctttctcgttccatttgatttcctctttttgtaaaagattacgtctgaagacgaaccgtataattgtcccatggagactcgatctctgactgcctgggagacacttaacaatgtctttccgtcaggtccaacctggccgaccgcgagcttcctgtcaacgagaccggcgatgaccttggcgcaactttcctggttgtgcgaggcgatgatgacgcctactgtgggcacggcggtaccgctggcaacatccgactgaacatgatccaagagccagtccagaccggaatcgaaacaatcatcagtctctggcttctgctgccagactggttccggaccggtggaagcgtagaccgggtgttgtcgccatcgatcggattcgacgccgtggtaggcgcctcttacgagcttgacaccgagtgagtatccattggccttggcatgaatataagagtggcgcatgtgttccgggtttctgatgaagaggattttcaaaaaggtgaaggtttgtcagcgctttgtggaacgtagatgaaggggtagagatgtgaaggaaagaaaaatagcaagaccaaccgtcgaaggtaggcctggtaggttccgtagacaagaggttggacgtttggccaagattcggccgtgaccggaatctcaactgtatctgcgtttttcgtggacgaagagggtaactcgaaacccaactttccgatccaggacgaagagaaagaaccggtggtcgaggtagaaccgaggagggagctggagggttggctaggtgtcttgttgtactctagagataggatcgtttggaacgcgtcgattgccggctgcaagacgaaccgacaggatgatcagtatatagtcggaagaatgagttaaacaagccgaacgaacctgataccaagagtattctgcatcgatgatgactctgactccagagtgcctagctttgtttaaaattgtcctcatgtccttgtgaagcaatcgaagagcctcgagatcagacgtcgagactccgttcgagatgtttggcaagatgagcgtggtgtttcctttggcagtcatcaattcgagttctcgatctgtcggtgtctgcgggaggggacgacgtttgtgtaagatgagtgagtaagaccgggagactgttgtcagttgaagattttgagatgaaggagatgaagaaaatctcttacgccgggataatatgttgatgaggtggcatctggttgagctgctcgaagcgcgagaatggtgttcgacgcccgttccaacactgtgggatctgccatcaagccagactggaggatggatttgaatatggacagaatgagcgagatgggcgaggcgaatgaggcagatgacgtaaaagagaaaatcaagagacacaggggacctacaaacttgagggcaatccagctggaaccgatatcatgctcgttgttctttctcgcgagacttgcttcatatccacacacttcgatcgagtttacggtctgtgcgatcttcttctctgcctcgattctgctcgcctgaagttttctctgtccttcaggggagtcagccggcttgtctgtttggtcatgagactcctcatcagagacctcgaccgaataattaagcagcgtcccgatctggttccttctgagctgtcgaatggtgggcaggcagtcgaacgcggtttcgccacccacaaactgggcgaagaatgtgtgcttcaccgcgaacctgaccgatggaaggagaacacggggacgaagaagaaggtggaggtgaggatcgaaatgatgttgcggtgagcacgaggacgaacggtgaggcatcacaagacctagatctagaaatggagacctagagatgaagacctacatggttaaagaggatacaacgggaatctgactgagggtcgaaaggatggctggagagttatcgaccacccaagggatcttgctgaagaggagggcgacaacgggaagagcgtggaagaaggaaaggacataagcgaggataagcaaatgaagagcgacacacacacacatgcaaagaagagagaagacaaaacatagagagatagagagagaaaacgccgtctactgaccagcaggtatagacaaaccagctattcacgagctggcttgtgggcgtacttctcagttgactatctacgggtggtgttgaccagggtttgacgatttgttctgcctgcacggcattctccgactgggccttgtaggcgagaaggattcctacggttgtgatcggagcgagcaccttacctgcccgaatagagccaagtgaagccaagcgggacatgtgagctgggtgtgagtatggatggatgagtggacgagtatgtgagtgattgatgaagcgaagaagaaagaggaaaggaaaaaaaagaaacagattggctaaagatgaagagagaagagaagaaaaagaaggagaacacccgcgcgcttgccgcccgcaataaccgccagcgagtgactttgtatctgtgctttatcctgtttgtcctacactttgcaacccaagtgattctatcaggagctactttctattcggaattctacctattggttctatacagggagggagtagggtacaccgaaggcgaagcacagaaagacccaacagggaggtcgtctgcgttgggttcgattgagtgagcgcggtatctctgagacatagatatcgttatcctgtgaaggtcacgtgctatatctgtttgttatctatcgaagtttgcacagccctaaatgaagcgtgatcctgggcgccacaacaacgtgacgctgcatcatcaggcctgcgtaagtcattgtaaacaatcgagatagaaaaaagggttcgactataaatagcacagaagaaaaatgtatgacagacccgagatgttgtctaagtatcgctcagggctaccataggtgaatatagatggatagtttcatctatttctgaggacattcccgggcctgcccgtcttttcgtgtgcctgtgcccgtgcctgcgtgtcaagcccctgtttctgatccctagtgcctagttcctggtgcctggtgcctagtgcctgatacgtatccctgcccgtctgcttgctttccttctctaccatccgtttccctcgttttttctccttcttccttctccccctctcctttgtcttcttccctccgtcttgacattgctcgcttcctgcttcatcgcactctgcacacccaaggtccgagctcgctccaggtggtctcgttctagacggttttctttctctttggctcttctgtcggcctttctgttggctcgtttgtcagccagtctggttttctccccttcctctcattacgctcgcttgagaatccccttcctcgcccacttctcgctcttctcacgttccttccttgcctcagccgtcctccccctcccttcctctttccctttaagatgcctctcgaacagtaatcttcgtggtcggacgatcgacaacacctctacgccttgaactcagctttcttgtttgagaaaaactctattctttctcttccggcgtccagcaggtccgtgttgacgggcccgacctttttctcttccatctcggcctcttgtcggttgactgatccagacatcatcgctttcgtccacagctacacaccccacacacacccagcttttcactatagacgacttcccttcccgtttttcatagaagttagaaatagggaaacaaatcaagaaagaaaagtcaaaaaaacaccgcccgtccaggacttctagaccggtaagtatctcccatacgcgtttaccgacgcatatactcatcgactgactcccggtccgtcccgaattaatcttctaatcgttcccgttacaacagctaattcctacctcgtcaccctcagaccacctcgtagcttcaccatggcggtcaccacccttcccggcccagtaggaccaatttcggcggatacctactttgctccctcaccgacgttcctcccacatcatcatagatgctcctcgtcccagtcgaccatcagaccaatccccatccaatcgcccagcctgccccgaaatacttctggtcggatgtctgactccggactcacactctgtacggacagtcttcctttccctgcaaacgacctcaaacgtgtccgctttccttgtcccgtgggcgagccagacctgttttcggtatgtgtttgttgctttcgtcaaaaaaacctggttgcagctcgtcctcatacagattttttgtacttgtctcttcctcttctcattccggacaatatcagtctactcatcacacatggtccccactcgagtacgatcgaacaccaatcgagccgccgtcagaagaggaacgctcgtgtttccttcctaaacgaggtgaacgttgcttctccgcccccatgccgtgcactcttccatccagtccctcacaaagcccatatccaaagtcctttatcctttcggactttgatccaaacgactcccccgtctggagtgaatcagaggaggatgtttgttcagatagtccggtcgatggccaacacgccgaaggcagtagcgacgatcacaacgatcaccactacgacattgacattgacaacgatgataatcacggcgatgatgatgaagagcaagacgaagacgacgacgacggcgaggcagtcgagagaaggttaagaatggcggccggtctatggggaggtagtgagagtagcctgtcggatggagacgtcggcgatgacgatgatctcggaagtgcggtggctcggtgcaaagaaagactcagactctggcgattgggctgcgaggagggtaagtcctattttccttctctctctcttttatcactcacgccccctccctcttcttcatcgctgacatcttttcctttgcttacccctaaaaggtgactcgtctgtgcatcgagagcgtcttgatgagacagatacctcagatgatcctgaaacagactgtgaacagaccccttcgtcctctaccttagtctttcctatcactatcactcgccaatccttctctggcttccccatttctccctctccggccgattaccatcccgatggctcgactcccactccttcctttcatctcgctgcctcgacccccactccggccttccactttcccttatcgaccagcccaacgtcggccatggcgatctctccctcggaagcatccccatccagccgaaggctcatgtgggcccggtcgcttaacaaacagttctccggtcatctcgacgatgaagcaccagccacaccttcagttgatggcgaacgccctccactgtcgatctttcctcgagcaaactggtcgtctgtctcggactccccaccgcccacaccagattgggatctgacgagaacgatgacgatacccgagccgtcaccgtcatcacagctcaaagagtctcccaacaagcttccccgcctgaccagaaccgatagcggtttctttccttccgccaaaccgataactcccagtttggaaacgctttctaccatgatggacttgccggattctttcgaatcttcacttcccctgtcacccgccgagcctgtacgccaatcgtatcttgttccctcttatccgtcagactcagcttctgtctcgttcccgacggccagcctggatccctcgaggcaatcaactgagcccttattgttctcgccttcactctccgtttcatcctctctctcgctctccatatcggatgattctctttcggaaggacaccccctcattcgtccatcaccacctgacctctcgaccttttcttgggctcatgctcttttccgagagaagactgactcggttgcagtcgaaggggatgaccgggtgtcgtttgacagctggtaaagcgacggatatcccctttttttccctaccttgtcgttttctgttctccctcaattcgtcgctgttgttctttcctccccttccattttcgatttctatccctttttcattacattcactttccctatacaacacacatacacacatcaactcacacatgcaatctgctcgcattcggtttgaggaattgacactcttctcccttctttccgacccctccctttcttaacccttacacgatccgtctctgtctcttttttacttcttgaatcaagtgcacccaacatacaccgtcatttgtccaatattcttcttttctctcgtctcgagcgagggtcttgtttgcctttttctcttcttccccttctgcttacttgcttgttcatttgatcattaagacttacctctttcgcttcgagtcccagtttcagttatggcgctctttttttttctcgttggtgaacataacagctcgatgggttgtcgaatacttgtcgtttgtttgtttgttctttcgttctttcgttctttcgttctttcgtgtgtgatggtgattgcatgataccctgcgcctacttcttttttttctctcaaagtggttttcgatacctttaccgataccaatatcgacaaatcagcgtgaaatatcaatcaatcgatcactaaaccgactgattgttagatagaagaaaagcagatctgaacgaaaaaaaagaagaagattatatgaaaacaagttgaataaatcgatagataggatcagtaggcaagggagggaggtcagttgcctcgcctggggtgggggagcttgagagtcagagaatgaactatcatccggtcgaccggtcggaaaaggtatattaaaatttgggaagcataatgaacaaaatgagaaacagaacaaaaacaaaacaaaacagtgggggatcaagcgtattatatacacgaaatgagcaaagatgaaagggggaaaaaggggagcagattaaaagaggagaatgagatgactggaaggaagaaaagaatgacaatgatgatgacaagcaaagatcgagatagagatatgttgttccaaaacttggggaaaaaaaagacttcttaaaggacaagatgggcttggaagtctagaatgaattgggaacgttcgtcaggggggatgccgattgggcggtttcggctgagaattgagagaaaaactattgttttccaccggtcccccagaaacaacagaaatggaagatcaaaaaaaaatcaggcgtaagaacgagtgttctctgatacagacatagctgcgagccggaagtcaggtagaaagagaacataccgaatcccatgaaggccaatcaaacatctggtttggtaccccactgacgagaaattcatctgaccaattcgaacttggtgtgccctgtaacccactttcagcttctccgctgcccgttcggtgcgcttgccccaatctcatctccatgttcgtccctgaccccatccctaagcctgaatccgggctttgaccagaaccagaactagatccggaaaccatgccgttctcgatcgtcagactcggtagaccgggcgttggcattggcggaacaaacccgacgagattgcccgtctttatgtccgggttgaagttccatcccgatcctgttcctaatactccaaagtcaaccccgtttggttcttgttcctgcccagagatacgtaccgactcggaccgagagccaccggccgggctaggtcgatcggaaggctcgatcgttccctgcaagacgccagactcgtcaagttgtttctttaacgcgtcagccgccatgaatacgcctcctccgggaagagatctatcggctttgaaagagacggcctcatgcaagtctggtcggttattccgaacgccatgggtagggttaagtcgtttgttgtttgcctggtgaggatgctgaccatgattaccaaaggatccacgaccccgggcgtgaggcgaatgtgcatgaagcgctgcgttgtacaagagagacattacttccaccgtctgtaaaacaaagcagagaaggaaggtaaagaagcggatgagatgatagcttctggaaagccaaaggagcaacaccgaaacgagtagagttgatgacttactctacgacggatactcatgtgttcaggttgcacagcggtttcccatctacggcacgtcccacttagcgttttgagcgcttccagcgccgccggatctttccttctagcccaggtatgatactgcaagaacgagaccaactccgttcaactgatgcatcacaactttgatctgacgaaagagaggggaacacccgtacctgaatgagcgctatcgaagtggccgaataagaggtcacaaaaaatgtatccaatgcggaatcattcgcatctagccaaaagatagcctctttagacaacgaaaagcactccgtccaggaggagatatcgaggcagaacgttaggtgtcgaggaccttcataggaaatccgctggtggactctccagctgtgacatgatgcaatggaaagaacgaacaaaattagtccaagacgcctcagattcggactcaagacgcctcgatagaacaggaatacatacaacaagaataagattgcagtataaaacacttgcaagagacctgatcaaactggactgtcagtgcactgcgtgggaatatgtacagaaagtcaaaagacagatacgaacctgcttgcagaccagtatgaggaccctgaaattgtaaagccggagcaagactagatcgccagaacctcaactctcttaacaggtcgttcagttgttggtcattcgtatgggctaaccccatcggacttgaaaacgaacggtcaaggaaacgaggaatatcagaagacgaaacgtcttgtgacagagatgaaagagcacatacccatagatcgtcttggtcacttttccaagtaagatgctcagtttgagaaattcgctgaggaaaagataaggcgcgccctggcaggccggatcggatattcgatcaggtaggggaacctcgaacggatcttttgtcgatcgttgaaaaggttcgttgagatcagcccgatgagaatatgagataaggaaaacaaagaaaagaggcacttaccgggtagaagaacgtcgcaatcgtgcagatcgatcaggattggcacacctaacgaggccgcgtaccatctgtccatgatgacacagcaactccatacccgtctcttcagctcgagctgagagtttcggaacgatggtcagacggaagagattttgatcagcacaaaaggcgacagggaatgctagagaaagagagaagcaaggtgaacgtacgaaagctcgttcttccaatcgggcttgatccgacaagtggtcggtcttcttgatctcatctcgatggagaccaagctcttgagccctgcaagacgtgttggtaatttgataagaggcaagtcagtttacagtctcggcgtcttccacggaaaagcctgctttgagagaaggtagaaaagagacaaagaccaagagaccgagatatgatggacacgtacattctgacggcaaccccgagtctgatgtttgcgaccgctccaccaaggttgacctccaccttgtgaagatcgccgacggtacttaggaccaaaagactctgtacgttgactagactgatttcactcagcacatcgttcttcttgataattccattgatgatctttctcaactcttggaagatctctcgggggatgtctcgcctggtagctgccacgccgcatatggcgtacagcaagagtggtggaggcgaaggaaggtcaagaaactcgtgcttggtaatgacagggaagagcggggaaatagtggtaaagtagatgttgagaagactttcgaacaccgccggggtcaacttggaagcgcctccattgtcaccgaagcgagaacaaggttgcttgccagcgaggccagcaagatggtcgccattttcttcggacgaaggatcgtaaacttttatcaatccgtcgccctcagctccgatctcatagaacgtgtggtgtttgagatcgtactcgctgaacgagcccgccggcaagctggcacttgaatggagcaagaacggaacggatgtcggaccttggactctggccagtcgaggcccttcgttagaggatctcggaacgatcttcggagggttcggtattgaaggcgaagggttggccggggacaagttgttcggcgcggacactgaaagctggtacgggctgtaagtctgagacgcgtagggcgacgcggccgaaaacgggtgctgatccggaaaagacgacggctttggcgacggatggattgagtacggatgtgaggctggtgcgtagtgaggttggtttggaacggccgaaaacgcgagatttgagatcccagaggccgacggagggaacgaacttgtcgttgaggagccagctcggccatgagtcacgatagccgaggtagacgcagaaggtgcgatagaagaggcggatgaggacccagatcgatgctgttgttgttgttgattaccaggccaccggtcatctgttggaggagatcttgtaggcagatcctcacctgaggtatcaggtgtggccagactcgacttccgttctcgggataggacctgggaagcggccgaactggtggatgccgcgacagctgccgctgattccgaacccctcttctttttgaatctggtctcggtgatgggaaggaaaaaagtgcattcaacctgggcgtttagacaatgcttacaaaccggaggctccgagttgggcagaatgtcgcatctggttttcgagcttctgcatttgtcgcaagctcggctcgttttcgttcgtttctcggcagacgattcggatggaggcgatccaggtccggtgagaaccggagtgagtacagagggagatatcactggcttctgcttgtttgacgaaggaaagggtgaggtattgaccgagagtgcaggcagagcgtcaatagtagccagctgcggggatgctattaatttgcgtttttttgatggtgagagcgagaccagaaccgaagcatccatttcagcaaatgatatgagcagatgcagagtttatggcaaagataaaggaggatggcggatgctgatggacgatggccaagcactggcagcactggagactcaagaacaaagaagaagagaatggaaagcaaggatatgcggcccaatgtctacaagatgagcaggctatcgagagacgacgatgagggtgtcgaagttggatgatggaaggaagtaaacgatgctgacgaagagagagtctaaaaaaagcatggaaaacatggagagataccatcaacccagtcgttgatctctcttcacatacatctgctgacgacaacgcacacaccgttttatcttctttctctcatgctgctgtactgtctttgatgaagctgacaagcgttgttgctgagccatatgtcgagcttacttccttcgctcgttggtccgcgcttgagacccgcctcttggtgatctgatcgctgacattgcaaatccacatccgttctcgagtatcgtgtgttccggaatgatgaccatcgcctgagtcaataagtttcgagagccattgatttgagttgccatgagagaatcatcaaggtgagactagatgctgagagactgaccatcatcagttctctcgagcatcattcaaccctcattctgccttgcccgtccttgacacgtccgtccagtccttccattttctccttgcccttcaggccatgcgctatttcctctacactaccttctttcgttcgaacggtaccatagatactcgcggtcggccggccatctctctctctctctctctcgttacaatgtacccgtcaggacacatatgttgaacttgttttcgggtttgtcattgaatgaaccacgacattgcttcggtagccacagacgctggcaatgcaggttctcatgagcataaacagttcagtactggagagaacaagttgaaggatccttcattctaactcagttgaatcacaccgcaaactttgaatgtcggtcggaacacttcacaatcactgattcaccaaaagtcaaactgctgcatccaaccaaatggcttcatctctgatgctactaggcatgttctataatgttacttgctcccaccctcaacacatatctgtcctagtatgcgcacacacaggcagtatggtgctccttccatgagcaactggaaggcagaaaacaagacccggcctccgacggttactaaccagccagatacagatagcatatcctggccggacgacgttcacgttggcattcatccaatcctcaaccaccaggtcatcgcgtaggactcttgtctgattcaggcgagaacaagtgagatgccaacagaacggatgttcccaaagacatgcttcccggttccgagaggtaggtatcatccgctcgagttcttaccttcaccttgcaagtcagctcacataccatatcaaacacatgtccgactttcttccttccatagcaatacactcgtacgaaccatttataatacccagatcatactcatccttttgcgagccaaacaaacggaacgatatctggaattcgccgggatggaaaccgaaggctgcgggaccaagattcctccttccgaagagtgaagcggccgcttcaattcgaatcgtacctagaacaccggcagactttggtatgaaccgatcaggtttcttcacaaaaaagacgactagaccagcagaaaaagaaccgaaatcccaacctgttcaggtcgtcacttgtgtttgtctcctattcttcgcttgttaccgtctcgtaacgttgtttcctctctttctttcttagtctgaccagtctggcgattgcgttcaacagattcacctcttgcctcccgaactagattcgaatactctccggaagttcttctggacatccgggattcgcgttcttgaagcttggaaacctatcggaaagcggtccggtatgatccagacatcttttgaagatcaattcaaggcgctgcgtcggataaatagagaacccaggccatggggggtgagttttgaacacttatatgagtctctgtgtgttttgattttgatgatcctgattcactgattcattgatggttcgttcgaccttaaagatcctacaaactcaatcagcaggattggcgacggttgcgatcgtattatctccattagaggaatcatcgttcagacttgcctctggcaaattcagcatcgatccaaatagaaaagacaacaatgcgtcaaaaatatcaaatccatccacctcctcctcctcctcctccttatcctcctcctcc

SEQ ID NO: 179 - DNA, 87196 bp, Xanthophyllomyces dendrorhous
gcacacaaccgatagggtctccgttacccgtctcagtacgatcgaacgctccagaaccgaaacagaaggggtctgtaaaggccatggcaaagctcgaaaaggctcagaaaagcccacagacaaagaacgtttcaactcagaatgtttcgtcaaaaggcgattcctcaacatctgcagacgtcgtgttcaaacagaacacatcaaacgttcctcctccgcccaagacgcagaaaaggccttctgaaaccaacattgccggtaccccatcccgacctaaacccataaccagacagtctgataagaaacaaagggaaatgtctccaccgaaaatcaacaaacaggtcaacgttgggagtgtcgtaaagcaaaccaagtcgcctatcaccgaggctaaatctcgagttaaaacaccgaccgagaagaggacagatacgaacgacaagatagaacgagtcaagacgacgggcgaacaaaagacgcagccaagtgcctcatcaccctcactttcagccaaggaaaaaaaaaagaagaaagacctatcgatggagagatctaaggctattcaaaaggtacgactttctttattggaacttggttcagatgaaggcttcatcggctgagggtagtacaccgttctgtatgtcacacccccactcatctgtttatgtttcgttcaatttttcttgatctgataggttttgacgagtgtgtacaaagcggaccccaagcctgaagaaggggatcggaccagctctctcgccctctaaatcatctactggtatgttatttttattagtttaatcttacttttgtcaattctgcttggcgttgaccctcgctcgaccttcctgactgtttgtcgttcagaattctccatgaaggacgatcggaaatgcaagatcaagtttctagactgataccgggatatatagaattaatctccagagtgttcggacagctggcatgaagcgcagaaggaaatatcccatcgaatcacgatacaacattcggtgcggatctagatagacacatagtttagctatgtgggtggaaggaagccgactgattgtaagagtgtgcctctcggctcgggaagtcgaggaaggaatctatcgaatgtcctaaaggttaaggaaatcatcttcgtcttcgtccaaaagctcgttgacccatctgtttcatacatcgtgtttgtggcagtgaacaaattaaggaatgagaaaaaggagtatcagggacctgatttgttcatttgtatcgtgattgaacatgagccgatagaaaagaaagggggcaaacctgaagaacggactagctgggaaaccgaccacctatgatgttgaccacccatatacccaccatcaatgtagaacgcatcagaccaatcacatcaagcggctgacaactagagtacaaacgatagacgaacattgttgtaatcgccttcgatcttctcaatcaatagacctcccagaccctatacacaacagagttgattgattcagcatgtacaccagtcatatgacgcaaaattggatacaaatgaaggaaaactggtaggaaatgcatacctgaattccaaatccacctgctttcccctgatgtgtgtttcaaacagccgcgttcaacaataattagagtcgatccttcgagaaaagaagaaagcagagttgcttaccattccttcgttcgagtccactaagaatgcgagataaaatcaatcaatgacaacccagtgaaatcataaagacgaagaaaaggacatgtaagagaaaagtcttaccataactctctaacgcgcttactggattatttgcgaacgtcactaaagtagagcaggtggtcgaacgcatcgcatagccaggtgcgctaattgtgggaaatactgtatgtacaaaaatgaattacggctgagctctaagcgagtcgagacaagtcgggatcgaagaaaaataaaacgaggagaacgggaaagacacactcaaaacaacggaggtgataacctggcaggtttgactgttcatatcgagtaacattctcaactgtttcatcaatattttatacaaagtcaaattcagcttgatcgagtagattcacatatgaggaagcagatattcaaggcgaacattatctcctttcgaggagggtttctctaagatcacgctctccggtccaccagatcctgtacccagttcatatcttgcctgtgggtctctctgaggagggaacacaacgattgtatcggctatcaattgaacgatttacgcaagagaaagggtcagtgtcatgagaaggcttctcgatggtaggtttatgaggtttgacctgaaatcacaagttctggggcgtcttccggattttctcgaactagtctctcatagacttctctgccctaagattatttggtcacgacaagaaggagggttcagattgaacatgcgatctacattcgacttgaagggaagaacaggagcgcaccttttcaccggcggtcgccgttgggtaagcactcaggtcttctctgtactgatcatgcggtaaatcctcctcaaaagttgacggcacaatctccggagcaagtccctacattcaagtcagcaaacagatgcaatcaaatgcgtaagcttggcttacgatcagctcttgatagaaagtgattgagagaatcagacagactgacgagtgattgcaggatttctttccgccggggcgaggctgaggctagaacgacccgcttgttagccatcttgttgaaagccgggagggcgagcgcatgagggagcacggcttggtgctttgggagagctaccatgtttccgatccgatttatggtgatgaaagtaaggatgaggttgttgtctggccgggacgatgctgaagagcccagaggagctgacgtaatgggaagggtcactctcgtgcctgagttctgttcctccgctcagttgttgttgctttagcgcgctctactcacaccaatctcaacgggcgtggtgagcatgtgtctgtatacccataaggaaacctcgctcacatactatccatcatagaaacacaacaagacagatggtgtgtcgaacggaggggactctgaattggatggttacacttgctgatcactacttgtcgggaaggagccccgcaaaaatacacagcaagttttttcttggaatgcttttttgaacatcctaacggtcgtacccgttgcagcatacacacactcaccctcgcctgcagcccgcattctcaactcgatgggacctcctcaacgggtaaggtataactctcgcgctagagcctccacagctgggggctcatcccacaaaaagcgatccagatcgacggccgtcgtggacgagtccgttgctggtactaccgctgatggttcttccggaggagaccaccaaatggatattgtcgtcccaaaaacaaaagaggagaaggaagaggagaggaagcagagactcaaggccgaggttcgtatgatgttttctccctttttctttctgcagcgcgtatgttgtcaatgacccagcaagatctgttcctcgctcacgtacttgcacatcattctcaacagctcgtagcggcctcagagacgaaaatgtcgagtaagaagctcaagcggctggacggcttcatcgtacgtgcttcacacttcgtcggtcacctcatctgattcgttggctaatcttctctctttgtaccgtacaggccaagaaacttaaaaaggaagctcgtgttgagctcttcggaaaattacagtccgtcttattttgctccctctgtaaattcaataccgatcatattcatgaactgaatcgtctgtgtacctcttgaataaaacctctacctccaatgacagagcatcccaggcatcacttcctacatcattacttccttcgctcgcctcagcctcaacccttggttctagacatctctcttcccatgctgagcgagcggccaaagcagaagatttatctgtccgaaagttacttgacaagcagcacaaaaaacgaagactgaacgattcagaaacatctggttccggttctgaaggtgaagatgaggatgattgggagtccaaatttggagacactggtggagaggcagtccctctgcagcggtatattgctgaacccgaggacgaggctgagactcatgaagaattcatacagaaaggcagaccgacaagcggaattgatggggtgatggctgtagaaactctgccagcgacgggaaccgtaggaggtgcactcaagaaagtcgacttgggttccgtcgtcgttggaggggcactacgaaagaaagaggatggtggcgcgtcggtcaaggtcgtttcaatgaagaaagctaaaggaaaaggaaagatggtgagtttatcattatttgaagttcctgttgctttagcctctttcactgacctcgtcaatcttaaatctggacaagatgacatttggagcctggaaatcactcgataaaaaagcaagcgctccttcggattcatcattcgattcgtcagattcggaaatggatacagattcagaagacaatgacgatgacatgtctgactctgacgaagatgatatgtctgactctgaggatgacagcgactcagaggagaacgatgaggagagtgaggaggaggaggagatgagcgaagagcaaacgacgaagaggaaacgaaaggccacgaatttcaaagcttgggcgatccaacaactcgagtccacgtacaaacaagtcgatgagtcacctatcgatcctgcttctcttgctcgatctcaagctcgaccggcttacgaggaaggtctcaacttggtatctggttccgctctcaagacgcctgtcacggatgaaaacggccaatctgctgtcgaacccctttctaccgacttgaacaccgtccctcctccgaagaaagagtcccgaccgattccctcagtaaaaattggtcctctgggtgaaacccttcgaattcctgcttcatcccttcttgtccgatcgtcaaatcccaagaatagacaacttgtgaaccgaccagaggaacttcaaaagaagaggttggaactcccagtagtagctgatgaacaagaaattatggaaaagatattgatcagcaacgtcgtggtactctgtggagagactggatcaggaaaaacaacgcaagttcctcagttcttatatgaggctggatttggaactgctggtagtggtgcgcatttttctctacttttatttccccagggtctctatcccatgtaactcattctccttattctctatcgaacttgatagacaatccgggaatggtggctgtgacccaaccgagacgagtagcagccatgtcgatggctgctcgagtggcttctgagctctctctcccttcttccaaagtctcctaccagatcagatacgacgctaccgtgtctcctgagacagctatcaagttcatgactgatggtgttctccttcgggagatcgcaagagatctcttgttgacaaagtattcggttgtgatcgtagatgaggcgcacgagagaagtgtgaatacggatgtgttgatcggcttgttgagcagaatcgttcagctgaggaaaaaacggtttgatgaagctccggaaggtgccaaagtatgtgttcaattggttgtgtcgtgttttgccaaattttattgactttatcttctttggacttcactgtctatcgctcagcccccaccgttgaggttggtaatcatgtcggctacccttcgagtgaccgattttacactcaatacccgacttttcaagacccctccacccaccatcactattcctacccggcaacaccccgtcacagttcatttcaaccgacgaacaccatctgattacctaggcgaggccttaaaaaaagtcagcaagattcacactcggcttccaccaggaggtattctagtgtttcttactggtcaaggagagatccagacattggtcaagaatctagagaaggcctatggtgttaaggcttgggaagagaggaagagacagagagaaaaggcaaacctcaagctgaaagagaggaacaattggtggaaggaagataagaagacatcaaagaaggaagatgaggaggcaaagaaagatatgaagcttgttgcgaataatggttagttcatgttctcaggtctctcatacctgtcttattaatttcactaatgcatcttatattcactttaaccaaacactttgtccactatatcagccgacatggagatcgaagatatggatttcgcacaggagagggccgatctagcgggagatgtcgacgatggtgctgattctgatccagaagctctagatagcgactctgactcggaagatgaaatcatcttgaatgaggctgaatctgaaggtgagatatcttcgtcagatctatctctacaacctgcgccaatttcgaacaaattttgctgactctacaatatcggaatcttatctgtccttatctcgattagttccgatgcacatcttgccgttgtactcgctcttgccaagtgacaaacagatgaaagtcttcgccgaacctccggaaggcacgagactggtagtggtcgctacaaacgtagcagagacctcacttactatcccagggattcgatatgttgtcgattgcggtcgagccaaggagcgacacttcgatccggtgtctggcgtccaggcctttaaagtgtcgtggatttccaaggcatccgcatctcagcgagcaggtcgagcgggtcgaaccggtcctggccattgctaccgattatactcctccccggtctttgaaaactactttgaacaattcgctgaaccagaaattcttcgaatgcctatcgaaggaatcgtcctccaaatgaagagcatgaacatctcagctgtggtcaatttcccattccctacacctcctaacagggactcactagccaaagctgagaaaattttgacgctgttaggagcgttggaccccagtacgaaagaacgctcgttcgctacgattacccctcttggcgaagcactctcattctttcccgtttcgcctaggttctcaaagatgctagtgtctggtcagtcacatggctgtctaccttacgtgattgcctcggtggctgtgctagctgtaggagatccattcctgagagaggctgcattgggtaacgatggtgagggtgaagacgatgaagatgagtcgatggcggaggcatcggccgaactttcacatatcaggagcgcagagattagacagaaggaggaacaaagattgaagagacgatcattcttccaaactcaggcggttcgtttatctgtctcttttttccctttcctggtccgtttgctaccctccttgtaaagcgtcccggctgatattctctttcgctttcataggtttataactctctgggcaatggggcgagtgatgttttcaggatgctagccgtcgtaggcgcttacgagtacgatggcactggcgaaaagttttgcgccaaaaacttcatccgaccaaaggtttgtttgcatcaggccttgcttctttcgtaattacaaggtagctgaactgactgtcgtgatttatttctgtctattgacgtttattctcgtgaaggctatgcaagaaatacacaaacttcgagctcaaatttctcacatcgctcaagccaaccttccatctgcttctccttcttcatctatccaacctcttttctcgccaaaactctccccccccaactcgactcagctcaaagtcctccgacaacttttaacgtccgctttcatcgaccaagtagccgttcgaaaggacattttagatccatcttctcgatcggcaggtgcaaaattcgaatcaacaagaggagtagcgtatagagctatgggtgtggatgaagatgtctacatacatccgagctcagttttgttccatggagaacctccagaatgggtcgtttggcaggatgtagttcgaacgagcaaaatctggatcaaaagtatgtcctttttcctttgtccttcttctcttcgttcctctgactgaccctctgtatcaacttttccttttttgattggacgacttgctacttaaacttgaaaatagctgtaacgaaaatgaatccagcctggcttccatctctctccccacctcaatttatctcatattcaaaaccgctcgagacacctcgttcgatctcccaagcgaaactggtaggctcgaaggaaggagagactagggaaacgtttgtcattccgaggttccacatgtcagctcttgcttctggtgcagggttggatagcaaaggagtggaattgccgccgatgaagcgcatagaaatctggaagggtggtcgatggactttaaagtgatgttacagttgattcatgttctaggttccaccaaacttcacatgtttaagaatgtatttcatcgtcaacgattattcagtattccttcaactatgagaaactgaggtgtattttgttggtctacataaacagtacatctatacaaagaaagcccgcaaagcattgacatgaagctatgtcgacatgaacaactgtcgacaaccccttcattcactttcttttggggtcttttctccaaaaccaaatcctttaccgaacccactcttcttattcttcttggtacctgcttccccgaactcttcgttccactgcgattcagtcattgagagaacaaatcgattaagatcagttttcgataattgtaaaggtggaaaccatgcacaattttgacaagagtggtacgaaccttcctgagctgaggcagagatcccatctcctccgaaccagaacttgacgtgttttttaatgcatactcaaaatgccgagccataaggaccctcttcttgatttcctttttcgcagttttgccttctttcgtcgccgtcgtcgacatccttgatcctgagtctttcggtagaaccttcaacccctctaaatcctcttttggtgggttcttccaggtcggtatctccttctgtcggagaacgtcttccggtgacccttcggtagtcaccagcggagtctcctggtcagatggatctaaagagcattgactagcttgattctcaggcttagaactgatcgaagatgttgaggtgccggaagaagtctctgatgtagaaagctttggagtattcgttacgcttgatgagctatcggaggccgtcgagtttgaggtcaatccagattcattcttggcagaaccttcgttggcgttttgaggtttggcccatggcaaaacgtaaagctctttaaccgcttcttgagcagccatcacacagaggtctaagagattgatgaataaacccgaataagttacttgaaggttactttacttcaggtttaaaagtcaagagacaaacgtttcagatcactacccgaataggtgtcagtgtccttagctaacttcgcaagatctacgtcaggtgccagctcttctgttttgcaaagaattttgaggatggcttatcatgaaacataaccactgttcagtgtcgacaatctatgatgcaacaacagattctagctcaccttctcgttccttcagtccgggaaggtcaatgagcaaccgccgaggaagtcgtcgaaggacttaatcatagataaataagattggtcaacaccgtagcccattatattcagtgatatcgtttacaatccctatctacgcacctgcttcgtccaaatcttgaggtcttcatttgaggaaacaatgacatttatcatgacatattagtaaacggtatggggagatatcttcacaaatcggattgatcagcttaccggttggtggcgccaatcaccaccagtcttgtgtctttgttcaaggactgtttgataggtccaacagatcaataattctttcagtaatagctagtaagacatcaatttaagatgaaacttacagcggaggaaagtccatccatctcctgcataaactcagttaatacttgacgtctcgagttgtcaccagtgcctgccgatccagttcgagtctaaaatttagataaaccatcgtgaagttcttcaacttaaagccgtacggtgaacagcacagtagatgaacaaaaaacatacctggaaaagtgcatccaattctgtgataaccatttcaaattcaatgataagtttagcgtcccagtcagaagaacgtacattgatccaacagaagagaatggcaccaaccatcgatgaatacgatgcagggagacaattttcgagcgactgtgaagacagccttgaccagctctgatgagcacaggaacacgtattggtcagcccgttctgaatgttaacatttaaggttgagaggtagacactcactttcggcttctccgacatacatatcctgaatagcacgaacgaaattagctcgatacaatagatcatgagaaggaagagagacataccatcacatcagatggttgaatggacatcattcgcgctccacttgcttttgccaaagctctaacaagtagagtctttccagttccaggcgggccgaataatagagctcctgatgatgaatgatttttcaaaactgagaaacaatcaagagaaacagcgtaaatcgagtcagtatttcctcgatatcccagctttatgttgacttgataataaagaaaaccttcattgactaacttccagtgctaaacgcttccgggaagagaagaggtaaggagactacactcctacggcagacaataaaaggcaaatttacatcgggttagtctcgaagatatgatgatcgatgcaagaccaggacatggaagaagtacgaaccttatagcatcgattgttttttctggcagatgcacatcgtcaaacgtttctttcaccaattttgggtcaacaattgttggcaagattctcttctcatacttgtttagagatgagtccctcttcagtgcttcgatcacataatcctttccgtcctttgcatctttcacttctcttaatccctccacaggtagctttgggtttgtcttggatccttttactgatgcatcgacattttcttcaacctctttgactggcctggcgcttccatgtcgagtctcgttttcgatagcgttatccgtaacctctttgatcccgtattgaggtgatgcctctttccctgtaggaaaatagtagagatactcatcgaggctggatgtctggtgagcagcaaccttgtgcataaattctcggaaggcttccgcttgcccctggtgatctgagcgagcgattaccgcttttagaacatccttccatccgtatgtcaactcattgagcgaaagtcgatcttcgatggatgatcgagtagaggaactagactcagatcgtttggatgaagtgggcttggttggcggttggcgcttgagagacttgtgatcgatagacgctccagcggcgatgcccgagtaagcaacgacgttgtcccaaggaattatcgtttgcttggtctgtttgatgaatcgatttatgaactttgccgcattcgccgctcgttcctgaaacgccagcgccggaggttggaagagatggtgaggggtatgaatgagttcttcttgaatagaatctttacttgcgaacaaatcggccatcggctgaagctcttcgatacttcccgtgagattcgctttcgaagcgacggcgcctagcttgaagaggatttcgttaattttgaaacggatgctttctcgttggtgtgtttctctcttacggttgacttttgttggcaggacatttacaactctccaaaccccgtgcttagacttcccccggcccttttttgaaccaagctttctgcctcgctcatcagatgggaagaaagggctgtcgccgcccagaccaccgagcccagagagattgatccgaaaagcaactccttcttccgggagtcggtccatcccaggaaacaacgggaattcaattggagccaagggagtagttgaagaggaagggtcgacaaaaccaggaatcagatctccccaagctccaatagtgaccttttccattctcttctgcaagaccgctgttcgaagcccttcttcttctccctccggaacgacgtttgtcatttgatcgcgtgacatgttcaaccgctggatcggagtctctcgtggatattcattgaattcctcaggtagttgcggccaggagtgattcgaaggtcgtttgcttggcgcagaattcaacaccgatggacccaagccaagtacgatcgtagctggtgcggtatcgtttctaaaagaatgaacggcgtcggccagagcatggaaccatgatgatcgttgatcttttgaatttcttgttcctccaaaatcatacgtgttcttgagaatttctgcgttttggatatatataattcgaggcttgactggctccttggcagatgcttttgagtccacacttggcggtttggaaacttgagaccggactagagactcgaacaacatctgaactgcttgaggcagctcgagcacagaatatggagaaaaggaatttgatggagatactatcatgtcggtcgactgtgatcgagaatttgaaaaagtgagctcgcttgaagcaacacccaagtcgcccaccggatcacacgatggtatacttggttcgaatcgagtcgcctgtgttgagagcgcgttttcttcatcgtccaagtgcgaccggaaagcatccaagtcgatttctgtatgcagagactctctcgacgccgttgaagaaggaggagctggcggactagcgctcattagtttgaacggattgctatccaagggcatgatagccatccctgttcctagaccgtcaccatgaccttctgaacacaaatcgatggcatctaagaagacgacttcagcttctatctgagcagctacctcctccaccgctgcagtgactacataaccgcctccatcgatcgggcaataacagcctataacgggctcaacccgaccttcgtctgaatcagccgagtttcgctgagcgtagtacatggactccaagatggccgctttcagaactgagagattggcatgggttggaatcgcatcataggcgatactgatatgtttaggcacctttggtagatttaacgtcgaaggttcatcctccgaaacaggtgcgtagcactccggcatgaaatctggatcggatgaatatcggccctcaagcgttctgcttgaaggagctgtcacataaacatgagggttgtaacctttcaatgacaagctaaggcttttactgagtgagaagcccatcgagcttgtcatcgagaggagtcgtttgattgagtttgctgatggccgagaaggattgttcttaggtttcgaaggagtcgaagacttggtgatgttcgtccgagggaaggccactaaaggtgaactggagaaggacctcctagaactaggaagacccgatcgaatctgggccaatatcgtccgacgggaaacacgacagggtagcatgactatattaaaagacgatcaagatgaacagatcaagattggcttcagcaaggggttctgtttctagataggttagacaagtgatgcttctcgactctgttcgctctgagaaaccaaggccggaatttacctgatacagagaagttatatcagaagaagacttccacaagaccagtttacagcgaagaagaagatgagaaggagagaaagagagaaagagaagaagggaaccgatagaaaggggtgaagattcctgaatggcgacttgatgcagacgttgtgattcgggtcctggaaagacagtcggaccgatttctatcgagatgagagtcaaggccaacgtcagaagagtgaacgtccaaaggaaagatgatgggcaacgccatgctctcacaaagaaactggaatatatatactttgtcaggtttctatggtcccacgtatgcgatgatgttgacgagatgtgggcagtcacttggaggaggtcgaagagagcgaactgaatacagcgagatcggtgtgtcgtcaacatctcgtgggagtaacgactgagtcatcaatattaataagtgttatcatcatcttgcatgtttccgtcgtttcaagatcaatgatcatttcaggacccatcttggtcgatggacatcaaatcagatatcgtctcgtttcatggttgatcataaaggagttgttggacgatcaagacccatcagaagagttgtgttagatgatagattgcgcgcatctggtactttcaacgcttggcacaacacagatctagaacgagttagattacaagtggataaatcgcaagaagaacaaaaattcgaagaggagggtaaatgatcccaatagaggtatgagatagaggtataagaacgaaggagagaaaaacgcaaaggagggaattgaaccgaataaagaatctcgctagtatagagaacatacacaaataaacatcaagcctgaaagtcggaaagagcacgaaatgaacaaagatattgaaatgacactaccgactgtagaggaggacggtggggaagagaacccttcggcatgcacacacatacaatctgtcaaaataaaaggccagcaaaagaacagagacaaagaaaaaatgacgaagctttccacaactgctcaagatgaatcgcgggtctcaaagaaaccactgtcgttttcgttcatccttactctcattttcttccttgcctttcctatgagggagggttcggccacctcctgctcaccatcgccatccgactcttctctatcttcttccttcctctctctcttctccccaggcttaatctcgctcgtcttcacatccccaaataccagctcagtacgcccaccagcggcagccactgtggctaacatcgaccttcctactgcccaacttccccttcgcttctttccactttccaggaacaagcctcctccggcactaccccctgccctccctggtgttgcgttgaacttgataccagggccgccgccgccgctgataccaccgtttgcttcctctggagtcccgaacccggcaccgacgtcccaagtgccaaatcctgcaggagtagcaggtgcgagacccaaagaccttgtcaagctaagtgattgcggtgatgaaaactgatggcccgaaggaggtgacgacgttccgaacggaatggattttgatgtcgaagacatcgctcggagagaggaagacgaatcggccaaggacggaccaccgagcctaaccgaggacttggctgagcctggtgtgggcctgaaaggcgtcctggtggacgaaagcgatggagtgtagaccagggtggttgaggacgatgatgatttgtaaggggtagggaatatagtgggtagtgtgacggagccacccaaagaatgaatcaacggtgtggttgccgtgatagatcttctgggaggtacctgaggtagcgcaaacacgggttccttaacgacctgttcgcccaactttcgtttcagcgtgttaactctatgagatcggggcgtcgaaacattgctggctggctgaggcgggctggaaagacagccccggaaccgaaactcgtccgaacgatcagatgaattctcttcatcttcaccttcagcatcactgtcacctgctggctcaagacgttctcgttccctggctccactcggtcgtccatccagatcctcttcatcaaggtccttagaatccaaccacgcaggcttgacaacgacgactctgcctagactggttgaccgaattgagggcgtcggagtgccgatcactccaaacggagctctcggctcggccggaccagcgcgatctagttctctgttggaattcagtgatgtttggggaaggccgacaggagatgataaatcctggtgtctgctcggcctgtgagatgtttgtgtggtccggggttgggatgcaggcgagtcaggtaccggcaacacccaactacctacttggggccgaagggaaagcgagtaggctccggatagatgaggtgtactatgtgaggtcttcccggaagaaggaacgggcgcaaggatatcatctgtcaaaggctctggaggatgacgtgaaagcgatctggatcgggctacagacggtcgaccaggcggaaccgatggagattgagggtccaaagatcctccagatgttgatctcttcaaagcgaacgggttgttgtgcagacgatgtatgttttgagaaggaggaagtgattcgtccgactcggatggatgtttcttggacgcttgaccccatggcagatcctgttcttcatctccgttctcttgcaattcatcccctcgcattcgaccgtcaaccctatgtcggtctctacgttgttctctatcgataccgtccggggcgtgtccgttcctgtctgttctttctgccgactcgtcaaacttcacaggtgagctacctgtcttgagctgtaacaacaattcagccgccccatcttcgacacctcccgtctcggcccatgaacttttgtaactccaccctgcgacgtctgaaggtcctcccgaaggaggatttgcccatgggtttgctcctccagtattcctgatgccaaggtcattggattcagacgctgttgttcgaaacgcgtacgatggtctttcgggcgatgctgcggccgaggcaggtctgactatcatgtcgtacccattcgttccagtcttgacagaaaattccaacgccttcgctaagagtggtaccgaactctgacgaatgatcggtgcgggtgccgtcagacgggatccgtaatgttgaggatgaggatggacaagtgaaatgttcgttgaagaggattgttcgtcagaagactgcggatggtgatagttgaaggtgttgtctggagatggatatatctgagcggacaagacagaagaaggcggcggactcatacgtgatggaggcggatagggtgaatatgggtatgttgtggatgttacattgatctgtcgttctgtgtgatgaggttggtgatagtgggtcgatagagtcacttggtgaggtgggttgctcggctgagaaggaggctgtccgtaggtcgcttggaacgcgggatgatggggatagaacgtagcgaagccgggtgaaggattgtgccacaccctttgttgatgaagttgttgatggtcagacacttgaagtgatggatcgtatgaggactgctgctgcgacgaggaggaggattgaatgaagacaggctgaggggcatattgctgttgttgttgttgctgctgctgctgctgctgttgctgttgctgatcgatagaatctcgtgagaagtttgaagagggttgttgggacgtatagtttggttgaggaatttgatgttgccatgaagaatcgtgtgagtccggataagatatgttttgatggaaaccagaaccgggtctgttggatgtttcgccattaggatagtaccctgtttggtttggactccaatcctggctagatatgtaaggttgggagtggttgctggaataaggatacgattgctgagatcctccaaacgagttcttctccgttaacactgtccgcgtcgaagtctgacttcttcgaaactctacttcatcgcctagcgcatcgagcgaggcccctcgacctttgcccttaccaagtcctcgagggtagttctgctcgtaggaaataggatattcacccccagaagccggaggatagtcgtatgatagattgccgtctgcaagatcacgagaagtttcgtcagaatcgtactcatcatagccgatgtccgatcccgatgcctgggagtcaaagtcggacgagagggctgctccttctttgacagacggtaatctagaacgagcctccgcactgaaaagagaagcatcgtcgtcaatagatgatgagtttgaaagcatggcaatttcaaaagttgtaccaaccgtttccgtttagcccagcgtctcttactagccaatgatcttgctctcctctcttcgtccgtcttgggccgtcgatcgtcaactgtatgttcaagtaaaacaagaagtcaatattgctgatgaatagaaatgttcttgccgtgtcgaatcgatcgagtaagaggcgaggcatatacctttgtcccatctggttctacgaggttgtgctgataatggaattttatgcttgtctgataagtgacgtctccatattgagcctattgttttgaagaagagagcagataccggttttccttgatgattagaccccgtctgtattctggcccgtccgatgtgttgtggcacgatagcaagccaaaggggatgaacgactcacgggcatgcttccctgtgtatatcttgtcacaaacgaaacattcgtactctcctccttccttgcctgcactcggattgaaatcaaaccaccttccttgtttacctctgacaagttgtctgcccgagccctcttcgattcgaaactcaaggtcaaattcggtcccgtccaccatgacgcccttctcgatggtggtgagttctatattggatttcgatagtttcctagacatctttggctttgaatgtttcgagcttttcgacccaaatatcgccgaagaggatttcgacgagcctgatgaacggggtttgccgatagacgcaacggatgtgggatgtagaaacccagagatgggtggtgatactgatgttttcatctgagtggaaactgctgctgccgttggcgacgatatcaacgatgggtttgtcggtgatcgaactatagaaactgctgagagaagaggctgggcaggatggatggagggtgtggatgggctgggcttgaaggtcgctaagtcggactgatagtttggaggaagaggcgaaatagatgatcgagtccgaggaggcatattcggattagagagaacgacgagagaagatcggatggaccgagagagctgttcgggagaagaataagtagaagagaacgattcgcatgcgtttcagatcgctcgcatcaagacaccctcctgatgagaacacgaagagagcgagaagagcgtgtttgaggatgagttcaagagtgaatccaagcaggcagagagaattgttgtttagcgggacgaagagtaaacaagaagaggcaaaacaacaaggatttctttgttttattttctagtttgttattacgatttgtgtagtcttgttctaattattttcctagtgtcttttctttgtctttctatacctgttctatctgcaagctcactagcatgcactgagagcatttcttagatcgcagtgtttctgtctatgtggtcgtgtcgagtgtcagaagggtctcttgatcaatcgcagtacccttcatgaactgtttgagatgacgctcaaaggatccctccacctctttctattttctcttttctctcttctctcttctctcccctctatcgggttttcgatgaatgcgacgcgtcatacgcgctaatttaccaagacgcgtcggtttcatcggctcgctcaaacacatccatcctggtatctggtcgattcatagcctcgacaacggctgtatgcttgacgatcgttctattaggtctgagcttaacccaatcttcgcaacacgacacctccttctttcaagatctttgcgctgacttcgtccatcgcgtacgccagattatacaccacttcggacactccagactggacgatcttgatcgcacaattcaagcacggacatctgttcatgcacgcataccggcaaatttaaatcgtcagatcacacttgaccaagggaacacaaaggggaaaagacagggaaaagcgaaatggctaacgtgttgcagtacaagatcgaagatgatccgacacgctcccttccagcttccatcagtgcattttcctcggcatgcaaacagagacacatgttgactttcataccagatgaaacccaaggatcgtatgcacacgaaaaaaaaatgatatcagagaagagcagtgaaaaggtcacaaaacagggacgtacgtgctcctcctcgctcttcgcctttgttgcaccgggcgcatcctccctggttacaatttgtcatccctcgaggtgtgccgttgtatcctgtagacacaatacgcttgtcgcctaccgatatagaaagaaagagagagagacaagtggaccgatggaagaacagattagaggatcacgagatgatattgacagaattggcatctgaagacacgcacggacaaggatacaccccactcgtctcttcatgcaattcgatcgaagcgaagccaaagaggctaacgtctgatttgggaatagccgaataaacaagcgttggtctcatttaaaactacgacagaaaccaagaaaaagagagatggccataccataaagtacctgtcccaacccggtcgtaatcgttctccgtcttctaaatctatcttttctagatatgcccacagatcttccagcgtcgtatagttgttgacgatggtcaacccagatagatcgaacagttcctgcacaggcgcctgaagagtaggctgaagagtgagtgatgtcgcgagggaagaagagagcgacgtagtaggatgaccgtagaggcttagatcgtcagctgtgataaacgagggaaggtccaaacttatcggcgagcgatgggcaactttcgatgctctaaagttaagcgaagagatgagaagcagaccaggatcttcagccggctgattcatttcgcttgacgatgaccatcctgcctcttcagctcagacgatatattctcagaagaatgaacaaacctctcgaatctgaccatcgttccgctcttcacgccaactaataagaaccaaggtctcttgatccatccttcttggagcacgacggccgacgtaagatctgtcgtgaccgcattctgcctccatgtctttgtggcagtattaaggagtgagcatgaatctgagaacgttaagacattcttcgagaatgactcgcccggcagaggagacagtgatgttggctctcggagggaagggcaaatatcaacagatgtaagccttgcgttccgaaattgatagtggacgtctgcagctcactgtatttccttgatagttctagttgcagatgagagacagcacacacgttcaatccaaccgacgtcgtaagatagatgtctaaaaaataggggagcgtctgaaaatggatcaaaccttcgacatacctgatcgatggctatcctttggaagcccttctgagtctgtaaccaagtagcaattgtatctcttcccgagaaatctaagcctacgagcgctataaagaccattctatgtatctatgtatatatgtggttgtgctattgttgatgtaagagatctcagtctccgggtctgtgtgtatgtgtgaagctgctgaacaaaagaaaaggttgaatgaaacgcgtcgcgtgcgtgatgcgttttgaatcggtcagtcaattgtccttcccctttgatccgtttggtgtttcatctggtcaatccttttcttcgttgatctctcctctttcatctttccatctctatcaattctttttgttgtcggcttttcctgcctctcctattgatgaaccgaggctgaatcttgccggttgttgtacgctgactgggcagctcgttgaaagaccgatacttctgttaaagactgacgagtagctgactgaccgactgtacattcttccttcctttcttttctctcgagacctcaactttttctttcttttgtctcgcttgtccgtcaattgacttctgggtgttcgtcttccaggatctttttcttccaagcgcactttcttctgatatcctgatcaatcgacatgaacaagttcattcctattctggagacgagcctgcctgggaagactgaggcaaagaaatcaaagagctcaagcatagctttcgttgggctcaacatccttagagccatctcaacgatagccatattattggtggttgcttcaaccattgtcgtcatggtctcgtgagtgaacaccatgtcctttgttcttattcctatggcctcttcctgcacgtcaaggtgtctccagtcgactgaatttacgccttttcgatctcggtcatcttgatagtgatctcaaagcggtcaacgcctggatcaaggttagccgtacttttttttctcttgcgcaaaagacgagtcaagcgatatagtaacgctaaagagccatggcgttttgttttcctgaaggctggatctccttcttctggaatggcgaactcgacatcatcggccaccttggatgggattgactgtcaagtcattgagcactccagtcagatttcatctacatacaaaacgcttgttcttccttgtaattatacctgacatcaacttccttgctttcatttgatcttctgatctgaagccatcccaaaccaaacgggcggaccgttcttttctatattctatatgataattcttcttctcgtctgtttcgtcctgttcctatcggaactgggcggaccggaatacattcgcagatgcttcgagcggtacgtcttctgtgacttgcttgatcgcctggtgcttttggttttggttgaggtgcaaacgcttacatgcttgtttctgcgtgtcatcatcaacttagatatctgccgcctctcggtccagcgtacgggcttgccacccttggtttcactgaattattgtacgtgaatactgtactgtattctacttagcgcttgcccaatactaaaattgagagtttttgacggaatgtagtgtctcgaccgcaattctttcccatcatgtatccctgttcgctcagatatccgcttggattctgttcgtcatcggctgcgccaacttttgcttggttcgtcgaatcaatcgaccttatcctgaatccagtgcttctaagtacaggtcgtctgattttgtgttcctgctttcccaaactatgtttgaaaatataccacgtagggctacattggttctcgggtgaaggcgcaacgacagatcttttcgtttgagaacctatctacattgacccctcaaacgtcagccgcatatggaacttatcaagttggacgggcgtaccatcatgatcttggttccccctccttcgcggacgtcaaggacaaggttgtctctgcgttcggtcggaagcacaggtccgtcgaaatgaacgaagctttggagaacggaggtgaaaacaagaacaaaataaaggcgaagcaggagcgggtatatgtggatctggagagtggtcgtccaaacgtgcttaaggtaggaaagattcctggagtctcctttggtggacaagcggccagaagagaagctggcactagcattcttatttgtgccgattcagaaaatggtacagacggacctggctggggaggattcggacgaaaggcagagcacaaagcaaagttgaatggatacttgatctctaaacctataaacacgatgcccaagccatgatgatggggtttgtctcgctgttgtatatttatcttgtactgtgagtttctctctcttgcttttcatacctcaggttgcgcgcttatcagatgtagcacttcatcaatagatatcatttaaccctaaaaggagtttatcacgtttatacccgttcctctctattttatcaccattcgaccaaaggacgatatttccttcctaaaggacagtttgacgattcttccttctcctctttcttttatgttcgcatctcgttcggcttcatctcgacatgtccattctcgtacaagaaaattctaatatgacgcagtagctggtcggctttatcggtttcttccgccagtaaagtcggcggtgttcggtaaaatccatcttcggccatattcgggcaaccatatggcatttgtcgttcaccgccatatactaacagagtagaaacagactggaagctgatatcatggtgactctatatgttcgtgtgtcctgtccagttgacttgaacttgttcaatcgaatcacatcatgagggaggatagatgaggaagagttggtgggaaatggcgaagcaaagagagattggctgacgatgtcagaatattcagctctattcttggggattctcactgataccgttcactggtggctcgttccattcagccagtcattttaccgactgacgagcttctcacatctcatcactggccatgtgtttgactcgaaataaagccgacaaaggcgggaacccttggttgaaatcatatatctagacgctatccatcctctttcttcctcttctccttcttactcatcttctcaatcacacatagccgtctttctcaccaagccgctctaatatcaacacttcaccccaagttaaatcttacctagccaaacatgccctcctctactaggtctttcccttcgcccatggtctctctttaccgagtaagtgttcctgctacatgccgttcgacatagccgtctagggcttcagaactcccttggcttacgccttcatttctatcgcgttggttcaatagccgccaatgatatcggcctccccggcatatgctatgtctggagctgtagccaccggctctgtcctcaactttttacgcaagccgtctttgtcttccactgggttgctaggagcaggcctcgtgtcggcaggtctgttctatggcggtggaaagggaacccaatttggacttgaagacggtccctgggtctctgcgggtaagttcgagattttctttcgttctcagaggcaacgaatgtagtaacttatgtgatgttctctcctcgttcttcttccacgatatgttcagccgcctcatcgatctgcgctgccgtcactgtgccaaccgcgattcgaaccctccgaccagcgccgatcattctctctgcggctgccattggtgtaggcgcgtactatatctatgaaggtcttgaggagggatggtagatcatcacaatctctcgagaatctctctgcatggttcatctttcgtcacttcctccaggctgttcttttcctgctttattctcggcttttctgcccattgtagatatctaggtagactatcgagcgatgcttgtctgcattgtataaaaccactccatcttatagaaatatcattttgtatcgtctgttaatcatcatttagatcgtcaatttttggagtgctctcatctattcttccgggtcatgctgtcttatcatcacaatagacatagcctatgatgagttgatgaagcctgacacttgttctgttgttggttgctaagaacaaagagacgacactggagaaattcgataggcagaagccgcgctagtgaacattccttagacgcgaccaaaaatcccaaaattattcagaatttacacccactttttctcctccggcatcatcactatcaggactgttcaacgaccaccttcgattcatcgtatcctgtcccttcatcgcatccgttcccccgtatgccccccaaatccatccctcagccagctaaggaggctcttgagaaagaacaagatgttctccaagcagtcgtcctcgcagattcttataaccatcatttccaacccctcacccagcaacgacctcgatgtcttcttccgttgtgtaacgtgccgttgctcgaatggacgttggagagtctggcaatcgcgggtgtgaaggaggtcatcgtattttgtacgacaaaggcagaaatggtcaaggaggctctcaagtacgttctgctctgttcgctgggcttcctatatgatgtttctcttccctcttcttaccctctgcgtccgatggtcgcatcaccttgtctgggacgatgacatgtgttgacctctgtctatgctatctttactcattcaaccggcagaaaatccacgttctctcgaccgtcttcgcccttgacaatcactaccgttgtctccccttcggccctgtcgactggagacgctctgcgagagcttgattctatgaacgtatgtattcattttgttcagcccttactgccgtttcttccttggttggcgaagaaacgattactagaaaattatttattagtcaagtaggactgatgatcgtggttttataacatactctctaacaacagattatcaagtctgatttcattcttctgtccggagacgtcgtctcgaatattgatcttaagaatgctgtcgaagctcacaaagagagaagaaaggtctccaaggactcgatcatgactattgttgtcaaagaaggtctcggtcgtcgaattcggtaagcctgatggttgaacttactctcagttcagaagaatataggctgagagttgcttgacgttgtcgtaatttctaatattggttctctgtaggccgataccatcctcgtcgctctttgttctttctcctaaagagtcgaaccaactgcttcattatgagcctgtgccagctgttcctcgaaagaagcgggcgcatatccctggaagtgtatttgatctcaaatacggagaggaagaagttgaggtccgaaacgatttgatcgattgtgggatcgatgtgtgcagtgtagatgtgagtcgtgtctcccccccccttatttccattgatatcagcgtgttcctaacgagagtgtttttggtctcactcatgcagatcccggggctctttactgaaaactttgactatcaatctatccgtgtcgactttcttcctggaatcctgacgtccgaccttctcaacctgtctcttcatgttcactttgccggtaaaggctatgccacccgagtgagtgatactcgaagctatgatgccgtcagccgggatgtccttgcccgatggacatggcctcttgttcccgatggaaatctaccaggcgttgaaggcgaggaacgatatgaattcagaaagggaggtgtgtacgtgaccaagagcacggtgttgtctcggacatgcaccatcggaccaaacactctcatcggttcaagatcccaaatatcttcgtcttgttccatttcaacttcgatcatcggacataacgttcagattcacccgtcttgtgtcatcaaagattcttatatctgggataatgctatcattggagagggtagtgttgtcgaggggtcaatcatcggacatggagtagtactcgggaaaggtacgaaagttggaaccggatgtttaatcggagagggtgtgaagattggggagggagcgaagctcgaatccttcacaaaggtcggacgaagagcttggagagaggatggtagtgacgatgaggatgatgaggacgaagacgagggcgaggacgatgatggattgtcaaacgacgctcgagctgccatcctgggaccaaattcaaaaggtttcatctggccgagcgatgatgtgtctgccttttctgattctgaagagtccgacattgaagatccttacgagtatcatcccaacaagcgccttctctctctgggtcgtcgactatccgatctctgcctatctgattcctcgggtacaatctccgttctttcccgagagtccactccagcatcatctcctacatcatcgacttctgatcttccttcggttcccaatttgacacttgtgatggaagtcggcgatgaacctcaattcagacttgaatgtctagccacattggatcacgccttcgagaagggaggcgctgtggatgatgaatccctcgatttcgcagcattgcagatcaaatcggctagagcaacgacgaatgtcggaccaggtatcgttagagaagtggtactgttttatttgttgagcaaagtggaaggtgtggatgagaaggcgtcgacagtgaaagtcatggcggcgagtgataagctgttcgagctctggggcccgttgttgtctagatttgcagagaccacctctgagaaggttgaggttttgcagttcttacaggtaagaatctactcttccctttgatttctctgatcgctgtcaggagacgaacgaaagtctaattttttttcttccaattttgattaattgaaaaattcccccttgaaaacgcttcttctttagaaaatcctcctggacgaatcagctcttgaatcatactatcgatgttttcaggtcgcgctctaccaaaacgaggtcatcgaccagcaaaccgtcgctgcttgggtgactcatcccggatccaaagatggggaggacatgactagattatggaaagctgctgaaggattcgtcgagtgggcgatggagccggatagttcggaggaagaggacgatggaagtagtgaggaggagagtgatggaagtagtgaggaggagagtgattgaagataataatttataatgccttgtttgatgaacctctgtacgtttgaatccctagtcattcgatcacacaatgaacaagattaccatagaagagcggtggacagcgacaatctatacgatccacaagcttattcgaaacgaggaggggggagggggggaggagcgctaacaagctgatgcgcttttgcatgtgcccaagttgaaaacggcttgaaccgcaaagaaaagaagaacgaaagaggacgaagagaagagggagatagaaaacttggaagatgggagaataaacacgaaaagacaaaaaccccacaggcgagacataaaaagagaaaatctcgcacggaaagaaacatcatactcaagcttcgttggagctcggaaacaacccagaaaattactcgacgctcacaccaacaaactatctctattctactgtaatcgccaatctacctgcctaacagataatcaatcgttgatttccttcaacgcagccaaaaaagacgccttcttccttgcataagcaaagcttgattcgctcatacctcctttatagtatcgacgccaagcttcctcttccgttactttttcatccactaccttccctgccactatctcaccatccgaagtcatcttgttcttcagcttcttgtcttctacaatctcgagtcctacctgttccactctttcgactttatgttcttcctcatcgtcttcttcttctccctcctccttctctagttcccccttctccatcttcttttcatcagccagtttatcttgaacgctcgtatacaattcttcctcgtcttgaccatcaatgacttggagattagccatgtactctcggacagcatcgtttgccaccaccctacaaaagccggttaacatttcgaccgaatacaaagagtcagtacagcgctcaaatgaaccgtcatgccagcagtttgcccgaaaagacaaggaacgaatggaataacgtacgattccctatcccagttgaggacttgcagaccatcaagagatcgagctcgcgacaacgcgacgtatgcttggcctgttagtagaagatggcccgacaatattagcattatgacgggttttcattgagtaactcggtagaataactcaacaacagaggtcgaaattcattctgattcaacccaaagtctcaccttcggcaaacatattttgaaagttgacctgcactcgattgatagtttgaccctgagccttatggatacttaaagcataaccaactgagatgtcgaaacatcggcaatacaaggtgatcagcagtagatctgaagacacaaccaagaaagaaagactaacggataagtgggagctgtcaaacgcaaagttcaaaataagatatggaagcgaaggacgagttattaggtcctgagcagctccgtatatccctcgataaactcgtacaatgaaaatgattcacgaacttgatatctcgccgccaaagtttgcttgtgcgcctggttctcacccggcagctcggtcatcctgtgaaccattggtttaatcaaatatagatccccctcgatctcaaccaccggatacaacgttgggtcatccaacctcgccctctttcttggttcgagatcgattgttacaacatcatcgatctcacgttcgagatcatcgaatctcctgtcatacaacacggtcggtgtgagatactcaaacacatcggctcggatatggctttctggtatttcgatagcgagctcatcatgttcgtgggcctgtctggtcgacataaaagagtgaacgacaccggttgttccgttgacaatcctattgggaatcatgttctatttcgatgtatcgacaagagccagtcatgagtttggatcgatgcaatgtttcagtcatttggtacatacccggacaatcatcacccgagctatacgacggatggttcaaagaaggggaaaaaagaaagtctcgcaaggtggtcaatcaccatgaactgactctcgaaataattcatcggtcacaacagagaagagaacaaaagaagaatcgaacctccaactttgagatctatgatagtgggtatagatggcttgaaagccgagctgatgtaggctaagtcgttccgacgattctctcgggtcgtcaagtagttgactccaacatatcggtgggtgtcccccgcgagctgaaaaagattttggaggttctcctcttcgacttggtttcttgttggtaggctatacgtcatgatttttttcaaataagagttagtttatcaatttgttattttgtcaccggaacaagtggaattcttaggacgaagaagagaacacaagagaaaagcatacagtttcgttaaggtcgtgtcatcttcccaatctggtctctcgagtgctctgaaaaactcgtccgtttccgagtcgactattccagaccggattttgttcagatgaaagatcaaggttggatctttctgcctgaaaatttgagtcaacttgacctccaacagaatggccgttttccaacaatcggcttggaaagcgtacttaatcgaagaccatgacgttccaacaggaggcaattggaagaagtctcccgtcctagatagaaaggagcgttcgggttaaagatcagtgatgaactggttgatgtgataagggggctgtagaatgaggaatagtacgccgacttacacgatcaactgaagacccccaaatggccggtcatctcctcgaatcgttctgccaacaaaatccagtttgtcaaacagatcaccatcgatcattgatactgtcataagacaagagaagaaagcaaacaaaaacgatcaacatcagtacggagtgttcgccgcttgagttcttgagcgcatttgatgagcataccttcatcgatgatcaaaacatctgtcgaagtccatctttttctcgccgatttcccttctacctctgtcaacttgatgatcatctcctcagccgttccgtctccgagacctattccagcccaagaatgaagagttgttcccccaatgttgaaagcagaaattccggtcgaagaagtgatggctacggtctgctggagttcccggaaggcgtgaacgagatgattaatcagataacttttaccggtacctgttgaatgttgaagcagatgagcgattctgtgtgagaccggagagcggatgaagcgggtgcgtcactggaagagactgaccagcagcgcctgtgaagaacatattcgttctacatggtcccgtagaacagagggtggagaaattagacaagaacgcttcgagattgtaagacgattaaaggagagagaaagacaaagaaccagacgaaccgatatgttgtcgcgtactgcagtaacattctctgctcgtacgacaacggatggatcaacgctcttgacttgtattcctctaacgactcctcttcctccgtcaacagagcaagcgtctctgtttctatattcgggtcttttaagagcttgctctcagaagggacatgtcctcgatgctcaaagtgcatcatttgacttggcgaacttggtcgttttaatcggatttgggtcgtgctgaaccgttgtctgcgaagccatgagtggttgagactttgttgaaattggctagagggaccatgggaaagaggcgaacgatatgaagttgaagagcggatgggcagacttaattgggagagaagcgagggagtcgataaggagctgatagttcgtctgttcaaatgaattcgttccatcatccatagaaagagaacgagtgagaggagtggaagagagaagacaaggaaatgacaataagaaacacatcgggtcatccacgacaatcatcaacacttgtcgtctaaccaatatagaaaaggctaggttgagagtaatccatacctaatcagatgaactgatgagaaatcatgaggtcttgaagacactgcgatgcctgtattcatcagcaacgtcgaaggcctgcttgagaggtaggatccagtggcggatcgcataggacagaagcggctcatgcttaatccttcgtcttttgcttatttcctcttcttttcttgttcttctgagagcacagcggaaggagaagaacgttaggccaaatatctcagcagcagcagaatatcaagaaacgcctcgacatacacacgcacacaacatacaatgggcagaacccatgcgaattatcagaagtgtttgtggattgaacccagaatgagaggttggtcttaccgtgactgggcggtgcagagttctcacgtgaggcttgcgccacaatctgccttgaactgtacgcatagatacattgcctttaagtatgcttctttgtggccgttgaagattcgggcatggctgttcgctctgatcttgtatatgtgttcttacaggatggagaggcgctgtccggagttcgtcgatagaaaaagatatatagaatagtaacccaatcgacaaccatgtatacgacagacacttttacaatcttatctgatctattcctttgcgttccttcaccctcatggctttttgtagtatccagtgggtacgaacggcattccggctacgactccgtcgtacaacttcttccggacctggatactgatctgaagatttcaaacgacggcgcaagcagagctttgtaagaaaagtctactttcgagtagcagatacagaataggattgtcggcctagaaccacaactaacctcagtccccttcttccaggaacctttcttgagatagcccattcctatattcttcttcaagctgactccgggtattccgctagtaacaactccaacggcctgatccgcaggaggaacgtccgatcccttgggcaatcgagggaacacgagcgagccctctctaaatggaggcccagactcggagagcagacccactcgacgacgcgtcagagtcgacggactcgcaagctgagcgagaatgatggatgcgccagggaagtcggctgcttcacgtcgtcctttgcctgtttgagatcgacataagcggatatgaaggaaaaccccaataaacaatcagacaaggctcggcaaatcaagaacagagtctctgttaaagagaacataccgataacccagctcagtccagcttccactggactcacgctctcatcgagatcgtgtccgtagagacacattccagcttccagtcgcaagctatctcttggtccaagtcccgtcaacttgacgtcctcgtgttctttcaataaggtggtcagccgaaccgtctccgcaggaggcagagagatctggaggatacagacaaaggtcagtaaacaacatctctcgtatttaggaagtgcgtgtggaagaaactaacttcgaatccgtcctctccagtgtatcctcctcgggcaacgtgaactttgaccccagatatctcaatgaatgtagactgcccaaagtagagagtggacagatccgttgacgtcaacgactgaagaatttcggccgccttcggtcctatttaatggcaataatgacattcagtctagcttgaacagatacactccaatctctcgtcaatatatgcacctaccttgaagggcgaccaaaccccagccatcgaggacctccatctcgaccttgcccttcccggccttctcccaagcctggatcttttccttgaacaaatgcaggtcctcagctctcctacccgcattcgtcactacataaaaagtctcgtcgttctcgtgtttggtgatgatggtatcgtccacgattccccctttgtcgttcaataggacgctcaatgagccggagaagggaggcaaagccttcagatcgctaggcgtgatagactcaaggaactccctagcagatggtcctcggaagtaggtttgaaccatgtgagacacatcgaatagaccagctttggtccgaacgtgggtgtgcgataaggacgctccgccgtcggaaccgtaagagagaggcatagcaaacccggcgaaaggaacaagctttccctcattcgcgagatggaaatcatagagcggcgtcttggataggtcatcaggctgagtggacagaacaatcagaaagggaaagttcaggcgtaaggaaatgctctaacgacttcacgagaggaaagagagaagaagcggaagcagaaacagacagagtcggtgcttgaagcgtaggacctagccgaaacgataggcgaaagatatctccaggcaggctggacgcggattgcccgagttggaagattccgaagaagagatatcttggaggattgcatcactgcagaaaagggaggacaagcaagaaggaaataaggctgagagacgaagaagaagaagaagaagaaagaaaaaacggagagagaaaaattggagagaatatataatgctgatggtgagcaccgaagaaagaaaaagcggtccgatggttatcaagcgtgattgcctgttagataaggcgcttccttctcctagcatgtcctagttcttccaacatggatggctgtgatcatcaattgaataaacacgatcatagttgaccattcgcatttggagctagatatgtttgatcttatatccagtatcatcagagcggtcaagaaggagaatgtttagaatccctggaagcaagatggtcgcaatctttggaacagctttcgagataagatagatgacaaccttcaactttccaacaacctcaactgttcgtcttctggaactctacatgtttcttcaaacacattcagaaccagcacgagtcaagttgctttcttccaagatgtatataaaacatgagaattctcgagcgcacacaacgataccttcttcaaccggcgcaatccctttcctctaatgaatcttacttattttctttcttaccttgcatctctctatttcccttcctctcttcacttcgaaagctttccctcaatcatgaccaacctcatccacccgaccggcatcaacagacaacgtcgtgttgtcagagccacgttaaggttactgtgagaaaaggggccattacgtgtttcagctaagcccacgttgtggtcacgtgattctcaaggtgcacatatattttgttcagcctcgtttacgcccacaactacataccacatcatgcccggcgctcatatggtatccccggaggcacacgactggtctcgccctcctggggtctcatccaacgtcaacattgatggaaacagtcgaaactcgaatcctgtcgtcccaagtaggagccgtcagacctccaatgcgctttcggttgatactcaaactggttcggaaggattacgctccgatctctcagtctcccatgaactagatttcgtcgatgacggattcgaaattgaagaggacaacacgatagaagaagaggaggaagaagaagagatgaacagcctgggcgacattgattttgttcggagacgcgctatcaaagccggaaaggaaagggcgattggatgggatgcaaaggatggagaagagtctgttggatcgaagaggatgtcgaggataagaggtacctagttcttctctcgtttctgttccttattcgacatccatcccatactgacaatacctctgttgtattcttcggccgcctcttgttccagaagatgctaatttggatagctcattcctgcctccctcgttcgagaggtcagaattcgaaactgtatgttttcctagtatataccatcagctatattgacataggccaatcgccttaacgcccaatacctgcgcttcactccagatcgtccgtcgtctcaagacacaaacccagcctggaagtctcaaaaggaagaaagtgggaggagctttaaatacagaagacgttggtctggatgatgattgggtcggtcctttgttgtagaactattcattcctccttggtcggcgctgatttctgattccacccatatatgttgcttgctctcaattcatactctcaggaattcgctgtaagtccggttttttttcttcgttctggttttcagtgtctcgtcctgatgaataataagaccatatgggggcttcacgttactacagggttggggctctgtagcatacattcctctttcgccttcagcggttcttcaagccgagcaaaaggtactttccagactagataccaacaaccttttaggtcaattcaaggcgacaagtgttgccggaaatgctgtctttggcagtgtcttctactcgtcagtccatcataaactctttctattctctgtgcgatgtatacaccagaaagtttattgttgattcaaacttcgtgttgaatcactctcattgaacgatagattgcctgcattgtgtcaaactggaaaagtcctctcgcctctctcaatgatgatagcctgcttgatcctgctcctctggcgaggaatcatggtggagcttggaggagcaatgcgaatcaacggaggaaacgtatgtatcaacccgggtgtgatcgccgtctcgaacctcttacccatgctcaccgtgctctcacgtttttatccttgttaacacaacatagtatgcatatctcttgagcgtctctggaaagacaatgggtcttgttggagccgcagtcacccttcttgacgtgtgaggtctgtactcgaaaagagtatattcgttgatgtgactactcgtatggatctgtcatagctgaagtcactctttaaaaacgtacagggtggccaccgggaccgtatcggctggaacggcagcggcatatatcaacggagaagcaaagaatttgccgttcaaagagtatctgattgggatcctgatcttgatcggtaggttctactctcgatagccatgtgtgcttcacatatcataagagaggagaaagaatccgttgactcaaattcagatgtacattcgttgttggaatcgatctggaatagtgtttaccgctctgctgttggcaggtgttaaggactcgaccaagttaactttgtcaatttgcttattccatgtaagctttctcaaacgtatctttctggtttgtacatgtcttctaatcagtcgtgattgatttttgattcgctcgctatcacttgcttggtattgatgcgtcatcgaataagttatttaccatggcccttctaatggtggtctctaccgtggcctggattcgagaaggcaacaccacactgttgtctaactggaatctctcagtcaaatcgtgggacggcggtaacggggcggtcagagcagtattcaatgggatctgtattggctttctgggcgtgactggagtagaatgcttaccgacgtaagctatgttgctctattatccgaagaggcgtgtgtaaatgcgttcaaggctaatcgacatacgttaaattttacatagatttatagagcaaataaaaccgggagtatactcaaaagcattgaggaatctactgtatggtacgttgctttcaacctcgtcctctctttgcaatccaaacctgttaaccgtatcctcgttctgcatccctcgatgtaggagctctcctcttgaacgtccctcttctcatcatgttgcacgcgctagtccctcttccctctcttctctcagcctccaacgttcttgccctcttagcttccatctcgacttctggcggtggaggccgatggctctcgatctttgttgtggtggatgcggtagctgttctctgcggcggcgtgctctgtgggggagtggcctgttgtgcgttggttgaagagttgagtaaagacaatgtgctgcccgagagttgggggcgaaggtgggagagaacacaggcaaactgggttggggccatcatgtactttggtttatgcttaggttagccgctattttcatcttctcttcttctcgtatcttttaatgcttgacgacctagttttaatgacttgatatgtttaaaccatgtctataccaactgggatgtctaacagcgttctatgctacggctgggttctccttgacgactctgagcaatattttctcgatttctttcgaattcatgatgcttcttgtcagtgctttttttttgtttatctcgtctgatctcaaagtcttgacactatccgaccttccgttgaatgttctgtcttgtgattttagttcgcgctatctcacctcttactccggataacgctccctaatcttcctatccctgctccattctgccggtcccgtttttcagtcacccttctcgtgcatgctctcatcttcactattctcatcgggaatgccttgttgaatccactcccgttgggcctcttcgcggcctatgcagtcggaattttcagtgtcctctggacggctgagattgggtttggatcgattctccgcgcaatcgtctgggcagtcgaccagagtgaaggaacaatgattcctaggggatcaggttggatgtcgatcggatttggaaggaaattgaaggaaaacaaggacggtgatgttccgatggaaaccaagacgagtaagcttggtgatcgtgagccagaagaaatggaagaaggagggaaaggcacaggagggaaagagaagggattgagagtcgcgctgagaaaatcattgatcaaaggagtcagacggtcgaaacgaaaggtgatggtcgcatggattaaagaggacgaggtttgtatttttgcctctttttcttttcttttccggatgagaagaggaataaacggtgtatacctcgctttccttcccttaaatgttgacaccctctttgttttttcaatcatccatagatttctgcgctcattcaagtagttctatatgttctagccaacgaacagacttcccacctgatacttatccacgcgtacaactctgtgagggacatcccatccgaattacaggctaattcaaaactgttggacgaagcgtaaggccacaattgttcatctccgactttttgagaatctttcaatcctagtttgctgatgtggtctgttgctcattgatgatataggttccccgctttgacgatagacttgaagttcgttcaaggaagtttcaatccgatcgtaagtaccctctctttttctgattgtctcattcatgctgacatctgtctaccttgacttttctgtgtttggactgaaatcgtagatcgtccaagcagtatctgatactttggaaattccacattcgagacatataatcggatgtccatcacccagtcaaggagatctaggctcatttgggggcgtccgtgtagctacattccggaagtgatctggaccgagttcattcccatgactctcttgctatttcaacatctttgcctatctattttctttgtcttgccttttttaatcgcattgctttgcattcggtaacctcgatactatctacattgtatatctatcatttcggtgctttctttctctgtctctttttctattccgacctatatatgcaatcaagtgggctaacaaacttccaaatagccagaaatctgtgattgtgacattccaacaaaatctctccacaaagatacattctgaataaagaggcacgacgtgagtttccacaggaattgaatctatacaccttccacgaatgagaagagggtgaacaggcaagcgcttgaactctaacagtctctagacgtgaggacctgtgtgaagaggaaaggactcatgtcttgagttaaacctgtgcgaatgaaccttgctatcggtgtccaaacaacgactaacaaattcagtccaaacagatgggcgtgagctgaaagagtccagccttctttcaactgatacactgcttcatatctctgcccccttgcgctcgataggctgtgtgatctttgaagggggatgtcggttatattttctaacgaagcggacagcacaagacaagcaggggttgataaacaccaagtgaagaagaaaagaagacagaatgccacaactttgaggtcgtcggaacttacgcttcagtgttctttcgatcttgagccagagccgctagattgacgactcgctcggaactaccgtctggtttgtgatggatatcgaccaagccagatctctcgactctgtcttccgaactctttggtcctgtctgttggggtgcttcggtactagatgacatgatggcgactgtagttgatgatggtttgtagtagaaagagatgtgaattgtgcttgggggagttaacgcgtcatcgcccacacgaaaccccacgtcgccagagctcgtccgctcatcagagactctcgctttacttctttctgccaacgatgagtcggccaacatacatcgtcttcaccaatcctccgacccgaaaggccgttcgtcggtatatccagagccctcctgagatctctgaacatccgtttaagcgagtgaaacttcaactggactggcacacctcggatatacttgatcctatcttgacggtttccccgtccttgtgtgatcatgctttagtcccttcaccttcatcaccccggctgacgcctgttcagagcacgtcagcacgaccaacctcggtggcttttgacgcggcttctggtcatctgaaggatgcccatgtaacagtagtagaggccacgttcgatgaattttctcgagaaggacgaagaagttcaaacaagcctcaagaggcggtgggcacagttgccgagcgcagaggacttcagcaaactctcggccttgttgcggaagacgaatcaaccaagatagcctcaagtgaacatacggaaccgcgaagagatggaaggtctgagacacctaaggatgaagcaggagacgtaagccgcgctctggaagaacagacaaagttgacaacagttctggacataccggtccagagaaatcaggacaaagccatgcaaggttcgttgttaccttctacttccttctctgtctctgatgtcgtatgggttgccttccttctcgtttgtttcagctctgtctcatctcttgcctggtgtttttcatgtgagcacacaacagaacaatcttcctgtctggactacgcatctatcattctgcctacgaatcaccaaacattgccccttgtctcctctgcctctaattcgaataacgatcctgccccttccgtggcccagccgacatattctactcaaagctcagtgccatacccagacatgacaactttctcttttcttcaccggactaggccaaggatagtcgaacctcatagtgatgtcatccagcatactactcctgctgatcgtccttctcgtgagaagagccaggaacaagaaaccgacaagcgacaagacgcaggagagcgttctgttcttcactctaccagactggaagagttagtggcggcgccgatagcatcgatcatgaatcgtgacgaatcgatcgatcaaggtatcggtccttcgactgacgaccgaccgagtaggctcgaagtgccgaacttgaggactgactcgacttcgattgatatgaattctatccgcgaattaagcatgacatcgttctctttcactgtcgccgccgatacatctgcagccgcctccgctgtcagtcccactgctgatgtcgacgacaccgtctctgaaccaaatgattccacgagaccgacagaaggacctcgacggacctcgaacgtcctgaatcttgtgaaggagtccctacgagagttgaactccgaagagggtttgcaaacccggtcctctatctctcggaaaacagcccggcaagcgacgcgctcctctgcttctctcctgacgcatgttgaccaaccattagagacttcacttacaactcactcaccctactctctccaatcatccactgaatcttcattcctccctacacaggccgacactcagcctcgtccatccgttccatcatccgttcattctgaaacttctatcgatcaagcatatcctcctcatccaaaccaacctcagaaagcccatcctacccatccctatatccattcaaatctccttagaccacttcctacattcggtcaaccactggatcaaccaaccgctaacttcttgaccgtggtcacttctgtcgaactgaaatccttcgtaggtaaggacggaaggagttggctcttgggtgaattagaattgtttgatggaaagaacgttgggaggttggtcgtttggggtcatcaagctagagaatggtgcgatggcgttgggatcagaaagggtgatgttgttttgtttgaacgtccgtgctacattatcctcttcttctttctttcattctttcgactcccgctctgttttgcttccttacatgaaagcatctttgtgcgttgactgacgaaaagtaaaaccccaacgcatgcactggtttgcgtgcgcgcgcgctctgatatactttatggattctcaacagggataacgatcgtccaacccaaaccaccctcgcgtatccaaactctccaagccttccctctcgaccctcaacaaccacgatcccgacctcggaatcaaccgatatcggcgtacacgatattctaccgaacatcccttcctctgcctggtgaatccgcggaggagtggggatcgaaaagagcagacctgaggtggagaacgtcggacacaggtttgggcttggtagggcgattgaaggattgggtcgagtctgccggtgtctgaaaagagggttttccctttactttcggggaggttcgtgtgacctctttttcatctttcgatctccactcaaggggaaaaacaggtcctttagtttacaggagagaggtcagatcgaattttgctcgagctatttgaccaagtaagtccgtccgtccgtcctcaactctatatagacagcaggttgaggcctgaaaaccagagaacaactgacacaatagttggataacaagatatgacaatttcattttatcaggagaagaaataagatagatagagaaccgttcagtgagcaacaaacgagcggacgagaaacggggcacagaaagggaagggagaaaagacgaaaaagggagaggaaaaactggcaccagatagaagtacaaccgacgatacatggcgtatcgacagataacaaggaagaagaggaaaaagagaaaaaagaaaaaaggaaaggaaaaaaatgaggatagacggagagaaaaccaaacgttgaggtgatgatcaacagtggcgagagagagaaaattgagaaggatggaccactacggatggcagaaaagcaaggatgaaggagaccagagagaggaaggagcgaaagaaagggagagcaggagatagtcaggagctcttaaatacaaagaagcaaacataaaacaacaaagagtgaagaaaagcgatatgaagtacggaagaaaaagaaaccaagcgtgttttctcaataatttcaaacaagagataagggtggcgtacaagagaagaagaagggggttgttggatctctcagtggaagaaccgtttcttcttagtcgcaccctcctcgacctcgatctttgcgtgcgtatgatccatcgagtgcccgatcgggaaatgagaacagcaagtgatccccttgatccattcgtctccttcatcactgtcatcaggagtaacggcctcgttcggcggcgtgttcattcctccgccacattcgaccccttcacactgacagacaagcgcgtcgttccctgttccgcgtagcagatcggccagagtgcaccgagcggtgggctcgatcgtcatcatcgccatgatcgcaggccgagtctctctcggcaagagccggaagattgagtcgactccggtgcagtcggcagcagaagctcgggcggcactcgcattggaggccgtcgtcttggtcgtcgtggtggtcgcggcggttgacgatcgacctggcgtggcaagaccgctcgaggccacggccggaacatcgctagaaggtaaagaggtcgttccctgttgggggctagggatgttccttccggatatgttctcaggaccagtcaccgatcgttgacggacagccgaatgcgattcaggtatagccaagccctgggtggtgggtgagagtgtcgaattggctagttggttgaccagccggttatccgtatctggtccgtctatcaattcgccgttaccagagggcgagaccacaccggatgcggttcctcctctagcggttttctcgacatgagaagcaaacctcgaggcaggctcactggtggtgtgtgccctcggtcgatccatatggagcacactagggtccatctcttccggggaatcctgaagatgataatccttgttgtccacagggtggaccattgagatcttcaaagccgatttcatatgagctttctcagccgcagatattccgtctcgtggtctggcatcaatgtagctgtcgggttctgtggtcaaatgagcctggttggagggcacactctgattggtcgataacgaagatgacatcttgagatgtgcaggcagatgggagcatataaccgtggcctgagtatttggcttagacttcgacccggcggcaggggccaagagttgcgggtgggtgttgacatagagctttttaagaatgagaacgatgcgttgcttcgtcagatgtgaagactaggaatgtctgcatcagagaggagatctgaaaataccttgtagcttgcatcggtcttggcatccggcaacttccaggggaaccgtctagattgccgagaacaagacaagtagatacacaccagatcaaccttagctaacgtattcgctcaggaaagtatatgttgcatagagcgcgatgggaaccttgatggactgacctcaaaatcatacaaaggaacatcacacccaaactccagacgtcggtcttcctaggatcgtattcctggccgctgagtacctcgggtgccaagtaggggtcactaccgacgactcccgatgctttgacttgagctttgcctgggtattggaacacggtggccgttccaaagtcaatgagcttgacaacgttgctcgtagtcatgacgcagttatcgagtttgagatcacgatgggcaagtcccatgccatggagatagttgacaccgtcgacgatctgtcggaacacgcaatagatctcaggtcgagccatcttgccagacatgacgaccgagaataagtcgtacggagcatattccatcacctagatgtacaccaggaggaaaaaaaacgtcagcaccaaagatgcctatcgtacaacagaggtagacgaccaagtacaaacctcataataatgcccatgatcgttcacgatatcgactgtctctatgacgttgacgtgtctgagtgtgacacccacacaaaactcggcggtgaccttcttctggtactctttctcgctctctcccaatcgctttggccggaactctttgacggcatagatgacactgccacctttggttgagcccttgatcaaccggacggttcctccagcacccgaaccaaggactttaccccactttccgtactttttagaaagctgggcctgggtcgcattcgccaacgaagggtgtgggttgtggtggtggagtgaggacgagagggctgtggatgaacccgggggtgttcctccaaagacaggggtgtgagttccgcctgagaacgaatgctgatagttgggatttagatgtttctgtccggcggtaggaagaggaggcgggttagagggaagaaagcgttgactagccgagcgaccaagtgagccagcaggcgaaccagcgacgctgcctgtcacagcggaagcttcctcgcggacttgcaagcttcgttctgggacttgaggcaatccgggagcgtttgtcggatcaaagacgtcctgcgaagctttgggtaccggccgattttctttagttgaagttcctgccgtgctcgcctgagtgagaccgaggacagaactagggggcgaggtgcgatccttgttcgagtgggcggctgaatgaccaaagtaaccggttttcttcgtggtggggaatttttcattcaaaggagattcaacatgttgtggagaaccgttggcggtcccaggcgcatgtgcgggtgtatcgagcgcgttgagatggtgcttgtgagggtggcttcctccgatatgggtgtggagaaaccgcttgaggtcgtgtagggggccggtgtgatgtttgacgggccgggtgacgatcgaatggttctgatgggtgggtgatgagggcctggtggacgtcgagttgtttccggttggcgtgtgagttggggagtgaaaggttgaggacgcccgcttggtgaacccaaacgtgcttcgtctggacggggcgacggatggagcccgggaaggcgctcttgaggatgtgaccgaatcgacatcccgacggtcggactgcggggaggaggggacctggagaaacgaattcgaagacaaagaccaggacgatgaggatgaggagggtggttcgttggaggatgaagcaaacgaagagatgccgttggtggacgttggcccagagatgaaggaaggatggttggcgagatcaggagaagagatggcgtgtcggcattgcaagggcgacgaagggaccgagggtgatttgcaaaacgacaggcggattaaggaacgagacggtttgagggttttggtggacgagggggatatgggacgaaagtcggatgggtatggggagagatatttcatcgttgggcgttttgatttgtcgaagagagtagaaaccccgggaagtgttcaagatacggggtgagaacgagtgaagcgacgaggaatgacggatcgaagatagcaagaaaggagtgaaacgaatgtcagtgatgttgattcagaaaacacaaacacagaagaagataagaaaagctcgagatggcaagaagggatggaaagaatgtccaagcaggaggtcgaaaggggactgaagctgggcgagatgttcctttcttggcagggaacttctgtgagcgttctatgatgttttgtagaggtacacacggtcatggacgccctgttcttttcctctataaggaagctggatggcggagggtgagggtttgttcgaggatggtcttctcgttcaggttgtttatcgtcatctccttcacccagactattgtttcttgaagggaaacatcaagtttgaccctcccgcctcctgcctgagaacgtttctggcccagtatgaagcatgggacagtgtcccatgctccttccttgagagttcggttgactcggggcgatcatgtccaactctctgtctttcggaacaacagatccgactatctggacggacaaaacggatacgaggaggaaggaacgcacactatcggcggtagccatctgctctgccttggcctgagtaaacgaactggatcgcataccgtccatctggtgtgcaggcggatggatctgggtggatgcctatgttgtatttggaaggaacagaccgaggtgttgacgaccgcgatagaataggaacgaggtaaacagaaaagaaagaaagaaaggacgacgatcggcgacagaaggggtaacccaaggggagagcgaaaagatgggtatatgcagacatggacatgaacgatcggtcagcttctccgaggtgacagaaaacttggttgaacgatgacatcttcaatctgtttgacccaacgtgcgaaagggaatgatcatctcattctttctctcgtcctttttatctgacagatgagatacacattctctatactggtcttcttctgggtcattcaagaatccaccaaggcttttgcgatggacgaatgtaaggatgggtctccccaacgaaactataccctgcttggccaaaagaccgggccaagatctcgccgcgcgtcttttcccctttttcttctgttctctcctttcgcccttttgagatgaagaagaattgggaatcgggagaagactgacctgaatcatgttttgacgttcgagttatatgatgtttgcctgcccacgatgatcgctttgagaaaatacgaaaagacagagaaacacaaagaaagaaagagaaagagaagaggaaagggatcaacgaagagaaagaagaaaggaaaagaacagaagaaaaaagagcgatagcaggaaaaaaaggccaggcaggaatcgaggccgggtacgaaaactattaggaaaatgatgggagtctattaggaaagcgattagaaggctgattaggaaaaaaagaagggaccgtttgcctgattacaaagcatgctcggccgggcaatgaagccgaccggcagccggtcggcagccgaattaggccgggatgatttaccccagaaggaaatatatttatacatccagcttcggagggaaccccacaggattcttcggcaatcttgttagggttatctaattgaccggcggcctttctcttgattttctattcctctgcttttcatcacgttcccttttcatcgaagaaacactagcaagcagcttgttgatggtaatgatgataatgatgatgatgacgacgacgacgacgacgacaggggactgtcagcaatgagaacaataatgctggtggcgatgatgctggtagcgttaaagcatccgtggctagtacaacacaatgcagaattccaattcatatcttgtccggccacctccttcatctctggccttcatccgcgtcatgtggatgatacatctccatgatccattcctttgaatctatttcacataccatcatatcagaaagagagccggaaggacatgttggttcttgtttcggacaactctctctgcgcaagctctgagagaaggtctggtggtgtcggttttgtttcggtcgggaatttgagattggttacatattcaataacacgtgattgtggcgacaaccgcatagcttacatcttacttctcgctgttacctatcacaggtaaccattctttgctcttgtccctcctggttctactacttctctcgctcttcactcacatcccccgtccgttcatcaactcatcgagtactggaccgttcggtctatatatcgacacatcagctcacgcaagcacgcactccctcctagaacagtccctctcatataaaacacgcacatacttatacacgcaaaagcgagaatgttccgttcgactctccgaccgacactctcccggtccttcagcacgaccccctcagtgtcgtatccccgggcaccgctctaccctccattccaaacgaccactgctcccagaaagctcgatgctcgactgcgatcgctacaagacccactctcaccaactaagcctcgagtatccgatccacctcggccagacagaaagtatccgtccgagctcgatcagccattgagaaagtacgcaaagccacaacgttccaaatgggatgggccggagagtgacgttcgggatttcaaaggtggaaagtgggccgggaaggaaggctttttggctgatcctcagttcgaaggcgttgaaaacatcatcgagcaaagaggaggcctgagaaagatcaagcccagccaagtctttgtcggaagggccaaggtctctggttttgtcccaatctatgtagacgtcagtccacgtgtttttgtcttctttcctcttcttccttttcttactcacggggatatggattttgaactcacaacaatcaacgtcctccacgtccttttttttctctttttttttctctctctttctggttctgactctcctcggggctatctagaaacgaaggacccagcctttcaccatcatcaagcagattcaaggcgatcccaaggtacgctatcccttcagatggatctcatccccctcctttcacttgtatcatcgtgttgtctccctctatacagcctttaacttacacctgctcttccctgttcccgatctttgttcttccttccctcttcaccattcaggctctcctcagcccattgctcaagtacttgacgctcaaacgaccggatcatagacgaggagctgagggcagaatcagacctgtcaccggcgagattgagatcaaaggtgcttggaaggaggaggttagggagtacttgcttagccaagggttctagagggtgaacaggaagtaggccgggaaagagacgaaggaacgaaaacaaagcacaatatcatgatggatttgcttctcaagttcttgcttgcttgcttgttgaggctctcgtttggatcctttctctgccctcatggctggtgtgactctttctccgtgccaattccccggatccaatgctcagatccagatggcgaccctttcattcaccttttttccagacacagacagaacaatgggtgaagaccatctatagacagtttccttcaagaagaggaaacgaacgagttgaatttcgtagggtttagcagcccaggttctggtaacctatcgacctcctttccctatgtgatccaatacatatcccatcgagagcgaagagcgagaggaaggaacaagattctgtaagaaagacttctagggaatatgaaagcacacaagaatcaagaagagaagagagtgagagacgaacgttgacatatttgatgatcgtagggatacaagtcaagttgtaaggattcttcctaaagactgaatccgaagatctccaagacgaccggtcgcctacgtattgtatctcgagatctattcgttcatccatcggatcgatggggcatgcgaatcaagtgggaattcaggtagaaatgtgcagaaagatcgaaggtttcgacaatcaacagattaggacaagtctgttagctcttgcttttgacatggtggtagacattatgcgaaaggctacgtactatgcttagggctactcttctggtacgactcgaccaatggtatagcttccacacagtcctttcattttgaaagacaacaacagcgatagtcaaggcatcacaaacaatcttagtcagaccattgagaagagaggagtcgagctttgcttggtctggctaggaaacaaagtacaaaaagaagagtacgagcctgcgctgcgaaactcacaggacaccacaggttctttttgacctcgtcgtaatccgagaaaaagatgatgaaaaagttctcttcaggagaactagccgatttggacagtacggatggaaggatctcttcgttggccatcgttcttgctcaaagatgatatgtcgaggatgaggttgatcaaggaataccttatggaggttgcttattcaatggatcaaccgtcttctgggaaacaaaacgtcatatcacgtgatcacactccttgcgtttgttcaaaccccatccagcctcttgacttggatgtgtgttaaccatccttgaaggacccagtgtgttcacgagtcatatgtattggttcaaaagtaaatagaaagcagatcgagaacgaccatagcgatcgctagctcagatggtgagccggaagaaagaggagaaaggaggatagaccaaccgattcattcattccctcttcacgacaattcggtcttacagcccttcaatcttcgatcacagaaacgatcgcctcgtatattacccagacatactctccatcaatcatgagagcaagtccaagccaacgtgagtgcagggtgttccagtcgaagctgatgatgatgtatgtccgaggacccagtcagagttttgactctgccggccgccgggtttggtaataaccggggaacgtcgaggtcaacttcttctccttcttcttgtccttcaactcgacctggtcagacactcacactcaaatacacacaatcacatacacactcgcacacaaccacgcacatctctcacagcagtactgcctcacataagcaatatgcccatctccacgcccttaacgaaagcactcggtatcagaattcccgtcgtccagtcagtatacacacattgctcttctagtcaccttgatgatccaattacctccaccacttgaacggacgaactcatcatcatctaattcttcttaattctattgtactacaggggtgggatgcaggtgagtgtgtgctgcttgacggagagatcttgatacgcaccgttgttgacctgattcgattaccttatatggaaattcccgttccaaagtgggttggtgtaccgttcgttcatatattcactcccgtcgttcacctacctgttcacggctgatctccttcatcgtcgtaaataatcatatcgatatagagcactggccagcgcagtgtctaacgctggaggtctcgggatgttgactgctcttagtgagcacacctttagaaattactaaaggctcagtttgagtttctgaagtctgacgtgcaacccttgatatcccacaaatcagctcaaccttcgcctgacgcgctccgcaaggccatcaaggagacccaaggcctaacatccaagccatttgtcagtacaacgataccttgagatctaccatactacccttgattgaacgtcagcggcatgttttctggggattgttagggagttaacattacgctgctaccatcgatcaacccacctgattatgaaggctatgcgagggcagccgtcgaagagggagtcaaagtgtttgagacggccgggaacaaccgtacgtgagaatctatcggattcgatgacccacagccaaccaacatgctaatcagtgctacaaacagctggaccactcatcaagttcctgaagtctaagcgtgagtcacgccttttgaatggagtcattcatcgacgcgatgtctcatcctggcttccttgtctacatatatgacataatcatagagtgctacataatacacaaatgtaccacgattcggcatgctaaatctgcccagaaactgggcgttgattgtttgagtatagatggctttgaatgtacgtggtcgtactgccaatttttaaaaatttagatctccggggcttatggtatctcttttacaactcgtgctatcatcaaaaggtgctggccatcctggagagcaagatattggaggtctcgtcctggtatgcttcgctatggccttatacgagctgacgaaaatagcaactgatctacccgattaatcatggttctagctggctcgagccgctcaggacctctcaatcccttacatcgctagtggagggtttgctgatgctgtaagtcacctaattacaccttctttctttcaactgtgttgaatcgaaaaatgtagacctaatgaatattcttctccttcttatccgaatgagtagagaggattcgtcagcgctcttgcgcttggagcagcggtaagtgtctctgtctcgtcgcgaggtttatatgattatagtcagctcaatgacactgataactttcgatcgcaattccgggaactggctgacatagggcatcaacatgggtactcggtatgtcttttcatcaaggtccaccatagtttgtgtcatgtcgcgctcaaacaccattacggtcttcagtttcatgtgcactgtcgagtcaccgatccaccagaacatcaaagagaagatagtcgcttccgacgaaactgacactgtacacagttcgttcatgcttttgaaatataaatcaagatggcgattggcatgtcgatctttgttgtctgaccatgcacgcgccaacgtgaacaatgattctagttttcaggactctcggaaatactgcgagagtcttcaagaacgcagtttccaaagaaggttggttgttcgcctcttcaaaccacagatagatatagaaatggatcttgacgttgacctgcaactttgcgttctgacagttgttaggctcgagcgtcgaccacaaggtgccaagtttgaagaactcagagatctcgtttctggttcgttatcatttcttctttctctctctttggcttttgatcattcataatcgagctctcgtggaaacgttagtgaaacaattggatctactaactgacgcttctttctctcctttcatcgatgacaggtgctagaggacgaagtaagtctttcctaatttccttcaattctcatgatttatcatcgcatttcctcttgagaaacaatcagaacacacatatcaatcaatcctctcttcgtttatgttaacccttcccccccggaataaaaaaagccgtatatgaaactggagattctgatgctggaatctggtccgccggaatttcggttggactcatcaaggacatcccaacttgtcaggctttgctcaataggcttgagaaggaaggggaggagatcatcaaaggtcgactaggaggactttgtgtaggtgatgatacagatcaggtcaaggcaaagctctaggtggtcaaggaatcttttttcttttttctatcatttcgatttacctttcttgtttgttagctgagagagaaagagagacgaaaggcaaagagatcgactggggttgcgagtgttttcaattgtatgtatatcatgcgcaacaaggttgtatcttagaaattccaggtgaatcaagacagagaaagtctagttcgataacaagcacaaagagaattccatctgttatatatctgaacatgcatcaagctagggcctttcaatccagacgtctcgtccaatctccgctcttacccccgctcttcttggtgacacatacgtcctgaatgatcatctcttttccggcgaccgctttgaccacttcaagtaaaacgcgcgaggatgaaacaaggaagatggtaagaatccgagatcgtgtatagctcaaccgtctttctcggatcgtctaaacatgcgacatggtcagactcactatcccagatggttaaaagtgtgaccgagacggaagtcagcgcttccatctgatggaaccggcaggaacagagtacccccgagagaatagagtagatgaaaacaacgacaataagcaataggatagagagagaaatatttgtacagaagactcacctcgacccccgttccacctacacattccgccacgctatccactctgacccaacctccgttatttgtccctgtcttttgaatcaattcaaacttcacgtccaccgagctcagattgatctgatgacagagcggaatgagatctgacgttcgtttggcacccatgatacctgctagttgagcgacgatgaggggatctcctttcttgtttagagaggaagacggttgggagttggaaagcagagaaaacgctgcttcgggctagattcacaaaagagccaatgttgagacagaacccaagtgggataaaagaggagaaggatacatgaaggtgaagaaaaagaggctgacaaggtagatctttccggaagcagtggccgatcgcagagtcgctacctttggcgtgatagaaaccatgcgaggcttgcctgtctctggatcgatatgcgttaacgtcgaagctgtcgaggtatatttggacgatccctctcgaggtggtttgcggctcgtcaaaggcgaacgttgtgaggcagatggtattggggaggtactggaaaaagaggaggagtaagcgcgcaagaggcgcggggctgatggcagattcagattgggaagaacaaagagagagagatgggtagttttgaagggggttctgttcagattggacagcaagtaggaaggggtgtacgttgcggttgtcccggctcgcaaagatcggtttgaatgactatctgtacgatataccaaatgatccgataccacgtcaagccaaaatctcatgatgttcagaagacaaatcaaagacgaaagtgaggctgatagagagaatcgttgaagactgaccctccgatcaagatcatcggtctgttcattccatccttcagctgtttcatccctgcatgcttctccttcttccttccaacggccatcgcgattgtctcgaccaactctgcgtccgatgcattcgaccggagcttatcccttaacgagacttctgtttgcccaaacagacagacctgatggatcggccaaaatttgagtcaatgagatcattaatcaattgaagcatttcatctaaccattcagagacaagtagaagattcgtactttgaggtttccatcggcagtgattcgaagtcggttgcacgttccacagaaatgttctgtctgttgtaaccggaaatatgccaaagaaaacaaggctgtaagcctgtgggtttccgttttgaatcgctaagcggaatatgctattttgtttaagactaaccatactggtgataaaaccaaaagagccttggaagccagggactttccatcccttacttgtatcattggcgtcgtcttgtttcttgataagttttttgtattttgatcgtatgaccgaaagcatatcttgataagagtaaagctttccataggaccatctattacctttgagatatgcgcgcggaggtgtacatcagtttctcgtttcggtcaaacataagctctgaggttgacttatagacgtaccactgaaaggcatatattcgataaacctgatttcaacctttctgttcttagtgatctctatgaaatcgagaatctcatcttcgttgaatcctttcatgatgacaacgttcagtttgactgtgagccctttatccgccaacccaagcgcagtttccaacgaagccatgacgagatggtgacccggtcggcgagtaatgaattcaaacttggcagggtgaagtgtatctagagagatgtttaggtgagttagaccggaggagaccagcgttggaagtttccggtgcaaggcaatcccattcgaagtgatgcctatctgggttagaccaatatcttgaagctggttcaagctagctggatatggtttcaccacaagtcatgaaaagtattagaatgagacgcattgtgttgctatttcaagtgacctagacaaaccgatgagcttagtgattcccttccgaacggtaggttctccgccagtcaacctgatcttcgtcaccccttgttcgacaaatagcctggccaatttgagaatctcgtcatctgccaacatgttgaccgatggctgtaagggcacaccttcctccggcatgcagtacgtgcctatgagagttcatgggaacagtcagagcgaacattaaggagagaagacggaaaaggacacgagtcagaacatggccattgaacgagtcaaacatagtgaggtggatgatcagcctacaccggagattgcatttctcagtgagagagattcgaaggtaggtatgatgccgattgaagccgtccgtcaatggagagacatatggatgagcttcatcaatggccttgactttagactgttgttcagttggacgaatcgatgatcatcagtgttcgccagaaattcgagtcagcgtatacgatcaaggagacaagcaaagcaacaagagatctgtcgatgtcgatagaaagcgatgaagcaggtgggtatgttaatcaccttgacggcctttttgagcgcctctgaatttctactgcctctgatgccatcttcttcgtgagaagcagcagctagcccatggttgaaggcagcaggactcgtggaaagaagtctctggtttgtaggatttgccaggccgaagagatgatttgacaagactctggagcatctcgggctggaaaacgccaggaagaaggacatgcactgggataatctgaggccttcctatcctacgagataggacacgggtagacgatgaacggaaggtagcgaccggagagaagagtaggccagcgaacgatggtgatgatgacgatgatggttgtgtatgattaataaagtggaggaagcacgagcgaaagacatcaacgacggtcaaccgataacaacgatcactcaccatccacaccatccacaccatcatctctctttctcagagggccttgctcaagtccatgctgaacgctcttggccgtaccatacgtcgatatccccctgcctgtcggtaatggctcctgtcgtttgctccgtttgccgttcgtcggctagcatgatctgtgcggaatgtgtacttcgtcggtgagtctcttgtgcacaccatcctatcgcgatgtctccatcgtttacctctatgagaggctcattgtatatcttgaacaaacatatagccttctccaacaccgtgtagcagagactgcgttgaaagcttctttgaaaagacatatcgaacgcacaacagccgacacacttgatggcccaggtgggttgcatcaagtaagagacctcgagggcaaactggctgagaagcgacgaagtttgaacataatcaaaaagtacactgagctcgctcgaagaagaaaccaagctcgtaggtctgattgtgttctactcttgtctgaggatgaaatattgtcgttcgataacgagctgatcatgatgtgcacaacggggtatcgtcatcattagtcaaactacagatcgttaacttggactctcatctgatcctcagacgatcatacctcctccaggctcctcatccagcttctctttctgttcctacaccatggcatgcgcttgcccttctccaaaccagacaaatcctcttgagagaggtcatgttcgcgtttgatgttcacctaggaggcagagacgaggaggacgactctgaggacgaagaggggttgggtctaggcgccagggccgtcggagcaggttccaacggacagagtcaaggaagcaaggggcaagaagatagcgtggcgggggtggtgttgcctcttcctggagacatgcaacgtcagtttttacctctgtgtcttggtctgagatgtaaagtcgtgaaatagagaggagaatcttatcatcctgacgagtatgcttttgtttacgatcgaacgacagtctatcctccattagaaaccacggctgcactgcaacagacactacacctactccttcttttttcgtcctatctggcgttgcctaccgggcttccctttactcccgtcctctctcctccgtctctattgccgtccccgcattttccctcgcttggattaaacccgacggcgcttcccttgacatatcctcaaaagtcatccaagactatcaccctgtctctcgctgcggtgcagtacgatgtctgttatctagctgcgcacgttgggattcagattccgcttcacgaaagttcgtatgtgctgagaaatctctggcgaatcatcgaggaagggaacccgcctggttcaagcgggacggctactgctggcgcagggatcagctttgacggaaaaatcatcgagccagtcaagttagaacgaatccaattaagtctgaagggcgtggtaggaagttccagcaagagcggagttgatagacagcttgatcgagaggtgcgaagaaaggagaaagaacggttgaagagggaagaaactccggaagagagagaagaccggagacggaaacgaaggattcgcagagaggaaagagatagaggtaaagacagagataaggacaaggaggacgaatgggaagttctcgatactggagacacgaaagagccagcccaaccaggcaacccggtcgagggcgctcataagggagacggctgagagtaagcctggacgcgaggatccgggctggcagatttgtaaagaagattgacaatgtagatgttaatttaagacggcaacggtgtcttataagtcctgaagccgacgatggtgatacagaaagttctgccggtgttcctcagacacacatctatcagaccaacaaccatcatccgtaccatgtcgaccgtacctgccaatccactactagatagctcagtcattcccactatcgacactcgggttcagctccggggaagagatggcgacgtggccgttccagtcatggccactggaacctgggcttggggagactctcagatctgggattacaaggaggaaggttcgtgctttccatccatatccttgtctttatacgttctccgatcgaagacggatgcaaccagcggatcatagaggcgagcaccagaacagtcgtgtccatactgacatctcggctggtacggatggttagatttcgagaacatcaagcttgctttcttggaggcccttgagcaacagggtggtttcttcgatacagccgaggtaagatgtcgtttacctgatcgtgtgacgtttgagtgttctttgtctcgctcgctcgatgagactgatgttgcgtttggaacgtcctcatgttcgtacacatctcaggtctatgcgaaaggagagtccgagagaatcatcggacggatcatcaagtctctgacacctgagcaacgagccaagatccatattgctaccaaggtctgtctgttttcctccagatcgaccggtagcttatgaaagatgtttatcgaacgcgtttgttcatcttggttcgatcttgggtacacatgtatatggtgtagtggcttcctattcccagtccctcaaaccctttcttcttcactcctggacttgtctctgggttgaagaaaagtttggccaggttgggtttggactcagtcgatctctaccaggtaagttcccagtgtgtctctctcaagttcccttctttccttcatgctatgtgggcaggatcgacaactgaaggagctgaatcggcggcttgacttcttcgcaacatagatccatggtcccatcggtttccactcgtgggaggcccaaggtagggagctggccgaatgtgttaaacaaggacttacaaaggtattttcttcaaagatctctcgtttccttcttcagtacatgcatcaagcgcgaaatctcaaatgttctccttgacccgggcaccttagacggtgggcgtgtccaacttcagtaaagagcagctcatcaagatctcagacgtgcttgagtcccatggcgtgccccttgcgtcaaaccagatcgagctcaacttgatcaggcagtaccctcttcgaagtggattgatcgaggagatgaacaagagaggtgtcgtctgcttggcttgtgagtgacctgatcgttgctttctgttttgcccagaagcttacttgggcctttcgctgattctgggttattcaactcgatgaattcttccagactctcctctggctcaaggtcgattgactggaaagtactctgcggcgaacccacctacatcaggtcgaaggtccggtttgttctttttactttgtcttttttttcctctactctcagctgacatacatcctctcctcaacattccccaggttctccaacatccccatgaaccttgttgatccgctggtagagggtatgcgcgagattgccgagaagagaaacgtctcaatcggagcgatcgctctcaactgggtgttgtccaaaggtgccttttttctttctctgagttcctccctctggtgtatgtgccaacctgcatcggctctgactctgggtggcttgactcaacaggggctattcctcttggaggagccaagaacgcatcccaagccaagcaaaacgctcaaggcaagttcaacgactatctcttctctcttaaacaacttgcgtctaacaggcacatcttcggttttggttaacaaatggattaatgaatgaataaacaatcgatcgatcgaatcacttaacgcagcccttggcttccgattgacggaagaagagatcacacgactggagacgctaggtctcgagggtaccaagacgttcgtccttcttttcgtgttcattcgttccaggtaactatcattacgaaagctgatcaaagatccttttctctcttcttcttgaaaccgtctcgattggtttgacaggacttggtggcagaagggttaatctttgagatcatcctgggtacttctttctctatgattttcatcttgacctaacttgccaacgtttgcgttgtgattgctcttctgcttttctgctcccatcgtttcgagagatgtgttatatatgccgaccgcactatgaatgattaacttattcgaactctctgagaaagatcgcatgacacaatcaagtgtttttctttttcctgattatttatttgattcttcttactatctactccaaaaaagccagatcgtctgaagactctactggtccaatacgccttcaaagttgagccttcctagtattcaagactttttccgagatccacttttcgagctcctcattaaaccgagctggctgagcaagttgaatcctgagacgacaaaaggaaaatcattagtcggtattagcgcatgaaggaagataaacaagtacgaaatatacgtcgagagacaaaaccggtgaccgtttgaaaaaacaaaaagagacgaaccagtgatcggtatcgaaatcaacgatcgtagcatccaccgcgttgtttttgaatgattccttgccaatctcaggaatacagacataatcctgtagggcagctgcgaaaaaacttggtttcgatagctttgttcgatcccgcacggctgttagaacgatcggattgacaaaagagcgcgaaagagtcgactttagccttttgattatagccattcgacataatagaatcacaaacctgcgttgtcatcgttctccagtccctgagcaacgatccggtagtagttcaatgaggcatacatcccaccttcgactaactcggctactttggcatcaaagctctaacgaagaaaccggaaaccaaaaagtttatccattactcgtgtcagtattgactgagcgcatagaaacccaacatagctgggtttaggaggatgagaagggtcaagagcgagtgcaaaagaaatacggacggcttgcgacatgtaagaaggcaaagcgcactgtttcttctcttgaagccatcgatccatcccaccaaccggtgcaacgtactctctccacaaggtaggatcgtctgggaacagaagatgagcaaatccttcaacctgtcgaataaatagagtgttcgaagaattccaaaaaatgttagcttctatcgatcgaaatcacaaaccaagagtaaagcaggacaacaaggcaacatacgttctcgaggagagtcttctcgactccatcgatactgagaaacttccagtacccaaagagttcactaccgaccgtcttcttaaggtgccccaacatgatatccagaggaggaacaggccgaggagggttgaatggaacggcagtgaaggcaaagccgagaaacctatcttcatgataagttaccaatctcgaagcagtggctgatcccctataggattatagtatcgcaatggcaaggtcaatatgttcaggccgttatcatatgattgtctccttcactgtcgaagcgcaggaaaacataacacataaggaaatcagaaaactgaccagtcatgcccaatgacaatagcatccccaaccttttcgctttccaagacttccatcagatcatcagccagagacttgtggatgtaaaggctaggatcatcaggcttatccgtctggccgtagccaagcatgtcgggacagacgattccatagcctttagaggcaaagaacgatgtctgagcgtcccagtctcgatgggtcgaaggaaaaccgtgaatgaaaagaagggtgggaagccatgggtttgagggtgaagtgtacagataggagtatgtaagagatcgtgaggtcttgaatgtcttagcctgcatagcaggatgtacgtgggtacagatgtatacaagagagagatgaagctgatgggttagaacggagagatgagatggaaggagaagatgatatacgttcgatgtggttagtcaccctccatcaactttcataactggagtccttgctagcgttagacacagcgccaagtgtcgtctaggatgtacagaagacaaccgaatgcgttcggatgaaaggctactaaaatcgggtgaaaggcatgtctacgcatgttaatgatttatgtatgaaatcttgttatacatctatttctcaactcgctcaatccatcgcccatgcctctccactaaactctcaacgataaccttctcgatctcttcagttgactcccttccaccttccagcctgatccaagtttcatcgtaagttctctcagatccttcattcgatatgttcgtggttgccgatgaacaggacgaagaagaaggcgtggaagagctggaggcaggctcgacaaagacgacttcaaactttcgacggtgaagatcgttgccgatgaccatctggtggttatatcgatcgagggcacctcgcgctttaggaagaagtaaagattcatccgtttccaactggaaaacggaagatagtagaatgctagcgtcagaatggtagtccaaacctttggatacttcggaaaacacacgggaaagcctaccttgaaagagacaacataaccctctttagtccactcgcttaccagcggcttgaggatttttggtacttgatccatgaccaacgttagccggccatccgaaccagctactggacccgattggattttatgctccgcctatggttttctcgtccgcacaccacgtttgaagaggaaaaggcaatacatcagcccctttcaaaaactttatgtctcgatctataggacacagataaaccgaccattttttcttcaggcagatagaaatcagagaccgcggctgccagatagaacaacccatgtctaccaaccccgtgttcacttcccatgacctgactgatacctctcaacaaccacaagtactcattcactgtgacgaatggaattgttagtagcgtgccttcctcttggacttgatgatgcttagccaagataggcagcagtcttgagatctctggaggatggacttctatctttgatgaggatgatgtttctgctgaagttgatgatgagggagagacatccggcttgatggttaggagatcgagaaagggccgagtagaatgagagtaatgtctagagaatggcagaagggaatgctgtcggtggagaaagatcacagagtatgatggatgggagaggaaatattcggctgaggtcgctcctcttgttcctgttcaaccattgagccatcttcctctccgagtaagtaaatgcaaagggccaccttcgaacggatacccaattggctttggcatacgtaccagctgagaagttatccaagaaccggaccctgtggttgagatgagaaatcaccggaagtttagatctttcccctctaacatctaagcaacacttagaacgggagcagtgaaaagaaaaaggagaggtgggacactgtacatgttcttctccaaagggacactagttcctccgctctacatacgtattccagaaagaaagaccatgggtttgaagattaacatctgcatctttatatccccttctgctctgtggtcttcacccagtgaaaccaggatcaaattcaagcagggagaccgacaggagagagtcagacgtacggtaaccaaaacgacccgtcttccaagtcccttcattctcgaaatgaactcttgtgctttcgcttgatcatgctccaactgaggcggtggtgcctgggtagtaaaatatgatgtcgttgagattgacatgcttccgctccttcttgatgattttccctcgaacaaggatcctatgtttcctagagatgctctacgttggagttctagatagtttaggttgaggatttgggacaatgtggccgagatggatccttcttttctctctcttcttttcggagtagtgcgataggctcaagcaaattcgtccccatcgggtcttcctattcttctcaaccccccatgatttcaactcattatagccaggctagccttccggcgtgtaccgacatcaggttttttctttctttttacccttgatcttcctatcccttgattatatctttaatcttctacaagccaaggaaaaaaaagagaaaacgtcgtctctctttgagggatgagagaatcgttatgcatagatcctgacagaacgatagagtttgagaaagagagagttctatgtgccatagaaggaaagatggatggagaatataaccacaaaagaacaggatagaaatttatcaaatgaatgagaaggattgagtggaagaagaagatgtgatacaaaatcaagatgggcggtgaaggatgtgatgcgttaagcagtcttcgcaggtccggaagtagacgttttaggggtaagtttgattcccttcgtctttttaaggtgctttcgagtcgagtctgtttgaaggggaacaacaatggaagaaagcaagcggtaagcaaggtgagatggtcatccctaaaactaacaaagccagaggtagaaaggcacgtacgttcgataatcttcttgtcctcttcatcgtcgaacttgacgctctctccctccttcttgaccttctccgcctcttccaacgccttctcctcctcttcaacagagattggcagcggaacgaacggctcatccacctcatcggctggttcagcctcggactcctgggcgagtcgagccttcttggacagtcgggaaactttgaactttgcgacgtagaaaccgtcaactgagagaaaaagtgtgtatggtaaagatgatcagcaatcagacacaaacacagaaaacatgatgaaaagatgaaggttgaaacctaccattgtggacgtgaggccagtatcgtctagtaagcttcattctgtctccaaacactctgcccttgtagtttgcgaaaccttctcttccaaactccagaccagtatcaaccaacttgacgttcggtcgcttcctcaacgcgtactccaccaccgactcgttctcgtccacagtgacggaacaagttgaatacacaaggtaaccaccagtgggcgagtctgggttgatggaatcgatagcacaaagaatgagttgcttttgaaggtgggaaaggaggtggaaatctcgctcggactttaaggtagatagagagggacatgaagataagtatggacagacaacgataacgagccttgtcgaacatgatacgtatagcacacaagatactcaccttgttgactttgacactggcatccttggcgatgacacccgttccactgcaaggcgcgtcgagaaggactctgtcgaaaccacccatcaccttagggaactctcttccatcgtagttgcagaccaccacgttcttgcaacccagtcggtggatgtttgccgtgagactctttgttcgggccttgtttgagtcgttcgcaaacacaagtccggtgttctgaaggagagcagagatgtacgtcgtctttccaccaggggcagaggccatgtcgagcactcgctcgttcggttgaggcgcaagggccatgaccgggaggaaagaagaagcggcttgaagcatgtaatgacctccgaggtactctggggtagcaccgatcgggacggcactttcgaacacctgcaatccaaccttggtccactttcctatcggctcgaggttgactccacgactgatcaacgcttgagcaagatcccgtcgcctcgttcggagtgtgttggttcggatcgtcactggtctcggcgtctcgttggcgtcaaagaaagcgatggcctaaagcaataagaaaggcatcagaagatgaaagctagtgagcgagacgaggtaagaaaagagatgatcagatgagtatgaaacaaacctcagacaaggggaaaagctgaagaagcttctcagcaaggaactcgttatagccatagtaggttgcgatatcggtaatcaattgctcccagtactctgacctggacctggttagatgatcgtagccatttacaagagagaggaaggagaatttagcgccatggcctaagtaggaaaaattccaaggaagaagaaccacatactttccgtctttccccccaaacttgctccagtcactcaaaatccgaatcaactcgcccaatcgtcgctcaacctttcggagtccaccttcgccaacacctttcgtcttctcggtctccctctcttccacactgggtagctcgaacttctcctctccatcgaacgaatcatcgtcctcgacgtcctcgccatcgattggctcaccatcctcgccaaggatatttgtctgaatctcgtctccgtccgagtcgacctgaggaactttggaagactttgctgctggctcctcatcttcggatgtctctgctcccgaagtatcctcttctccagacaagaactcgccgtcttcgtcggagtcggatgggaagtctccttcatcgagattgaattggttatcagctcctggtggaagttgaccagcctcatcatcagagaaatcatcagattcggcttccgagtcactaaattgcaactcccgaggagcgggtcggggcatgccttcgtcatcgttgctgtgaatatgcattaggtttgacagaccgggacacgcttagcgagagcaggcctttgaacaaagaaaaagacgattacgagaaagataggaaaaaacctaccctccagccagctggaactcctctccgatctcttcatcatcgctgaatccatcaagcatagttctacatgaaccgaagaagaaagtcaaagtagaggaacgatcagaggattgggaggtgagctcaagaagggatgcagagctaaactctcaggagcatctataggaaacatgatactcacgcctcatcttccatatcatctgcctcagacttcttcttccccttagtcttctttgccgagccagacacactggactctaccggctttttggggttcttgatcttacgacctttggcatccaatctaaccttctttccacctgatcgagggacgtagccgtccgcctttcgcttggatccttgaggtccagacgaagctgcaggagtctcgagcgtttgggggggtccctgtttgttcttcgctaatcttcccatggtaagcgtgtctctgtgggtttggaggggaagaggggaggagttgcaaggaaagactgaggacgagggaagcgaaaagtagagtattcaggcgggaatttttggattggcagtcacgtgttgattacacagcaattgagaatgtaagtgcacgtgactttcaatcacgtgctgttgagatcaatactaaattgtcggctctagctctaatcaaaaagagataagtttatcctgagaaggccgaaacagaaggagcccgagaaaatatggagattggggaaaggggcaacgggccgcactgcacgtgggtgtagagtagaataatataagatgaaggcaagctggtagtgagagaaagacagacaactggagacagtgagttggttgattgtatggctcttgatgcatacagtcagactccacaggccataggatcatccggcgaaaagggaagaccggggtaagatggatcaagatatacaattgcaattaagagagggcaaagaacgggaagcgggaaggcggagaataaacatcaagaatacattgcacaacccacaaagcttgataaatcttccagatgggaaaaaccttttcgccaagccggaccgaccaacggagtcttgctcgtttagattgtatgagatgtgtatgatgagattatgattgatgtctcctgtactagtcaatttgggttatgagaaagtctatctcatttgatggacacccaccgtcagggcgatactgcgccagagtgagctgaacggacaacaattagcattgcccgatcattacttctatgacgagcttgattctaagaccaaacaagctggcgaaaagaaacccaacctgaatactttatttcttttccaccaccttctttcttctttctccaagtctctttcttcgcttcttttaaattttctcaggcttctcttggtaaaacagtcgcagaccctttcgtttcttggactgagtcctctcagttgaaaacactggctatttgatgggacaacattatggaacctacagacagtcatgacacccgcagcgcaaactatcattttcaatcatctataccctacagcgttccatccaatccttctaccagcatggccgaccgggaggaggctattcgatcagctccctgggatccaccggatccatacaccagtgattcttcggccaacaactcgatagccgttcagccgacagcacctctttatccggcctttctaccctcatcggtagccgcggcaggccgttttcctgaatcattcagatctgtcccatatgccggctcggctaacgaattcgatccatccaagatatacacatactccattccattcatcggtcatcctggacagcaacctcccactggtggctatcatcatatggaaaacgagttgagccgaccggacgaacccgatgagccctctccacttcaaatagcacccgtccaggacaccaaagtttcggccaatttccttgaagttatccagccgtcaggtcttgaacaaactgatcttggcttcgagagcaattttctagcagagcccacactccaagtaccgtcatatccagagaagtccactgactcggtagatagtactcattaccgccatcgcgaggcgtacgtcccatcccatggtcgatcccacactcatttgacctcgagctgtcatgatacacatcatgaatctcaagccaatccttcaacccaagtaagggtcgagggagatattggttgtcattacatacatcaacccagcacaagctcattcttacctttcacatctactgttagcaattcgttatacgccaatattcccacccctcaccacacagagtactctcttgcccctcatccccagactcacccagttccttcatacccaacctcttaccatccaaatcaaccagctggcatctcaatcaattatccgaccatcgtcgagacagaggctgggatgccactcggcccgagaccggaagtgatagagcacggagagaatacaagcgaaggatgggagctcaactcatcctttcagccgccagcctcttctttgaccgttggaagacatgagttctacaccggatcgacattacttccctctgattcatctggctcaatatatccaacaattcatcagaatccttcatcagccattcacctttctccaggccaacaatactatcagttccttcaaccatcactacagcagcaacatcaaattcctatgcacaaagcaacgccagttctacacaatgctcttccctcgccgtcaacgtcttcatcatccaaaccaagccagtcgttcgtctatccagatcaggaacacaattcgattcccaatgctagttcggcatattccttcttagaatctcggtctaggtcgatctctcattcgaacccgtcttcttccccgccctctcacaacaccccttcatcaaccctacaatttccaatcttggctccagccggtcaaccagtttcatatcttgctgattctgaaccctcctcagctcagtccttgacattcgccgaccagccgattgatcctataaaatcgaccacgctccccttagagttcctgaagggcaaccctaagcagggcgctaccagcaagaaaaagaaacgaacggtccatccaaatccaccgcttgcgtcatgttccatctgtcagaaatcattgatgagactattgatgcgtggaacgacggaagattgggagactgactggtttggatggtgggtctgtagagaatgttccgagagtcaaatggatgatacatcccagattgaagtttactcaggtgcgactaggtctggaatggtatctcaagactcgttcaattcagtcttaggtccggagaaggcaaaacgtagagaccgaccaattggatcagtctttggtcaaatcataagcggtagtttgtcaaatggaacgagagcaggcggagttggaagacggaaacgaacaagggaaacgatgaataccgaggctcctttggtttgtgatgtttgcttcaggttcaaaggacagggcggaattgttcctaaagacggaaggagtgaactaaagttcagcgttgaggtttgttctcgctctctctctcactctgttttctttccctttctctccttgatggaggttttactcctcaaaatcaagaaaaaaagcgcaactgactcgcagacgaacgctttctgaaatgccatattgaaagtttgtatgtataagctgcgaggaaaaatacaggcgttgtacagactgtggatctggtggaggagcaaggattgggttagttcatagccatcctctctcctctcaaatctgttttacaccagactatttttgttgacaaagtgacttgatgcttcgttctaatatctctctgatgcgctgatgaaatccgctgtcgttgatgtttcaagaattggaaagtggttagtcccttcttgatcggctcgtccttttcctcctattccagtctcacgttcaatttatccttctatcgacaggcgttcgaaggaacttttcattaataacagaaagacatgttcgctctctcatgtacgaattggatcggcccctatgaaagtaggaacatgggatgtaaaagactttgaaaatgatcatgtttgggttgagttgcttgatttgtgcgtctttctgcgttcttgttttcttcttatcgacaaccttcgtctttgatactgaacggcttatctgtgctttttgctccgttttcgaaatctgcatttttttccagatgtgaagcgttatggaaagatagactattgtcaaggatggccgttccagatgtacttgaagcgaacctgggagatctaaacgatcgacctgtcagtttaccctctgtctcttctgttttttctcttgatacatcctatttaccctccatccttcacgccttttctcttttggcactcgcgcatcatttatatatcgcctaatcaacgcagaggacattcgcagatgttcaagccaccctcgacgctggttggccaagccgtcaacctttaattgatgcccgtcaaaagatgatgtcacctcagctttcttccgagctctcacgcacagtcaattacggtgacaatcggatagatacaagaagtgggcagaggtttaggaagtatctcggtctgacgtggtgtaaatgtaaaccgagaagatccggtctggtctcaacgtttaccaatggtggtcatggtgatagtgggcttggtgggagctcaggttcaggagatgaggctttggagattgttaaggaagggaaacaatccggagaagaatcaggggaaggtctgttgtctttccttttttgatccactccggtagatcacaagctagatcacagtcattttggggttcaaaaatatacatgataggtctcattggacacgagagcataaataatatcatcccaccgggctatgaactcgtagggctctatatcggtgattggaacgtagatggtcagtttttccatcatctttcccccctttcttgatcgatcgtgtttcgatgttgactggatatcccgcttctcttgccatcttccatccttcatatctctgttgccccatatcagacgggacgctgcttataaccacgtctcttcctttcgaagggagtgataggtcagtggttctattctggtttcggttatgatgcgggtgatgatcattgattgttttgtgattctcttcaagtagcgaggatcgaacctgtaagacactttgagtaatctctcccatagagcgatgagaaaaggagaagccctgactttcttgacggtcggttatctagctctgacagttggggaaatgatattacgcagtaagcgcctttcgccccgttcagtcttatctcgtcgtttaagaattttccttctcataacaagttgtgtcgattttcttgtctagtcgtgactgaaatcgaagagaccaacgctgcactgacggcccacggtcaaacccaaggagaggaacaagtcgggagaaaggcgccatcattagaacatatatggtgcatttcggatgggatgacctcccagattagggataagatgcatggtttgtctgaacataatatgtctaattcctttttggattctctgtagtcaacctctatctttcttttctgataactcttctaatggtattccatagaatctctaaccagaaaaagacagtttcttcccctggatgaatacctagctctgcaccgaacagtccgaccagagatcttccatgagctcccgtattcccttcctggaccttgggtcgatggcgtaggcataccaggtacgatcatggtccgatggttggggccacattttgaccgggaacaacttgaagaagtgagcgtcagttttgttttgtttttctcttccttttgtcgttctctccgatgtttgtttgtatcgtcagtattctgacattgagaaattgtgcgctacccgggaatttgatacatctcagtcgataggaaagaacgatatcgggaaaaagtcgatcaaagctagggtcatcaaggggtgacgggaagacggtgcagcgtgtatttttaccataaaataatcctctcatcaatacttatggcataaggtttaactgttcgagtgtttctttcatgtctctcgtacttctcttgcaacgcaagcgagcttgtccggacagtctatctgtgcgagttcaacctattcctttcgcccactcaagagaagagatagaagaaaggcacagaatttctcaagaggtgtaaccactggttacaccagctgtcttgcgaaagagaggcagctagtcagtcaagccagacggacccacatcgacagcgagcatacacatccagagtccacgctacatacttctacagacatttgtcggtctgatctgtcgatagccacgctctctatccataaagaccatatattgactgttcggcgtgactcaaaaagtcaaacagaaaggtgaggcagagacaggtcatacgcgtttttcctttgtccgtggagtgaacgggaacacattctgtgcaaccgttgtttcgattgcttttcgcctttcctcttcctcctgttcggtccaggtgtcttattaagcttggatcttgcactgtggacagattggactcgtagtgtcttgcaggattcatccggggaaacatctctggtcgatcatctggattggacggccttctttcgtcatctgtacgttgggcaaacacgcgtctttccggaaggctcttaatctcgaactcatccgttctctttccttggtttcttttgatcacctttggaatcgtctctctttgggtttctctcttttcttatcttgtgttcaccagagcttttctgtgtggatagatcctcactttcttcgaaaatcaatctcttggttcccttgaacgtctctttctctctgagcagtatcaggaccatcatgcctcgagctcaaactagtgggtctaccaccacagctacccttcctcagactcggtaaggcatttctatgtttattgcctttttgaatctatgcttcaaaagcttcgtgcagtcgagaaacaaggtcgatctgacaatcaatcattttgaatgacttggacgcgtcttagatcccgtcgtcaaatccctccatcgtcttcaaacttgtcatcagcaaccaacttagctccatcgtcatctcgaaaccagcttttacctcctcatccagactcagatccgaacgtgccgtcctccagaacaatcagaccgttagctggggttcttcccactggcggctcatcttcttcttcctctctgaccacacctgtgtccttcaaggttgaagcccataaacttccatccggacagatcgctgatgtgatcgtgttggatgactcgccctcacctgctcctccaccactgccgtcgtcttcctctacttcgtcatctgtgagtaaacggctcaaaccgatgtcatcgtcagcaactacaggcagtggaggcgggagcgtaggtggagctggatatgcagtcggcgatacgaattcaagttcaaagttcggtcatagctcaagtaaagctcagggaagctattctggtgaagtttatgcaacaaacggaggaacgggaaggaagagaaaagccgatgagggtttgccagtgggcattggatccggaaaagttagtaagatcacgaatgggtacacggatcataaagtgagtagtagaggtgccagccatctttcctttttgccggtgttttctcgagtccgactcttggtcgacccggactcaacgcgatttgtcatgctttgattcattcgcacttcttacaatcaagtcgacacatgcgtctacttcaagttcatcatcgagtcatcgacaacatacccagccactcctaccaccttgtgacgacgccgaaggtcactatatcgttcatattcacgccgtcatcgccgatcgttgtgcgtctactctttccattctttgtcatctgttccatacccttaggaagagtacgagtttgtcttaatcgccgtgttcatatcacgtggtaccattcagatcggatagagaaaaaactgggagagggaactttcggtaaagtggttcaagcgtgtgacattcggcggccagagaggaaatatgcaatcaagatcattcgagccgtgcagaaatatagggatgcgtccaagatcgaaattcgagtcttaaacgagctcaaaaatggagaccgtaccaacgagcagtaagtctcttctttttttcgtttctttatacctactttcatacagtccaaccaaatttgtgttggatcggtgcgtcgtccagagctaatgactgtgctcatgttctaccgatcgatagcaaatgcattcatctactcgaatcttttgactttcgaaatcatgtctgccttgtgttcgagcttcttggatcatcggtgtttgattttctcaaagaaaactcgttccaacctttcccaatgagacatatccaggattttgctcggcagttgcttgctagcgtgtcttgtacgcttttttctcttttctttgtctgcggacttgatctatggtgccagctgcaagaatcgatcctgaatccttcgctttctgtatcatagatctccacgcactgggcttggtgcatactgatttgaagccggagaatatcttactggcagattcaagttcgagaatgatcacatccaacaaggtccgtgccagcttgtcttctctctttcgaatttgttcctcactcggctttatcgttaacaatgataatgctattcgttatgtcggtcgcttctatgaattcagggcacaagaaggctgttactcaataacacggatattcgactcatagattttggctcggctacgtttgagagggaataccattccaacgtggtttcgacgagacattatcgagcaccggagatcatcttgggtttgtatcagtctctttccctcctatcacagcaaagaagaatttggctgactgcgtttttcttcatgccgaaaaaatataaaggcttgggatggtcttatccgtgcgatatgttctccatcggttgtatcctcgtcgaattttgtacaggagaggctctgtttcagacgcatggtaacttggaacatctagctatgatggagatcgtgatcggaaaaatgtcgccggactttcttaaaaaggcgatgtgcgtgatccttttttttactttggtgtacgcatgtgatcctttcctaatcaagtcagatgaactggttgatggcgttgaaccctgtttgggaaacaattcaatagacgatcaaaaccggaattttttgtgaagaatcggttagattatccaaattcttcgacagatcaatcatcaaaaaccttcatcaaaggcatgaaatcaatcgaggttcgtccaacatgactctcaactcttgccttttctttcttttcccccttcattcctatagaggctgatttcctctcatttgttcatctgggatggaaacaaacgtaaacagaggattatcgatagcagggcttcgccgagaatagcgaaaccgttctgcgatctgatcaaacggcttttacatttcgacccgaaacaacgtctggacgttcgctcggctctccatcatccattcttcagtttacaattgtcagtagtttctctcatcccttcgacatcttggttctagtgagagattgttaatctctcttcttcattttggaattgatttgatttcatcaggcctttggaatgagggaggtcgagactgaatgtcgttgttctgattccagtttttggtttccatcatgccctttttcatttccctcctccttgcaatgtatcgatcaccttcaacccttttccctctcgtttttctttgttcgcctcatcaagtccgaggttttgttccctagatattctcttcctcagtgttttcttttggtctttttcatgccttactcttcttgaatactttctttcagcgctgtttcttctctttgtgcatgtcatagtcttctcatcacttttcctgttcttcaattctccctttaccgtcctcttcattcttctttgttctattcaatttttattctgttcttgtgattctcctttattcgatcatctttccttgtctccgtttgtcttcgatggattttttttttccaatttagtcgcagggtcagataagggtctaagaggataaaatagaattttgaggaaaagtaaaggacaagagatagagtcaagaagaaagacacggaaggggacggaaagaaagcagataaggcaaatcctccatcgcgtccgtctggcttttacttgagcgacatcacaaagctctgttcgattcgaaggtgtgatgcgtttgagccatgtcaagttccatggagaggaatagaaggacgtataggatgacgagaatgagtgcgtgacatctctgatgaactcaagatctagtacgaaagtggaagggaaggtggatgaacgaacctgctccagcttctcggcggcggccttgaaatcctcaacttctctccagcagtccagaggagtcgttgggtttttgctatcgtttccaaaagtgcaaaaagcaaaagttcaggacgagaaacaacagatatctcgacggcaagtaactctggccaagggtgtcgcgaacgagaacaaagcttacaggtagcactgcttgatgttctccttagtctggttaatctctggccaatcgctcaagcttctcttcttctcgaatctctcaaccttctctctgatctcttcgatatcccgtcggagaatctcggaagacgttccggacccggaggcggatttttcggtcgatagattcgaagcctggagttcggcgtgcagttgggcgttcaaactggcttcctgagctttgagggattgaagggaagactcaagtttctgacggatgtgctcgctagtgccaaaaggaaagcaaggatcagactaagaacaaaagaaagagaggcagatagaaagaaaaaagcttatagaaggctcactcgatggatgattgccgggcttgagaaggagatgctgccgtcgagggatcagacaattgagcaatcagctctggggaaaactggacggtaccagcctgggaagccggataaaagaccttttccgagaccggagaggctggtgaagattgctgggcacccattgtgagagagaaacagagaagaaagaagagaaagggaaggaagagagagaagggaaggaggttgagcgccgttgtcgtcgtcgtcgttaagaggaaacccccaagctgctgacggaacgacgggttgaccgcatcaacaaccacccaccgttccgtctcatccgtcctttgtcttcctttctttccttcctgttcttccatctcagcttgctatccatgtcgctcagtagggaaagcaagaagatcatcatcgaatgtaagtgtcgtcagaacttgtctgctcaagcgacataccctctctcactccggatcggtcggctttatcctatatccgatcaacttggctgactcttgataatttctatcttcagcttcggtctatctgtgcacctcagtgagctacttgctactttttactatcgatctggttcaattgactaattgtttggtcatcgctgctctcatgcgtacagttactagcactatatgcgtcatacagattgatggaaaccctttcgccttctaacacggagcgccgaaagtccagcaagaaaggcaaagagacgctcgaacgactgaaggggtcgggcaaggcccgtttggagaatctaggagacctcaacgaatacgaagagactcttctggctgaggtcgtccacccggatgatatcgaagtcggcttcggcggtatgctttccgtgctttttatctcagcactaaagaaagacaactgacgacctttacatccgctcttttgctgggaccaactggatcagacgtaggaggattagaacctatagttgattcgctcagagagtcggtcatctacccacttatctaccccgagatttataattctacatccggtctattgactgctcccaagggagttcttctgtacggtcccccgggatgcgggaagacgatgcttgccaaagcgctggccaaagagagcggtgctagctttgttagtctctttcttttgttataattactactcattttcaaaaacgatgaagaggcatctgaagacttgtcctatgtttgtgtcatagatcaatgtccctctatccgctcttgccaataagtggtacggagagagcaacaagctcatcgctggtctcttcactctcgctcggaaattacaacccaccattgtaagtgttcgcgttagctcttcttatatttctttgatgcatttatagacgaaaacgattgtgatgactcatgaatgatctccccacctgttgaacgtgaaaaacaaagattttcatcgacgaaatagacgctttgcttcgaaacagaggatcagataatcacgaagtcacgtctacgattaaagcagaattcttgactctttgggacggcttgacgtcaggagaacggtcgagaattctggttctaggagcgacgaaccgacccaacgagtaagcattttacactctttgtctaaaaaattatcttgattctagtatgatgttgtctttttttggtgtacgacaaggctcatcccagttgttatgtttcgcgtggtttgggattgtgttctactcgggtttcaccaaatagtatcgatcctgctttccttaggcggatgcctaagaagttttcggttggtctgcccgatgcttctcaacggtctcgaattcttgctctggtcagtttctttctctgctcttgatctcttacccatacgctccatactgattggaatgccttaaacttgttttcgatgattttagatgttgaaagacaccgctctttccagttcactctctatctctcatctggctgaactgacggaaggccggtcggggtccgatctcagggaactctgcagggaggcagcaatgagaccgctcagggaggaaattagagggaaagggtttgatcctgtcaagttgggcgagaaggtgaggccttcctttgtgttcctctatcaactgagtcctgggttaagattcagacctgactgtaatcttgtttcgtctttatttattcttctcgtccaattgggtaattctcatccttgtttgtcccaatccaaccagggctttgaactaaggccattggagttgaaggacttctttgacgaatcatcagctctagaagatggcttagtggacggttgatccaaatccaggatttagattcagcatcttcctctatttctcttcattcccttaccactctcgccctttccttttcactctgtattgacgtgcatcattcaatgttcaggatcgaccgttcattcatctttctctcgtctaaacgtacacatgcacaaacgtacacaccctcttctccttcgctgctttctcggttcagttttatctttatatgcaatgcgcgatttaacggactacgaagtactgaatatcgaacacccacattcatttcatataccatgataaaacaccatgataaaacctcgcttgttctgtaagacctaacgatcagaacatcagactatctgtttagtcaagaagttgatcgcatccatatgtttgatagtttgttctctcaacgggttcttgccttacttttgtcgctgcctactatgtttacaaaggaaaagaaacatattattttcaggatgatgtttttccttattcaatgaaagatgagaggcgaaagggtacaagaaagcacagaggtagagagaagagatgattaggcaataggacaagatgacttatacgagataacagaaggtgtttttaaattgcgggtgagagatagtaaggaaaaagtattttacgatatctatatggacggaagcacgaaataaacacctgcacaaaaagaaagaacaatccggtagagtggaaacaacgacagacgatgatattaaggagaaaagaaagcaaaaacaatcataaaacaaaaacaaaatgaatttgaaaaccactataaccctttacgagactgattcccgattctagttcttgatgttgttgggatggttgggcgatgactcgtcgatctctcccgtcaatcgaccagaaagatcacgtccgtcgtaaacgttttgaacatctccaagcctgacgtcgtcaacgaagaagaaggcgatgatcggagggaagacggctacgaccgtggccccgatgcacaagttcctcatcacataatcgtaagcatggatagctccaactcgaatcggatcggcagcaggataagcggcgatgatggtgattgaagcgtatagctcggcgttcaaagtcgcgttatttccggggacgtatttggccaaagcggcgggcatctgagaagtccaaacggcagtggccacggcagaacccacactgtttccaacctcagtgatcaacagcacaagcgcggtcacggtggcaacatcgacatgaggaactcgagcctgggcagcaacttgaaggcagatggcggcgaaacctccgcccattccttgaaggacttgggtcataacaagctgtacatacgacaaggggaaaacacagtcaagtcggatctagaaccgaaacgaagaagaacaaaataacaggtgatggacgaacctcagcagcgctaccgttacctcctcgggagtgaatcatgataccaactccaagcagtcggatcaacagaccaccaaagagagtccacttgagatttctagtaaagaccataaggataccggccaagaatccaaagacctgaaaatatgccgaacagatattacaacagatcgtcaacgaggaatgaaagaagaggtgtggaaaaaaaggacaatcgacgtacgcaaagagcgatggactgggtgtatgcaaaatagttcaagttcactggactccaggtgggctgagacacataaacgaaggagtacactagcagtcaaaatgaaatcccattctaaagaagtcagtcacgctgatttgagagagcaattttgagaagctggatactgacggtaagtgtagctcaagtagaaagacacaaagtcgaggaaaccgatggcacaagcggccgagatgtttcggtttttgaagaatcggtaaggtgcaacaggctttttggcaatcttgacttcgtagatgacggtgacagggataagacagactccgaggacgatcatgacaatcttatttacataacacaggaaacaaagttaatcttgagtgaagcagtgatagaggtggtgtcaggtcggcgctcaccatgctgggagttttccatcctctgagggctttaggagcaagacccagaggaagaaggacgagtgcaagcgtggcggcgatcaagataagaccgataatctaaataataacagaagaagagatcagttcagaaaaggatcttgtcttttttgtttggaaagttgactagaaaaagcacaacgtacatccatctcgatgaaaagaccctttaaggtagcaccgaagttcttgaatccggtctggtagatctgtggaacaacgttaagtccggcgtccaccccgtcatctccagtggcggtggtgtggacggggacactagcggcgatgtactcgggaggagacaaagcggcggtagcgagggtgggcactctaagaagggcagctttctttgctttacgctgggcccaaaggagagtgatgataatgggcaggacgcagacagggatgataatacactatgaacataattggagacaggtgagcaatcggaccttgtcagcatttagcggagacgattgaagctgaagagaaaaggaccaaagaacatacgaaaattccgtatccccatcgccagttgggattgatagcggcggcgatattactaccaacaaaggcattgatgacgaagggcatagtgcagagtccagaggcaaatgcacgccatcgtagggttgtaatatctgcaagctgttcagaaaatagaaaaacatgagctgagctttcaaaatgaacagttcaaagtatgagaaaacgaacgatgatctgggtgaggatctgaagaccagtgtatccaaaactgtagataacatctccaccggcaacctggttgatggtgctggcagaggcgataacggcgtagcctacaatataggcaacgaccgaaatgatgtacgtctcccctcgtccaaagctgagaggagagggaaaaagtagaaaagaaaccatcaatattgccacggaaaacggatgctagcagaacagaagacatacacatcagcaaacttggcgaacgcaggctttcctaccgcgataatgatcgcagcagcagtggtgaccgttccggagagagagtggtcaagaacggttgaggtggcctggtagagaaatagataggtctagatgcacccgcaagatatgcagtaatcagtatcgaagtggggttgagttcagacagaacgtaagaccttacagtgacaccatcgagagagtacacatatgaggcgagtccaattctgaatggggaggacagagatgagggatcgaacgaatcagaacaagcggcaagaggactgcgtgtgtgcgcattcaatcaggctacaaacaagacttacgagatcagcaaggcccatttgctcagtggagtccaaacggcctgggcagcctcgacctttgccactccgggctgcatctcggtgtcgtgaacatcgtgcttctcgagtgtgtaggcggcgtattgctgaccagcctcttcagaaacgatacgcttgttcgcctcgtagtcggtgtgggtgtctgacattcttctgaatgtggtggaagaaaactagacggaaggaggggttaggctggtttgttcgtgatctttctcttctttaaaatcaaagaaagagtaaagtgtaagtttctcaaagaaagagaacagaaacagaaatgattttccctctcgtctggatctttatattctctggacgaagaaaaaaattcttgtgccgttgagtgaactttttcttaattccttccatccttggtatagcaaaaaaagggagattcaagggcagaataatcagacaaaataatcagattacttttacagagcccgtgtgctccaccaggctgctaaccgactcgtaatttcgccgatcaacgcttgaaacaccgaagacatccgatgatggtggacgctcagcaaatcagattgcgtacctgccgacaaacggcgattcagccttcgtgccttaatcccgtctattccttcaggtacgactgcgtaccagggcctttgtcttggaagacgattgactgtagaagcgccagtaacagaacggcatgtcgaatctgggcagtcggtggccaagcgaggtctgtagatcagttgaggcacataagcgagccaatcagattagaccaggcgagttatgcattaatattctctctcgagttcggccggattttcttttcttgggcatgtcttcgttctactcgattatcgtttcttctgattcagttcatccgtcttgtgcggatcgattgaaacaaagatgttctttttcccttcctcgtccgaccgatctcggccagaatgtccttttcgttctgtttatattgtttttcagtgctgtccagagactttgtcttgtctggatcgcttggaagaaatccaacgacgcaatgatattcgtcagctcttttcaagagagagagagagagagctcggcgcaccccacagaagcaccttgagtacaaggcagtctgtggccgaaaaaaaattgaaagaaaggataagaaagagaaagagaaggctagaaaagactatcgagcctaggtctagaactttgatcataagaaaaacaagaccacaagcttattgttcaccacatgtagtcgtttacattcttcgtcctcgtatccgtccctctccctgtctccgtctctcggacgcttgcgagccaacatcaaaggttgctggcatgtttaattcttttcggtagcaaataggaagaaaacatcttgagcgaccagtgaatagcccagggctgttgagagagatcagaaaggaggaggaataatgactgctgatgcacagtagagagtatcaaatcgactggccaaatcacaaatacgacgcatacacatacatgttcgcatatatgagggatctgcgttgatcatctacatacaccaaagtcgaacacgctttcatccctatgttctacactgaactctcgagcaacctcttttcttctccccaaagctattgactctattcgcgtctccccatcattttccgttgacctcgagcttgaaaatgtcgggtctacaaatttgagcccatgaaaccaaccatatcagattgaaatgcacttgagtgaaaccgtcgctttaaaatgtgagaaggaagtatagcacgaaccgagtatagtggccggcgttatcgaggtcaagctttgctcctagaatttcatccagatccaacactgcagagatcaatctgctcatttgtcatcccaaacagcacagagttagcatgtagacacacacacacacacacacacacacacacacaca

SEQ ID NO: 180 - DNA, 22802 bp, Xanthophyllomyces dendrorhous
cacacacacacacacacacagagaaagaaaagctcagagtccagaatgaaaagacaaaaagatcgacgaaccctgctttccctctaagaggcccggcgagaacctctcccaagggcgacacgatcacacttccaccggcaatcatgataccctccgggtcaaccggtccttcgattgggtgcccttccggataatcctagagtggattttcgagcagaacacgtaagaagaccgatcgtgtttgtatccgttcaagagtcaggtgagaacgtactttttgttgagcaaactgtcacaaccaggggaaaaaaacaatcctcatcagccttgtctcccttgcttgcttgcctcgcatgcccaacggcatcctaataaaaatcaagggcagtcactcacctgacaagcgttcaacacgaaacatcttccctccatcgccagatgtttgatcgtgctctgccagttttcccttccatcgacggtaggcgtgcagtgaatctgaacgccttggttccagaagtgttgtcgaaggagaggcatcatgttttcccaacagattgcagaaccgattacgaccggtgaactctcagagttggatgcgagcgtgggcgcttgggcggcaggcccatcgacggcacccacatcgacctcggcagcagcggaaggaaaggtgtgggtgacggcagagatagtcgagccatcaccgaacccccagatgagtttctcactagccgtgggcatcaactggatcactgaaatctccacacgcccatcagctcaatttcagaccgcgtgaaagctcgagtcggaacgtttttccttacctttcgcctcttgtagaccagaccttcggtaggactgtaaaacccgacgacgcaatagagcgttcccccatccttttcgatcaaaccagtgatgatgaacacgccggaacgcctggcgatatcctcgatccgagtgtttgctggaccggggattgtgattgcggctttgtgatacgcggcgaaagtttgacgaccggccgctgatcgggtacctacgactgctccgaaagattcgaactagacggtcaagagtaaagaagcaagtaagatgaaggcaggaacgtttaggtaagtacacgcgcttgcaaatacgaatcgataagatgatctcaaagcgctattcaacccatggggtcgatagattgaagaaagaacacacacggcccgactgacttttgggtaacctccaacgctatctcgtcccacatcacagccggcagattcatcattgatagaaaagagccagggtcagatgaatttcacaccctagacccgagtttgaagaagaagaaaagaaagaaaagaaagaggcgagaacatacaaagcctcaggaaacaaaacgagttgactcccaacggccttagcttcctgaacataaccctccattcgatctaacgtcttatcaacgtcgtatcctgctgtcccgcattgagctactgataccttgattttcatccttcagatctacttgtctctcttttcttctcgttttatttaggtgttccttaagattagactgaactagactgaatgatgagtagagtgaagaagagaagaaagaaggataaggtctcgtcgaccgaggtatttgacataaatatggactacacccttggtcatctcctatttccttcctatcaaacgacatctcatcgtataaacagtaatgactcgacatctgtctttctctctttttcatgcctccattatcaatattttatcatttgatgtctctattcgtccttccttattgactcgagtcatgacattcggagagatcttgttccggattgtaaatcattattcgtgatggatcttgtcaaaacgttgagaacgaagaagatcgaaaccagatatgacaagaaaaacaatagccggtccactatcactctcagaactaaatgccacttgcagtgttctctattatccggtagccggtcaacaatcatcgtcggttcacggtgtcgagttgataaggagtaaaagccaatctatatgatgttgagtacaggagaaaatctgtcttttctttcttggttcccgaaggagaggaaattagaagggatttacatatgctagatctctggtgaacgggccccttttcggatcgttcacaagagagaagaaaagggagtattttaaggataaacgcggttatatagtatgaagggagcagataaaaaaatgcaccgtgaaatgattggtgtggaactaggtagagatgtgtaacctcgaatagatgagaagggaaccaagatagaaggttcaaaaaacgtatgtagagataaagagagattcctgggatcgaaatatcaaacagcccaaatgtgagagaaagaaagaagagaaaatcgaaagaacccgttcagatggcccttcggctgtcctgctggaaaccagggacaaacatctggacgtcctcgttggtgggactggtcttggggacgctatcatcatcctcggacgagtgcttctccctggagtcgtgctcggaagtcttctcagaggtgtacagggcctgctcccgtcgagcctctcgctcccgcagactcttggacttgtaaccaaacaaggcaaatcggccctccttccacttggcttggaacagaatgagcatgatggcgatccagtagcagcagtaggatgaaacagtggcagcggtggcggtgttgttccactggaaaaggaagaagttaagggaagaaagaagtgggaaagttagtaaactgtttagagatgagatggagaagaaaaagaaatagaagcagaaacgcactccgaagatggcgttaaagatcatccatcctccgttgctgttgatctcggggtttccgtagttgacgtgccaaacaatgttggaaccaccgacattgtacgaaccaggaccctctccggactcggccacatcacctccgaccttggaggcccacgggtagtactcgcagaagtagacacccttgctgaaaagaccggcaccgatgcagaacaagaagcaggtcgagatgatcaagaaagtgtgaagagcaaaggcagatcctcctcggtagatcaagaacccaacctgtagaacgagcgcaaggaaggtaaggggtgggctgtaggattaaaggacggcaatcaatcacgacaaacgtacaatgagaccggcaatcagaccaataacaacagggagcggggtagccttagcaggttgagagatagaaacctgagagggggcaagaatagcgaacggggtaagctaaatgtaaataggcagtgcaatcaaaaacgacaagaacacatacaccagcaacgaaaacgacggcctcgagaccctctcggaggacagtgataaaaggcaagaggaacaaagcccacttggcggatcgaccctgcttgttctgaccggcctcgacgtcgttggactttgatttcctaaagatcgagacaaaggcttcccatctggtgaccggtcgagagtcaacagcgacgttctcatattgctgttggttgaaagcagcctggagcttaattctccacttggctcgagctcggtcgagtcgcctatgacggaagaagatagaggatgtcagtaaatgtgcgcaggacaagatgaatcaaagaagagaaaattgagagtggagactgacaagaaggcgatacccatgaccatgatgacaccggaagcgacgatggagaagataccctcccagagagcctcggactgaccccagagatcggtgaccttggtgtaccagacggcgatgaaagcggcaccgatagcgagagcgatgaagagaccagagaaagcaccgaaccaaatctggatgaggggtgtagtgtaattgattgagtgagtaaaaaggttgcagatgaggacccagatgtggaaagtgaccgacctgagttctcattcgtcgaatcattcccttgacctgcctctcctcatctgcagcatcgacggcatcaaacttcgaaccgtacacaagctgttcaacgctgcgagaaagggatgacagaccggaacaagaaatgagctttggtccgaaggaacaaggcaagtgagaacgaggatataaatgaacactcacaaagagagcagcacggagataacgataccagcctcgatcgtctctcggactggatgtgcgtgtgaagaagagatatatcaagaggggaaacaaggcaagtgagaaggtgagaggaaaggaagaaaaggtatcagtagaaggtacgccaacagctgacgggtatcatacatacacaaataggaagccaggacatacagatgatgaagaagatggggacggaaaagatatcctgggtcatactgggctaatggaaggcgtttgatacacacagtatagacttgaagagaagaagaaaaagagaggcaaggagcaatgggaagaagctgctcttatatccttcgttcttagtctgatcgcagagctatccgattagtatttccgttgccagctgcccacttgccacacggaggatgcaccacggacaaccacacagaaaccggaggaatgaaacgaataaaaaaaaatctatagagggaaccaaaaaaacaacagtaaaaaaattgaaccaacgagcgacgagcgtgagcggggaagcggaagggaagaaaataaacgatgaaaggagacgaagaagagaagggaaaacaggcagtcgggcaatgttcagccatatctgattaaaaacctagaaaggtcccgggcccctgtgctttcacgaggcgcctggccacacagcggcgggcattcagcacacggcctcaggcaccatgactggatcacacattctctcttggcgcagacaatataccatcggtcatatgctctctcgacatgcctctacattttcgttcagggtcccctctttcgggctgtacggacagtagcacattatctccaaaaatagaactgctgtccaatcgagccaatccggagcgagcgaggatgcgtcggccgtggacggtacatctatgtgtgggtctggggaagacaggaacctgccgatcgaatcgagatcacacaccgacgtatctgatttactgtcaatatctgattgtcactttgtgtgggcgtgcctcatcctgcataaaatagctgtactgcatgccggagagcaatcgttcctttttccacgcttgccctttctttttcgtctctctctctctgctaatgccccgtaacgcgtgtttctgttcctttctcttgaatctgtaactataaagacatagaagatccgccaactctgttcggattggtctacttctacagccgtcattcgctcttctgtctcaatcgtccttcgttttctttgctttctttttaatagaacgaacagcgtcacatcgtcggttttcgtttccgtcccccattttttctttcgatcttgtcgtttatagttcgttttctgacgatgaatggccggccaatgacaatagtaaaaaaagaacagaagagagaaatctcggttattgtacaagaagagatcgccaactcttttttttttctctttctattattgactataaaatactgataagagagtgtactggatggggaagcaacgggaggtgagaaaggaaagagagaaagaaaaaaaaggagaaggagacagaagaaattccatccaatccaaggaatatagggccatctgacacggaaagatcctatccgccgttgacaatcattggcaggttcaccaataggaaacgaaccgtctggcgaaccacaatacaccggtcacccggattcgttgtcttgttgtatcttggagtagataaataaataaacagccttcttggcgtggagagaagaaagcgaggaagccgggtatcacatctgctattggaaagagacatacgttcttccaccgatgagtgctgattcgttgaaaaccagcaaattcacatggagtaattcaactctcctgccgcctcttcactttccagcaagggtttctccggcaagaactccggttgttgaaatgcctgatgtaaatttccgtaccgtccacatcctgtcatcttgtttgaatcggtcaatcagagaaaaggaggaacaacaaaccatgatcctcactcttcactgaaatgagagaacaagagctgatagcatattagtctcgacccgactttcttctcttgatctgctcatacttgttgaagctacgatctcctctagtctgttggttgagtctcatcgaatcgtctcgttaccattacactcaagcatgaggatctcatacagacatgctacattatgatcacacacagaaagagaaaagaaaaaacaacgaatcatcgatacacacgtacgtttacgcacaacttacatacgtcttttcaccgtctgtcgtctgtaggcctgtaagaatctccgcgcgatctcccatagtttcctctgtctctgtctctgtttctttctctgtctctgtctctagacctgcttctactcctgctccgatccctgttccgccctacccatggaccatctcttttcggcgctcgataatccctcgaatccctcgaatccctatcccaagagggtcttgaatctcttaaatctctcgggttcctctccagattcctatctctttgatctcttctactactcttgaagttttcctctcttcttcggtcggccgcggtccaaccaggtcgagagtcatgtccgttggtcgacctaccaactgtgggtctgacggtcgatccagaaggaccggtcggcacattcgcgttcagagacgggtgtgaaggaccggctcgtccggcaggacccgtcggtgggatccgaggacccgtcggcggtcgattggatgcgtttgatctgcggtcgtcgaacgaacccggtccgactgggcgcacggccgatgaaggtcggaacgcagaagggccaccacccccggcgggaggtcggaaaccgatattcggtatccctcctgttggacgtctattccccaccaagctgacatcccctgcgctcttgtactcaaacacccagtgatccgttccttgctgattcaccgacgactctttccggataatcaaattcagctttttccttcctcctcgccaggaagcctcttcctggtcgaccaatgatgggatcacacccgtagatagatattccaccttgagagccggtggatcgattgcttctggtggaaatccctcgagcgattgtaaaccttcgtaagccctcttggccgaagctgcgtccatataagaaacgaacgcgtgggactttacagggctcaaccaccaaccaccgtcgctttcgtcgtcaccgccgctgtagccggcatgatgatcgataggtccgaacgggtccagtagacttcggagcgcttcatcaggaagcggccgtcggagattagttatataaagtgaacgtgtcggtggatgaccaccttcgatgaagttcgagggttgctcggcggacggatcaatctcttgaggttgaattacttggacagcggcagtagtgacggcgatggatgtatcaggcgaatctggtcgggctcgtttgttcacgctttcgatctcttcctcttcctcttcggtatcaaggcttcgcttcttgttttcggcctcggcttcggcctttggctcaactttgctctcttcctctgcctttggttctgatccgacctcattcaaagcaattcctgcgttagatgcaccttccgccccgtttgatccagcacccaactcttcagcttctttgacagccgcttcctgttctcccgtcaaaggaacaggaatctcatctggattaggagctaccgggatatccggctgctcgtccgcaggctgctcgacagatgcttccgccagtggttcacaaccaggaacaacctcggcaggaggagggatggatagtgtagacacaggagcaatcttgccgttcacgtctagttcgagttcgaatccagtcgagggcgttggttccccgccgacgacggactcgtccacgatcggcgttgacgctgaatggctctgaagaagagcgacgagctattcatccggatagatacgtgtccgggagaaaataaaaaaagatgataagaccaagaacacgactgattgagagtacgcgagatggctgggaatacttgcatctgctttttttgatgactttgagtagctcactccggccttgtcgagttccgctttgagctctgaaagaaagcaacatatcaatcagtaacataaataactctccacaccaagccaatctgatcgacaaaaagaaagactgacctgtaactttcaaagagggtatatcaagcatgatagatggtcgttgattgagatgttgatccgatgtgtatttccctgttttccatctcttgcacgcgccgaccaaaatactcagccgattttttcccctcctttctctccttctgctcctcctgtcacaccacacaacaccacatcgactttgcttctatcttctatctgtcactccagacaacacgcatacacataccctgtatatacctgatatcttgaaccttctcctctggcaaacgttgcttgcttgctttctgggaaatctgatccctaggtagtctttcccttccttcatcaatagcccgcgtatcatcgccctttcagttcagctaagctgtttgtttatcatggctgaatccaagcggacaggtacgtgatcttcttcttttgttcttcttgtcattctctccatctgtcttgtcttggtgaagtcattcaaggcagtcggctcaccttatcatgtctctctcagcctcgaattcgtctccaaaaccatcgaatggtgcatcagccgcttccctcatcacgcaaccttccttggacgtgctgacgatcccaaggagtccgtccaatctgtccagcctgggctctctaccagccatgacggtcacaggtgttctcgagtccaatggaggagattacagccgtgctttagaagccgtcgtcagagacagaaatcattctgtggaagagaacggtgagtctggagagggtctgttgtcatgttctggcacaatcaatcgcttctgctcgggctgacaggttttatcgtgtgttcttctccttccctcgttctctccgctcttctttctctgctattccaattagccggtctatggaaaatcattcaaaaccttcagctcaaagcagacgcctcgaggaacacagagagtcgacttcgcggcgaacgagaccgggcgttgatagcgtgtagattgaatagagcagtctccccgcctgatcagggaggatacatgccgtcagcctcctacctaccaaactcgtattcatcactcggtctgggcggagattcgaatccgtctctggctggacccatgtccggccttggcgttggtgggaatgcttccggtagccttcctcccagaagctcgtcgacttctgccggcctgacgcttggccaacaacagcaacagcaactttcgttaggcaagcgtcaatggagtgaggagatcatccggagcacccgtgggaatagctctcgggacaggatggagagcaactcatcaattatcagtaccgacacttttgccagcataaacacaaatattagtaacctgtctcaatcgaccatcggtggtatcctgaccgacgaacaatggactggtggagctagattggctagagattggggtgatcttgacgtcggggcgatcagcagtccaaaattgcaggcagattcgacaggccgagcagacaccggtcgactggcacctataccctcgtcaaccgagcaaccgtcctcctctgcttttaacaactctagcttacacgacgatcaatcctcctcttcctcctcttcttctcccgctcccccactcatcactccaacaactcctcaaacttcttctggccaacactcgctctcgtctccaatcatactttcgaaaggtaggccaatcgaacagttgtctttgcccggaaatcccgaacaacagtctgagggttcctctcagagggaccatgtaggaagaagcctgctcgattctgagagacccgattcaagcaagcctaactcattgggcgtaccattagcttctctgcccgaaggatccaggcctgacagtctttccactcaagcacctacctacgtgctatccgtgtcttcgcccgaaaacgatcgcagccaaagatctcgctcatattctgcttctagtaattccgctgttcaacccgcccaggatccctcgaactttctcgcgtctcccctattgcctccaatgacctatcagacgacatttgatcaggaaaagaacggaagtctggaggaatcgttgatggactcagaagcatttccactgggtccggaaaaggagcttcagaggcagcaacacctggcgttcagagaacatatctctccaaactctcttacagaccatgatctggcaagaaagtttcacctggaagaaatccgactagcccaacaccactatcgtggctcgtccgggcccctcgcagggaactatacctcctccacaaacgatcccaatctccatagactaccttcctactcgtcaagttcatcgttggccaatcataccccgcgccagatctctcctcggcaatttcagtcctcatcttcaacacacccgtcttcttcgactcctcaaatccggccgccgccttcgcctttttcttcaaactcatcgttcatccgatctggtagtacacccgttggattctcaacgtctgttcctatgtacttccagcaagagtcggaagaaaccatttcttcggatccaaaccatgatcaagctctcagctcctcgccttcgggtttccaggtcaggctgagttttccaatgttgccgtatacaaagatcatgattccctcctgcggagtgatgacgaatgaatatgggaaggacgtcgttcgattcagaattaccatttcggtttctcttccctcaccatcatcatcgtctttgacatcgtccattgctgagaaaacgtcatcatcagggttaagccaaccaaaagtctggaaggtcgacaagttgttctccgactttctggctctcgataatagtttaagaaagaggactggacggaaagagacgaaagctctagggatcccatcgttgcctgaggccaaagcctggagagaattttcgatgagtaaggtcgatcaaagaaaggtaagcaagtcttcgtttgtggcatgtgtacaatgtctatcattttgctgaaaaagattgttcctccaatcatgtttaatttcaaaccataaattgaagggtttgttggaggcctatctgatttccgtcttgcaagcaagaatgtcggacaaagaggacttttgctacttcctcagtactgacgtgatccctctcgagaaggattcgatcccggtcaccaaagaaggatatctcacacgtcgaggtcagagattaggagggatgaagagacggtatttcatattaggcgcgctcggtcgtccagtaatggactactttgagaccgtaagtacatatatccttgttggctcgttatcatggggtagaactgatccaaacgaaatccatggttgttcgatacgcgtgtgtctgtgtgtgtttggctatctttatatgtcgactcggatttgagtagaagggaggcccttacgtcggctcgatacccatagcaggcgctcagatcggtcgcagtaaagaaagcaccgaaggaaacgacccacatcaacgtcacgcgttcttgatcatcgagagctcgatctctggctcaaaaggaacgcgacatgttctctgtgcagagaccgatgaggatcgagacgaagtgagtgatcactgttctcaagctacggagaaagatcaggcgaaaagcagacgtctctgatcatttgtaccttttcttttcatactatgatctgcatcaccatcagtgggtcaaaatgctcgtccggttcactacaggagacttccctcgagcgaccaattcaactcctcaggaccaacaggcagctgagaagtcgcctacaatagggattcctcggtcttcaacgaataacagtctgaagggtgttcaacgcaagccttcggttcgaaagctctcaaaggatgatatcatcgttggtccagccaagcctctctcccaggtcaaccagagcacactgtccagaacaaacttgacgactggtccgcctgcgtcaacagtagcagcagcggctgagataccattggaagctcctcctcgaatgtttgactccggtcgaagaggtagcacgtcgtctgtccgaagcgacgctggtctcttgtcggtcatcacagagaggccgtttgggctctctccaaacggcaatggtccatttgcaagtaattcaggcgcccaacctgattcgaggtctcagcgacaaagcaacttgcctccaccaagagtggtttctagattaccgcctccttctcggtcgcctcctatcactcaaggaagccttcaagaagagaaggactcatttcggtcgaggcacaagatctcaggacctcagggaggagcgcccattccggccggcttcaagtttggagccaaagatgacttgccggatagagagcgaaagtcaaagtccggaagatggggctttggctttggaaagattagtacgttctctctcttccttatctttctctaccatgtatattcagttgattctatttattcggcgctttgaaaaggcgggtcatcttctcatagcaatttggtggctgctcgacctgtttttgcggtcccgttggcagaatcagttctggttgctgaaatagcgggccttcccgcggttgtctttcgatggtccgtcccttagctatctgttacagtataagactctttcgtgagaatggctttgctgagattagtgtgtttgacatcttcttggcctttagtatcaagtacctcgaagcaaagaacgcagagctagaggaagggatctatcgtctcagcggatctaccgctttgatcaaaagtctacgagagcggttcaatactggttcgtctttgaaagcattgatcaaaacgagtctaatagcagttcttgaccagaattatatttttcgcttggcgctgcttcagatggagactttgatctgcttcagcacggtgaaccggtagacccacatgccatcgcaggtcttctcaaggtgtgtttatcttcctttcgagttgctcatcaacatgagaccagactgatcataccctttctcaaatcgcagctcttccttcgcgagcttactactagtctgttgactcgagagcttcacatgcagtttctagctgtaatcggttcgtcacttctagatgctcctcgaagatataatgtctcaagagctgaccgaaaacgaacacacgtatagatttggccgagtcaaaagataggatccgagagcttcggcaccttgtggggcagcttcctgtccataactactgcctcttgagagcattgactgctcatctaatcttgatcgtggagaatgctgctgtgaacaagatgactctgcgaaacgtgagtcattagcttgccccctctattgagttcgctccacttatcttggacaactttgtataggtcgggattgttttctcgccaactctaggtattcctgctggagtgttctctgaactggtttctcagtgggtctaatttgtcaagtctgctggaatctgatttggtatatgtgggctgatatgtcacttgcgtttttttccaatctccagattccaagatatcttcgaagaccccccagaagctgtctctggaaccaccgctagcccggaagctttatccatagacccggtagatcaagaaccaactcaatcatctaggctcggtatggatcctgatcaggacaaaacaaagagaaactcagctagctttttgtcgtcctctggtgcagaacagatgttggggctctacggaaggaaactgaccagtaagttctgtctttttgaggacacatctttggccctgaaactgattgtttttccattcttgtacttgtaatcagacagtgatcagctagaagaagagagtagcaacgatggaacgaccgaggatgaagatgtctcaggtgaattcaacccgtctgtggtagatatggatagcactatccgatcccctgtatatcaacctccccctgctatcccagagcaattcaccaatcctgcttcagcaagcgatcggcgttgttcgttccattcccctctttattcttctctcgctccttgttgttgaacaaattcgctgacgtgaataccgatatatgcgttcaatagaacaatccatctgtctttctctagacggctcaaactgaccgactaattgcattatatagttttaatcggttcgtcctttcgttccatgtttacgtcggtctttgagttggcgctaaaaaaaaacagcttgactgtgctcacctattttgtacactttctcttatttaggtcaacttcatatacgtccttatacatattctcgccatcgccatatattctcttctgctttaaatcgctgtttattccttctcatgcatctctaccggatttttttctcttcctttcggtattctctttgactaaatgactggatatgggctttcttcgtcttttcttcttctcttcctgttttcctattcgttttcttctggcttcttaaaagcttcttgcacgttcctcatcgacggccgatttggcccgccgttgtctttcttattctccctgtaaaaagattctcccccttttacccttcgttcagatactcaaacgaatctttctatctttccttatctctttcaaaagctctcttgagagtttgtatacccaccccttgacctcaattcttagtatttctctggatgagtttttctctattctctcattcttcttacgcccatcgacactttgctcactgggctattaccgattagaaaaatcttcgttctgggaagtatctgcagagaaacacatcttcgaccaaagatcaaagttggaggctcttctcaacttccttctctaaacgctttccagaaatcggattgatgcaacttggctaggttcttagttttacctttaattctctttctctttctatcgttccgacggtacggaatattgaatatgagtgcccttgaaccaatgaggagagttgaatggtcatttttatttatttataatcggcctttctccacgaacaggacgtgtcggttgactatgatgaaagacatggttgaattccaggagtttcacgcgtattgacgagacacgagcatagttagagacaagaagatgtaatgattagtcaaatgtttgatagtcaagatgcagatcagagagaaataggcgaatatgatcttttatcagagaaggatgcttctcctactgtcatgaacagctctcacgcctttctcattatcatgatttggccggctatacccccgcccacagctgttcgttcgacattagagttttgaccaaccagacccagagccaatccaaggccagcccaaagaggagggaaaataaaaggaggagggacaaagatacgaaacaacgaaaaaaactcaccagctttatcatacttcatcatcgccatcttcggtgacaacctgggtctcgcaactccgtaaaacgtacccgtcaacgctgtgctgacaagcttgacaaggatcgttctaatcatttcagagcaccattgaggaagagtttattcgaacgatgtagtgattcagagtaaagttcaaacagaacgatgacaatgagaaaggaaaggaagaggaggaattgaataaaaagtcgatccgatccgaaccaaggacaggtaaggagtgagaggtagaaaggaggttcaaaagatcagaaacaagctgctcgatatctttcaaacctcacaattatgagattgctggtagcagccagagagtgatatacgaacctggcttttttgctgctactccttccggccatgatgtgaatgagtatgttgagtgttggtgggtagacggaagagggagcgtgaaggcgttcagggccgaaatggggcgattggtcacgtgtcaattctggctgttcaatcaactgattgatcgacagatagcccccactcgtcactctgcaaacttcctccatggatgtcacttcaaagaaatgtttctccagggtttctgccaaacgctatatagccataagatattcataagaaatataagaaatacatctaacaaggttcgtgatagttcgaatcagataaacgatgatgtggaaggagtagattgcgaggaaatgtgattgtttgaattcgagagacagaggtaggtctaatgggatcaagcagagatgatcttgcttgctctttctaccagacattacttctcacaacttttggttcgagccttctttatctgcagcgctcatcttttgttcaagtttcgataaagaggtgtcgacaagcattgacggacttgtttcgtcaacccatggtgactccaataaatcttttccggcgaacgtatttatctggtattccatcagtttctgaacgggatcaaaggatgatgctcgggatgattccaattgattagatatatggataaccggcgcagaggatcgagtggagcgagaggaaaccccagtaggcgggggacctgcataggaacctgttttaaacgtacaatggccatgaaccttcattgagtaccgtcacttgttcggatatagagataaccaaagacacaacaagaacattcggggcgcaccggagtgtcttggagaccagcctggcgtattgggagtctcaaaagattcatcctgactaaaagaggactcagcggtacccggtcgagcaggtgagatcgatgagagagacaggggtaagttagttgggatagaatccagggaagaaaagcggaagtcatcgaacatcccaaaagagggttggaacgagtcgtgtaggggagagacctgattgaatgctgagattgggcaaggttcctaaaatttccgagatacagtgagcagatacacgtcaagaaagggtagatagatatgtttggatgtacaagttcatcgacagttgcgtccgtagcagaagccgcagaatctctcctccaggctctgtaccccaactacatatggtaaggtatcaacagcaactcactatcagcttgtagaccgaccgactatcgaccacattgacacaaacctcaaccgttcttgaaagatagaaacaagtacaaaccatagcactttttggtccagatccactctccacggcttctcccaaaccgtcgaagatgtgagatccatctgagtcatcctcttcaggcacgttgtccaaaaccgaaatttgctatcgaagtcaggaaaactgtattttagtatcgcgtacacgaagtctgactgaacgaagacaagaaatgagtagacagacggtataggaaactcttcgaccggtctggttggcaaaggtcaagcttggccgacaggatcctgaatgatcaccgtcttttccgggagtagcaagcgggtttgagtaccttgagggttcctctgtgagagctgactcgagcccaacatcctcggtggttttttcggttcggtctaaagtactggcgaaagcggccatattagtgatagggatgatgttactcgagattatgagttcagtaagatgaataagagtctttctcgaatgttgaagttcgaataagaatggtagacagaaagaacaaacacttcattgaaacattgttgtcgaccaagaagagaagagaggggaaaaaggaactgaccaggcaagagatgtgacgaataaggaccctgagagtgcgacaaccaggtcgagatcaagatggtcaagatcaagacggtcgggatcgaggaagagaggtccagcgcgagagaggataggcgctctagagtaagtcgagcggttcctttgttgttctgttcaggtgggtttgatacgtcaccctgtgaatacagatcagaagggtcacatcaatccaggaacatgctctacgctgatcagtgaaaacatttctaggtgatgcgtaagccttcgtcatcacatgtttatcctgtgcatttagtcaggagtgtcagtcaacagacatgcgcttatggaggttctatccaacgcttggagatagacgcggtcagtggtgaactcgtcggtgagtgcgatgaatgctgtagtccggagtgatgctcggggaaccaaagaaatccctggcagaaaccacaagtgcgagtatcgtttttttacgtattgttatccagaaattggctctagcctgataagataaccacgattatcaatgatcccgaatctgaagtcggtttgacggcccaattagataaaaattgacaaaaagccaagaacagaagtaatactacaaaaacaacaaattcggaaacaaacggatggacgagggaagggctgccgcagcgtcggaatgggaataaagtaaagaagcaacagagttgtgtccaacgcggctccggatccgaggaaaagatgggggagaaaacagaattgaacagattgatcattcatttcttcttcacaactatcccacctaacaatcctccgatcttcttcttcttggccactcctcctacgcctgcgccaaatccaaagccaccccctacgcccgtgcccttccgtgcaaccccagcttcgaccgcactaggacccggccgaccagccaaacccttcttctccagcagactggccaacgatggtgagtcatcctcggtcatagaaggatcgtattttcgctttactgtgatcgtcgattgtattggtttggattcttcgccgtcggctttctccggaacatcttcatcagacgatccatattctccgccaagagctacaggcttagtggagctcgatgggatctgcgcaaacaccgaccggaccagcttttcgtcctcctcttcctctgccagtcggaccaagtcttccgccgttagtgcccccttggatgtcgaaggatgaggctcggatagcgagatgccgactcgttcgtttcgagcgttccgcgatctttgattaacagtcgaaaacataaatatgcgcgcatctgatcagcctatattgtaacaccgtggtactccgagatcatagcccatccgacagaaagacattcgggagacggacagaggcagttgaaaagacaaagaagaacttacctaatatcctgcaatgcatccagaatgtccatctcccgcttcgcgctctcggtcgaactttccaacattttcatcgcgtcttccctctctttatccgccgcagactcttcctcatcgtcctcccctgcgtcaggcatataggtcgccttgttgtgttcatctgcatcatctcgccaggactgggagccacgagagtggacaaacacgtgttgaaatacaaacacagacgtattagctatgacagtcggtagagcatgaaaggcgcacagaacgagcagaagacgaagcaaagcatacctcgaagtttcgagacgctccatgttcggctagataatccgcattctgaggatctctgaagaattataaacatgaagaaagatcagtctctccattttgtgcagatcttgtctcggcagagagaaaagaaggaagtttgacatgatcaatcacgcgaactcacgtcttgaaggctgcatacacatgaacgcgtggattaagtgaattgtcagtatttggctcagtaccgaacaaagacacataagtcaagaaagaatgatacttactaatttctgacgaacaaagcgtgcatttgatgtagaatcgaaagatctataagcaagcaaggaaggaagcgaatgaacgaacgagtagaaagacacggtcagtggacgattcttgtctagctatgataccgtctccacgcaagccataagaagtcaaagtggctcagacagaccttgataccgtggtaatcttcaccaaggacagtttccttcctggcgttgaacttcttgcccttgtagatatattcgccacatgagttgcacctcatcgagaacggggccatcagacgaacaacttgctggtcattcttgtcctttagctttcgccgaggaattctagagattgccaaagagtcacgaaacaaaaagaatgagagactggttccatatcaagacagacaggagagataactgagcaacatactttgccgggtcgaaatctggagggaagtactagataaagagaaagaacgagtggaacaatcaggtccatacactcgaatctcagaaagatgaccgaggcgaagaacaaggaaggaggtacttactttgttgaggacctttcgctcagacatgatgaagcgactgtatggatctgtctaggtgcgggtagagggatgtgaaagagggatgtgcgtagatacgcaaagagaccagcgtccaagtcgaatgaggaagagaggcaaactacgagtgagagaagatattgtcgacctggggtagaaaggataacaccaggcggaacggtctagggttatgaaagcccagacggtcacccagatggacccccaacggccccaaacagcacccccgataggtcacggctactgcgcatcagtttgacccagatgacaccctgacaagccccagatgtcacccagatgaccccaaaagaccaatgatgtcaccgctctacggaatgtctgttctcgctgatgacgccgtttgattttgttccaggtaaaaacgtacaagaacgaatcgtttttccacattcttcctttcttcttttctctccttctctatcttgtatccatctcaatcttacatccgtctctatctctatctgtattgctgtattccatctccatctccatcctaaacacacatatatattaaattcatattcatcaacatgtccttcgctcgagtcgccctccgaactgctgccgttcccacttcggccaggcagttcgctaccatctcttcccgaccggttcgtttcgttttcttgctctttctgttcccattcgtcttctccttttcctcaatgacgaaatcttaaccataccaaactctcttttcgatatcttagtccgctttccgaactattccccgagcggttccctcatcggtgtcgcagcgagtagcctttgctcctaagcgatttgcttcaaccggggctgcctctcctgtccacagtcacactcctgtaagagcctcttcttctctactcgtttcttgtggcttcaagttgattcgctaacatcatatatctatcattcggaatctttagatgtggatcgttttgggtgtccttgttgccggaggatctgccttgtttgtctacgttaagcccatcaggttggccaaagttcccttctttttctcccatctcgcgtctttcagcctagcttattgtcttccaacgtactcttaattatatcagagagcttgctgccaaggcccacactatgattgacaccaccaaacagggtgccgaccaggcctccagcttgtcataccaggccgcttccttagccggactcggacctgcgctcgccatctcccagaccgtctacaagaagatccaggagcacggtggactttctgaattcttgaacggtatctcaaacgatcttaaagagcaggatattggaggtgccctcgctaagctcaaaaaggttggaggaaaggaggtcgagcctttcgttgatgctgctgagaacgctctgaaggaagccaagggtatgttgctctcctatgctttcatatagacaaggctacccactgaagcatgtctgtatcctcctaccgtttataggcaagatcggagacgttgactggaagtctttccttgagaaggctcaggatatggtcggcgacgagtggaagggcatcatcaaggttggttgaacgtttcttgtcatttttctatattattcgagtatgtggcctgacttttttcttttcgacctatgtagtacgtctcccagtctatccctgccactggtcctttggccatcgctttcgctaccggcgatttctcctctatcaccgacaagatcaaggagcagggtggtgaccaattgaaggagcttgaggctacggcccagaagctttacaagaaggcccaggagtacaaggatggaaagggcggtcttgaggagctgttccagaagcttcaggatggttcgttccattcttttcaaccttgttcatctgactatgcatcttattttgaaaatggtattcacgatttgttccgatttaatctctacagctgataaggaggatctcgagaaggtattgacccaggccaaggctgttgccaagaaggctggcatccctgccgataccatcgaatcttggttggccgacaagtctggcaaggtcgataccgagaacctggtaaggcatctaattttcagcgatgtctggtacatgatctcaaacttactgactcttatttgactcttcaaatctctgtctatacagattaagcaggccaagtcctacgctgagtctggagctgagaagatctctgacaaggttgacaccgagaaggtcgtccagaccgtccaggtcgtttctcccgcgttcgcctcgcttattgcccttgccctctccagggctggagtcaagcttggatcctccggacagaaggctgccaaggagggagaggatcagttcagctccagcaagaagcagttggaggccgtcgtcagcggattgaagagtgagcatcttgtctattcacgcac

SEQ ID NO: 181 - DNA, 9849 bp, Xanthophyllomyces dendrorhous
tcttgtctattcacgcacaacaaagaatcaagctgatggtcgctttaatcaaattcaacagccgcctccgggtccctctctggcgatgttcagaagcgagtctctgctctccaggctgatcttcagaagaccctcgataaggctccctctgcctctgccaccgccgacgccgtgaaggagtctgctaagtctggggagaagacctctgatgccgagtccaaacagaaggagtgggagtccgctctcaagaaggctaaggctgatttcaagaagcagttggacggcttggttggcgaccttgagaaggctggaggaaaggacgagaatgtcaaaaaggctttagagctcgccaagagctactttgcctaatgaggaagagctagacataaaaaaggaagacctttaccatcgtcttttcttacgtacgactcaaccttttactttactgtagtgtacgattaagctgtattttgtagtggatatcattttatctttatatctctttctggtgcccgtcgagctgggccaaatccgttagattgtatcctttgttgatacatctcaaaaaaccatcgatacatgtggccttctgatttccgaaatgtgtctcagaccgtctgttgaagagagcaacagagacgattaagaacgttagcgaaaagaaggttgcttcattatgatgatgacgcaagcggtctcataaacgcgtcgtgatattatacacttgcacacacatacatcagacgatcattctttcctgagacacttatcaatccgatccagcctcaaatctagtccctatactgtatcagaccacgacggggtcttctatcaaggtttatgatccaggatgcctcgcaacttgccttttctcacgtccatcattagagagattgctcctccagaaacggacgatctattaattgtcgctaagggactcggactgagaaagattgtttgtaccctgttaaaaatatacgacggagagaagaacttggtccttcttgtttgtctcctctttctctgctttcatgcatcgtgacttacctggaggaaagagagaggataactcatgttcattctcattgggatatatgatggcaccgatcgtgaatattgggttgagtcgggtcagattaatgctagtccagacgaagagaatggcatcggagagcttttagggatcatgggtgttcggaagcctgggctgagaaaaatcactcatgagatgccatcaaaagaacggtctgtcttctccttcatttttgcaattggatctgctggcagctcttaaatgtgtcttggatttggccgataacccaattcagaaacgaattatacctacagggaggaatcttttcaatcacctctagaatcttgatcgtcgacttgttgacaaaaaatgttccgacagagatgatcactggtctgatggttcttcatgctgaaaagtttgtgcttccgtcttcattgagtacttgaagtgtagtatcacaatgcctaacatccgggtctcttctcatcagggtgaatcaaacgagtcaggaggcgtttattgtccgactctatagacaatctaatcatgtatgtctcttgggcagacactcctttcgattgagacatcaaactttcacctagatgctcaccttttacattctatcttttcgatccaacagcaagggttcctcaaggctttctcggatgaaccggaacatttcaacgcgactatgactccgcttcagacgtgtatgaagatgctttcccttcgaagggtcactctttggccaaggtaagctatacaatcaagaagaagagagaaggaacagagcgtatgtgcttgataaacaagaataacatagactgatcaaagccactctccagatttcacgcagaagttcacacgtcactaggccagagaaaagcagacgtcattgaactctaccaacccttaacgaaaggaatgcaagagattcaaggcgccatcgtcgagtgtatggatgctactctggcggaatttcgaaaatctgcatctggggttcgtcttctactttcgatcattgttttgattgcgaaacaattcgatcacggtgtctcatgttcatttctggctacttttcttccaatacaggtggatatggacgaaatgacggtagataatgctttgttcagaaatttcgacaagattgtcagaggtcaactggatcctgtttggcatcgagtgggtccgagaaccaagcgtctcgtttcggatctcactactctccggttattactcaagtgagttttgttcgctggattctttctttaaagattatgaactgttaccaaccaaccaacccttatccatcctcaatgttcttcccatagttatcttcttacatacgattccatctcattcaattcccacctagaaaccatcttgacgtcagcaacgatcgccaatgccgcgccttctgtcgctctaggaatgaaatctaaagcaaacaatcaatctccatggctttacctcgatgcagccaacacgttgtttcacgtcgccaagcgaagagcttacattccggctcctcctaagaagaagagagcgccatcagccatcttggctggaggtcagagagaagcagatgagttccaggatgcagaggaagctctaagagatattgaaagacaggagagagaagacagagaggcagccgaacagacgggtggtgagggaggggtctggccacctggggttcaaccgatattggaggaactgcctaaatggggacttttagctggcgtgttggaagagatcgaggaggagatcgcagccttaaaaaccacaggtcaaggtgaagggcactcctgatagttcgtcctgctactcatctgaatctggctgacgtatcttttcatttactgcatatactgtttcctattacaggccaacctggaacgaacaccatcctcatcatggcttcttcagatagaacatgctctcaactccgagaatatctgacctctagagaaccaaccccacctgcgccgactaattccagtgggcctcaacctacatcgaacgttgccggtagagagatgatggaacgaatgttacgaacttatttctggtggaaaggtggtctaggggatatgagccgcaatctacgagggaccaatctggctacaatcaagtcatccaacaatgaagcggaccggttgagcgcaggcgcttcgagagaggacgtaggaagagggagaggttctattccaggtcagcctgcgttcaagaggagaagagtccgagcgggaagtgtagctgccagtgtgagtgggagaagtaagaacaaaggggatgatggaaaggtcaaagaagaagaggatgagagcacagagctcttagatgtcgaaaacatggagattgccgatttgtgagtcagaaattctacccagtcctgctctatacatatattctcaaacagaccaaccctctcgcttttctcagcctccacatgtcttctcagcagtttcaagacgaaggctttcgtgatggcactccagcacctccatcctcctcttttgctagacaaaggtctatgacccctgctcctgccttccaccgacagccatctatgactccttcgagagaaccatctgtccctcctagtcaagagagatcaatggctccccttgaaacgactcaccgaccgaccaaagtaccattgttccgtgacccttccgagggtccttcagattgggaaggtgaaggaaatatcgaatcgttagacatttattctagaccctttccagaatacccgtacgagtcatcggacgcccctctacgatcaatcactccaggaataaatcgacagtcttccccctcgcaaacccttcttcggccatcggctcaggataccatgactgaagtttttgacccagaggctttcgatgagtatttcggactcctccagcctgaagacttaattgtagttcggccctacaagggggacgatgatgatcaggtgttggaggaacttcgaccgagatttgtggtcatgtatgatcctgatcccggattcattcgaaggattgaggttcgttcaacgtctcatctggtcgaagcaacacatgatacagctatggcggtgtttacagatctgctgatttgtgatttcaatcgatttgaacaggtctatcgaagctcaaatcctggcttggcggtcagagtctacttcatgatgtatgtagactctgtagaggaacagagatatctcagtggtttgcgaaaggaaaaggaggctttccaacggctgatccgagagaaaggggtgagtttcctcctgcctatttatgatctcacatcatcgctcatccctggcattttttgtcgcatcttagtcgatgcttcttccaataacgggagatcctcgaggagcacctacagaatcgacatccaacgtcgaaacgcttgccaaaatgatcagtactcgaatggctggaggagcatctgctgctgaagctgaacctgcgactgtaagactttctttttgcttgtccattcttttcttacttaaagacctttcaccaaccaagcgcgttaataactttcccatgtgcgtgtacacaggtcatagtggatatgcgagagtttagatcaacacttcccaatatgttgcatgaagccggcatgctcattgtgcccgtcacgctctacgtaggagattacatcctgaatccagagatgtgtgtagagagaaagagtcttccagatctgattcagagtcttgcctctggtcgattgtgagtccctgtcctctcttctttttgacgatctctatgatttgcatatctcaaactggcaatctttgggggttgttgatgttgatgaacaggtacacacaatgtgagatgatgagcgtccattacaagatccccatcttgttaatagagttcgaagagaaaaaatcgttctctcttcaggtacgtctcatgccaacatctcaatcgttctcccactaacatcacgctctcttttctattgcattcttctgcttgatcaacaagtcgattgcggattcgaaacgacctacgactttcaagaaggacccgaagactgagtcggtagtgaccaggataaacgaccatgagattcaatcgaaactcgttctgctgaccctaacattccctcgactccgagtgatctggtcgtcatctccgatcacgacggctgatatattcaaggacctcaagatgaactttgcagagccggacgcaaagacggcaattttagttggcgcacctgatggagaggaggatgatggcggtggcaacgtgggggccttggacctcttgagaaacctaccaggtgttgtgagtgatgttacttccctttctttccttctcatcatcctcgtgctattggatccgtttataagagaaatacgagacttaacaaaactcaacttcttcttctccctatgcacctgtgaatccaaacagacgggaaaaaactttagacaactgattaataaggtagcttccattgagcatctgtgcgagatgtcattactcgaactagaatacgtatgttcattctttcatttactcacctcttgtaaatcgacaacgagctcatcattgtagccctccttccatcgttctgggttgttgcacttgattcagataattgggtcgacaaatgctagaacgttacataagttcttacagtacgtaacccgaattcgttctattgactgactaagaatcaatctctagaaaatggcgctcatcctgtcgattctcatgcttggtttcgttgtgcttgattcgaaaagccgagacgttcgaactcgatgaggtgctcaagtgtatattctgtatttatcataatgatcatgcaatcatcctatttgtgtaagagaatatagagaaggagataaagaagaaaatcgggatatttctatcttgatcttgaggagatctacaagatatcaaagcaagagcggtcccctctgtttcttacctgtaaggtaagaaacgaggaaagagattgacactcgttcatttacattttttcgtgctccaagaacctagtgagcatctctaggctttccgccggtttgtcatacggaaccatatggcctgctcctttgatcgagacgtatgttaacccaccgtacgttctccattcacctactgatcgatcctcgtcgatcgagtcggattgattcatataccatggcacgatcggctgctcattgaacccaacggaatgcgtccattctaaccgagacgtccattggatctgatggataaagttgcactggaaatcgtatttcccagcgtagatcaaaaactttataccgtgttctaagagggaagcgacatagaaccaggtctttccggtgtgatcgccagattgggcaaaatccattcctactttcgagtcgcatcctgtaaagtttccgacgtggggatctattccgaggaatgatctgtgggccgggttgtctaggtacgagcttatagcatctttaatagggcctataaatttggggtagtagaaacagtctttttcagctggtggacggagaggaacaagagtttatcgagaattaaatgacgaagaggggaagaaccataacagccgctgccaatgcaaggcttactcatatctgggagttaagagaaaagaaccatatcaaaactgctctaccatcggtggcatgtggtaagagatataacaaaaagacatatacgaaccatacgggttcaatccggtggcggcgaacggattcttgatccacttgtagcaaaaagagatggcattctgacaacccaacgggtctgatacgtcctcacagtattctttcatcatctctttgcatctcggcagcgtggcctgcatctgggcgcactcggagacggacaatactggggatagaccggagagagaggtgcatgtctttggttgtgtatgagagcatatgagagaaatggagccggggaggacgaaaggcaggcaggtagacaaggaaagaaccggaagagtatcaatctcatcgagtcttctgaaagaaagagagggaataaggcgcgaaccatgttgtagtgagtcaacgtcaggtcaaatcgatcctggagaaagaaaaattcgtcaatcaaatgtgtaggcaagaacacacattcagagagtttgatgaagaaacagagagagaatctggatagacgtacagtcactccattaccaatgatgacactctgtaagttgatcgggtgtttgagattcttgtttccgtctactaccgccgctccaaagagagggagatacttgatgtgcgagtacgtcgtacaagagagaagacgccgtcaggttcactgcgctcactgagaaacaaacatgatagccggtttgacctacccgtcctccataagattcccctgagagatggaatcttcgacctctgaattctttgaaggtatcgaaaaagatagcgatgaatgcttggacgtcaattgcagcctgctctgtgttggataccacctgaccgtttgatccatacgataagccgactccgatgggcttagaggggaatttcatcatgagcagaagagaggtgagcaagatgtaaaaaccatgtcgcagatcaacagaagaatgtcttacctgatcaagaaggaagacattaagattcgagttccaagcgtacggattgacttccgtcccgttcaagcttgacgagtcgacgattttgcaaggccctgttatgagaatcatgaaggaattgaccatgttctggtttcagcagcaatccgacagaaagatatatatcaagatcccacctagctcttggaacagtccagtctcactaccacatcctgggcctccctgtattgttgtggcaggagatgacgataaaaggaaaccaaagttgatcaattcagtgatctgatgatactaaacatgctatagagcaggtcagagccatcgccggatatggccgaacatacgttgatccacatcagcacatcgtctttttctggatttgatttcgagaggaagaaatagaagaaaaggtttcgaccgtgcgagtcgacgtccagatagccagtgtacgatctagaagaggaagagaaaaaacggttagatgtaagttgagcgataacgtgtctagccgcacgaaagactcgatgtatctttgttgttttgagcacagaaaagactgagcaatcagatagagaaggagaacagcgaccgacttgacgtatggatcacaccaaccggtggtctctttaattctgattctatgatcggcaaatgattcatgagtgaactgtgagccagaagattcgaccataatttgtgagatatttcagtacatgaattggccaaggccaggtggaaagagctatgaggacgaacgaccatgtgtgtttgaccctgaacgtctgtcaatctgaagtcgtcctgagcatcgtgacttgaggatcccggagaataggctgcgttggtgctggagaacaaagcaactagggcgaatgagctagaaagtagcgcacgtagattgaccatgtcaaaggaatggatccagaatgcgaggagacagagagcacgagatcaaggagaaagagaatagagaaacagttggaagcacaaggtgatggagaagtagtagagaatttgtcggacatggccggaaaggtaccatgcacgtgttgtggcaagctgtcacagcttgaatccgataagatgtggcccgaacggaactttataaacatgaaagtctggaacacaaataaagttctgttaccgggtttagagtgaggatggaggacgaggtttcagggtgatggtggcaagtgtagagtaagcggagagagcactggagggagcatggacgagatcacaggataacgcggaggaagtagatagcatgctgtagagagcgagcgcaaaaggagagcagagtggctcaatggagagacatccggtagaatgaaggaagagagagatcagcacgttttatcatcctagtacactcctaactctgcaggatggcttctccgtaccgaccctcttttgggtgtctcactcgataagtgtaggaagacgtcttctcctccttcttgcgctctatcagagagttatatatctaaaccctttctggtacccgagatcgatatccaccctgtttgcttttgtctgatttctgtggtacacacattcattttgcaatatcacccgagcttgaccgaataggaatagagctcttcataaccttcctcttaaccgcttcctctgttgggctggtcgctcgagtttcagttcttttgccaagtcgaatttttctttcgacttaaaacatcagatcttccttccggtcttatcactcaagagagttcccatcgtccgtcctgttcgtacgttatcgacctttcttactggtatcgcttcccattgtttcttctcttccttctcttcttcttctcatccttggagcctctcccacatcttgtctcttcccgatctctagtatagattgcaaggcaatttttctgcccgagatgcttgtcgaccttctgctcatcgcccttctttcgagcatatgtctggccagcccgccagcgacatcagccacgttctcgtccacctctctcatcatcatcaacaatatcctcgactacccaaccggtctggtcggcgcggccagacatggaaggctcagcgagtacctgcccgacgtttgcagaagcccgtgctcaaattataccgactgggaagctgttcgttcattatcttcttgcaacgctttttcgccgatttgtgcgcgaattccgaatatgccttgtctactggaattgaaggcctgacca

SEQ ID NO: 182 - DNA, 12365 bp, Xanthophyllomyces dendrorhous
gaattgaaggcctgaccaggttctctccttactctacctgcgcttgactactcccagtcctgtttagtagatatgtcacataggtatatatccatcattcttttaagcacatcaatctgactgaccgaagccattgggttctaccattcttattgatctcagtgaatgtggcctcaaattttgcacgaggcctatggcgctaagctattatagctgtgtcaattgcatgctctatgtgcgttatcttcagagcgttttcctacctaattcgcacgtgcgacaagatgcgccaaagtatctgacatcgccctccgcctttctcttctatcattccttcattaactcccaaccgcgctcgacataggttaaagacccaacgctattctctcccagacgttatgtttccctcgagacccagtccaacagtaaggtcctcttcttgctgtcgtgctttctcatgtttatacttctttgactcaattctgacgttcacttcctcctcgttgatagttattcaaatgtcctgtaggggctttggacgatcgaccgggccattgatagaattagcgtcctaccttcaaataggaatgaacaccaataatgtcacagatttcaaaccaccggacgtcagagccatcgctgtgaccgtttcctctgctagatccgagtggggatcgaggtcaaggtcgaggctgggcatggtaggtatcgggatcggggtcttgggatggagcttgctctaatctggatatcattctctctatccttcttgtgctctgtcttttggtttcttccttcctgtcctctcctttgtattgctttagatcttgcagaccttttcatcttgtacggtttgatatgtcgtcttctcgtctactatctcctattcttctcagaagaacacatataatacaaatagaactgtatccatattcatatgcttcctctacttacctccatttatcttgatctgaagtctctcctccgaagaaagagttttttttcttttctttttttccagcgttccttccttctctacttctatgttctgtcttctttgcctcttgcatcttggccctgttctgtgtagagttcgttttacgaatgatatggtgtttccttgattttcaagtggcctccacgctattgaatgcccggacagaaggcaacggaagaggaggaaggaaagagaaaaagtcgcctaaattcatttccatagtttctccccttcccatccgaaggggatctttttacacctaatgatacaaaagtttctctctaaagaaggtagaaggaagaacgaaaaatcgagaaaagggaagaagatgaaaaggacgtagggacgatcgaccatgagtctcagctttgaacgaaatcacataacttgagcgatcgacagcccagaggaacccagagtttgagaccaacgtctggattccacaaagagcctcttccttcctcttctggttgatgtcctgttttcaatccattcgagacttgagatacctcgtcgtcacgtccttctgagtactgtatcccaccccaggtcaatcagataagaatcaatcaaagcaggaaaaagaaaagtcagaccatgatcagtatcatagaacacgaagagacattgacgctcagaaacatacatgatgtgaacgacagctccatttccggagagagcatctcggtcaagagagttcaacaggacctgcgagattgtctcaaacagatcttcaggctcctataaaacaggcattcgcaaacatatgatgaacagtctttgtgagtctgccaggcgacaacagagaaacgatcacaacgaggaaaagatgccacagatgacgacatacaagatcaggctcccacagtccttcggccacaccgaagagcttctcggacgcagtcccagagaccacaaagtccttgggcgtggtgatacaaccgatcctgtagattgaccgaggcttggatcagtccaagattggacagtaaggatttttgctgagagtagtgatgtgcatgtacttacaaatcggtacaggcaatgaacggtttagggttcgggttgagcttcgtaggagccggaagtccggcaacgactggctcgatgaagtaaggaccgaatctgattcaaccaaaatcaatttccgtgttagtggaaataacttaagacaaagatagaaggatcaatcgtgtcacaaagactactcaccgcttctcgtacagagtagacgagaccagatgacagaacgtctcgggctggatctctcgctcctctttcattcggtacatgtttactcggaatcgaagggattcatgtctggcggttgaatagaaatcaagttcttagtctacttgtctcggcgcggtgtatgagagggcaaggattggagcatacagcgtgtgaacatccgaggctagaccgggaagaccgacgtaaagtcgatcatgaatggggaacacctaacaaaaatccaagtcaccgatacatcaagccggtcagtcctaacatctctgtacaatgagggttgaaaagaaaagcagaggacagaccttttcaaagttcatagcgacaagcatggcctggtttcctagccttagatctgaggcgatggccacacagtccttgccgaccatagcgatgaccgaacctgatgcgtcgacccggaagaaaagatcatcaccgatgagtacactgttatgcaattcagacaaacagaagaaccttccactcacctccgttgatttgcattgcagacatgttaggcgaatattctctatgagtgtgatgataggaatgagtgtagacagagtgaaagaaaagatgaggtagatggcagaacaaaactcacggtctgcatgtcgcgctggaataaatcacagttatttgaatacttacgtaaaccaacgtgggatacctgaataccttctccaccttccctccagacacatagataacactgatcgacacctttaaccgagtccgtctcgagaaactcgtgctgatcgataaatgcctaaaacatgaatcatcatcgtcaacatcaacatcaacatcaacaacgtatgatgcgctgatggtcggttgaacgtgtctttgagagaaaacgaccagccggtcttttgcatcgtatcaatcctttcgcctccattctgtttacccttccaccccaaagagatagcggggagtattggaaaaaaaagcagagaggttgactcggctgccttagcctaggaagaaaccgtcatcaggcggacagagccgagttataacgtttttctttataaaccctgttttttttttctccacaggatgtccttcctgtttcttctttctaccttcaacctagtcaaaggaaaagacacaacatctaatacacactccaactacttcactcacacgcacacatacactcacacaacatgaccgccactgacaagcagctttcctccgaacagatcatggctctggagcatgcgtacgttccttctttccatccaagctcgtctatgttcaccgcttacattgccctgactgtttatcttgtttgattccaacagcaagtccgctcacaactaccacccccttcctatgtaagatctcatgtcgtttgtttattccatagcttttcgtgtcgtctgacatgtacctgttcacatctttgaatgtcaacctatccaacagctgcttcgaccgagccgagggttccaagtaagtagctccttcagtctcaccggcaatccaccatgcgtctggaagcttaccattcttctgttccgtctgttgctatcgtatagggtttgggatcctgaaggtcgagagtacattgatatgctctccgcctacaggtttgtggttcctccttgtacacgttgcacatagctttgctgcgaacacaccccgactgatcacatgccttttcttgtcttactcctcacgatcagtgctgtcaaccaggttcgttgtcttgggattttgccctgtgtattcacttataacgaagaaagactaacatacaacaaaccatcacgaacatcatctgtagggacattgccaccccaagatcgtcaaagctttgaccgatcaggctggcaagctttcgttgtcttctcgagcattctacaactctctcttgggacctttctccaagaagatcaccgatttgttcggatacggtatgtatttttctttcgtgcgctcgcgttgatgtatgatgtatcataattgcttatctgtcttcctcgtttgtctagacatggttctcccaatgaacaccggagccgaggctgttgagaccgctctcaaggtttgttcttattgaacgcgcatcttctgcttccctcatcatacttaccatcacgaaaccaatgtcttttatttgttcatcagctttctcgaaagtggggttacaccgttaagaagattcctgaggatcaggccctcatcttttccgtctctggaaacttccacggtcgaacactcggtatcatctcgatgtccactgacccagagtctcgagtcggcttcggtcccttcctcgagggtgttggacccatctgccccgctggaaagggcgaaaacgaaaaggcctttgagattccgtacaacgatgtcgaggccgtccgagttgctttcgagagattcggtgatcgaatcgctgctttcctcattgagcccattcagggagaagctggtatttacgtccctgatgagggatacctcgccaagatctctgagctttgcaagaagcacaacattcttctgatctgtgatgagatccagaccggtctctgccgaactggaaagatgcttgcttgccagtgggataacatccgacccgatatcgtcactcttggaaaggctctctctggtggtctttaccgtaagtatatcaagtattctctcatcatcaaaccacaagttctgacagaccaattatattacatctttttcaacttgatagctgtgagtgccgtgctggccgacaaggagatcatgctctgcatcaagcccggagagcacggatccacctacggagggtgagtgccttttgattctcatcgcacatctttgcacaagtcatgctcatatattatctgttgaaacacattcagaaaccccttgggatgcgccgtcgccatcgcttctcttgatgtactcattgatgagaagcttgcggatcgagccgagcgactgggtcagatcttccgatccgaaattgcctcgcttaaccaccctcttgtccgacaggttcgaggacgaggtttgctgaacgccgtggtgttcgaggagggcaagagtgtgaagggtcgatctgcctggcagttctgtctgctattgaagagcaagggattgctggccaagcctactcatgtaagtatcatcaccaataacccatgcccacttgattagaccatatgtagctgatcactcaaccgctcttttccttactctaggtcaacatcatccgattcgctcccccgttggtcatcgctgaggaggatctccgaaaggccatccagatcatcaaggagagcttgcaagagattgatgaggttcgttaatcagaccattatctccactttttggctcagcccttcctgaactatctgctgacatgttcgttctttgtcctacagatcgatgaggtccctggagagactgctgacgagcagggctacgaggctttcttggacgaataagttaccacatagaagaccggagtaatgtccagttagatcgacatcccaaaagctcccaagggaacataacgaccgaatactataatcttatatatatatgactgctgaaagaagccgttctccatcatctgaacactgaaacttgacgttgaaagatcagagaaatcgtatcaatatgacatgacgcgtgggagaaaaacgttatcgaatataaaaaacactgtcgatcgcgtctaaacagcgttaacgctcaaatccgaaaaaacagagcccacaaaatcaactcacgttaacccttcgccctttgactctaaccccttactcttttcgtctgtttgaagtcgtttcctttcttgacaaatgccagataaaccactagcttcatcgacaaacacgacgtattcggtcaccttgcctagtcgaggtcctaccgttcatgtgctgcctaagaagtctgatgagttggacctggaacctaacaatgcctgggatgataggcatgggatgggtagggggctcgaagaaacaagacaatacgtgagtttcctatgttccgccggacctgatcttgatcacctgtgggctggtcgggaactttctgtcgcgatcaaattgactgtgagagagagttccgactagatgtcttcccgtcgtcttgaacacgtcatgatggtctgtatctggtgtggttgactatcgagaagctctgggctgacagtcgatcttgatggtagtataacctagactcacaatccaccgaccactctcgacggtctctgtcgtctcatcccctctctacgtcccctcctccggtgacgacgactaccacggctttcacaaatggtattcttcccccaagaggtttcttcgcacctcagaaaccgggtgtgagcacctcttccaacggccttcacattccttcgacctcgtccccttcgactttccatccagacccgtcgacatcaaattatacatactcttcgcctcaatcgtctcttgaatacacatctgactcgatatttcggcctcaacagatacatcgatttcagcataaaacagagttggagaacgaagtcacgaacaggtacggtgaccctgatgggatgcacggctcagaccatctgccatcaggagtctcgagcagtccctctaaaggagagagcttgtacgttgcgtctactccgtcgaaagtatacggtcccgagggacgttggcgggaggtatcagaagacactcagtttggctcgagtagcacaggaaggcgagacgatgtctctggtatggatggccgatttgggagaagcattgagcttggaggaagaggagttggggttggagcctcaccaacggcttccagggagcctctaatctggaaccaaccaccgtcagactttgaaccaagtgtgatggatctttatccgtaccaacttggtgttagtagtagtaatgataaaacgactcgacctgatccagccgctcggacgacgtcctcgagacaaaagttgttcaatatcaagcggcattcagtcatgtctactatttcaagccgaccttcctctcagccgccccagccaatagatgcaaacaatttttcttctagtcatccttcgacaccactcggagccacgacgacagcgttcactgcaccaacagtcctgccgccgggtgtcgcgcgcaagcgaattcgaaagcacaaactgcatcagggtcataattcatttgcacttggcggaaggttgatcactggtggaggttctacgccgtttgcgcttcttatctcggtcatagtcgaagtagggctcggggcgctctgggtgggtacgaccggggtatatgtttggaggaaaggtgtcggaggccgaggaggtggatcgggtatcgctgtcgtaatggtgtttctgtggatgtggggagtcagtttcggagcaatgatggggacagtgagtcgatcgaacaatctggctgagagtataggtttggtacactgacatatgagacctgcttgaacgctttcttgtggcaggcatttcgagatccaggcatcatccctcgaaatttggatccatccccgatggttgcccctacggtgtctaccgggtcgctcgttcctcttcctaaggagctccgggttcgctcgggaaggtgagggttgtcttgcactttggtttcgatacaaatagtacacggggtatgtttgtctgatgtatagaaattttctacttggcagagtgactgtgaagtattgtgaaacatgttgtatctatagaccgcctaggtcaagtcattgtcgcttagtgagttgtcgtgctgttcaactggtggcaaccctaagctcaacttggcctttcatttcttcatttgatttttcagtgcggtaattgtgtagaaagcgtatgttcttgtttcgtataatccaaaacaagctctctccatatcagtacatttgaccggctaacaatccgggtttctctatcctacagatcgatcatcactgtacctacttgcatacttgcgttggtcgtcgaaattacacctcgttcatcggttttgtcgtgttttcatttctgtgcctggtctacgcaatcgtttggtcggcaatccatttatacttgcttaccaaacaggacggtggacggtcgtttcgacgagcgttgagtaaggatccgggaagcgctgttgcgttctcactgtcgatcctgttgatcgggccagttggcacattgatgagttatcatatcagggtgagtaagctctgggttggaagtaaataacgtagaagaaatcatccgggtttgatcaggaagactgatttaaacaaccttttcgacagcttatgttcaaaaactcgaccacgatcgaagaggtctgtggattttattcgtttgacgtctgactctttcttcctgaataaattctcatgtttttttcgaccttctcactcgtcatccttcatgtcagatccgtcgttcggcgatacgttcgaccgaaggatccaaaaagaccaacgtgtttttattttggcgacatcgcggacattcccgtcgaagagaccgctcagacgagaacctttatgcaagccccttcagattcgcccattggtacacgaatgtttcccggatgctctgcagaccaaacacacctagttggatgggttttagtgattgggtcgaggatacgatgtcagatggtcagaaagaatacaaagggtgatggtggaggaagaataagaaattcatattcatgttttttcctgagtcagacttgctgatgacgctgggattcgactatccggtcaagtagaatcctcgcctaatgaaatagccggcggcggaaaaaatattccacggagttttcggccgggatcattaattgccggttacaacacttttttttaatattccttctgtcgtctccgaagcgtcagcaaatagttgagcgaataggcagaagagagaagagaaagaatgacggagagaataaatttaaaagaacttgttgtttctttctctcgcaaactcttttttttcttctttcttgccacttcttcatttaacatttaagacttctgagtaactcgctgattgagatctcttaccataaagcatccccttccttcaggaatgaccaccaccgataccactcccattaccttagctgaggccatcagccgtgcgccttctccatcacccacaccgacagttcacgggcaatcgaaccagcactatgatgagaagaccagttcgtcagaaacacctgcggctttagataatcagaaagttttggttgaatcgccctaccctggaagtggaacggagcaggatccgttcgtagtagggtggttacctggtgaaaaggaggatccctacaactggtcaaacgtaagactcttgcttgttcctctctcatctgtcaatacttcttgctgaatttacttgaggatcaatttcattggaatatacagtcttacaagttcgtatctggctgaacgcaaaaatcgtctttcagttgtcgcgtgttgttcataaggacttttactccccgcttttttttcttcacgcagatggttccagacggcgttgaccgcgatcaacactctttgcatcggtaagtatcttctcccttccgatctgtactcaccctttttaatcgaatgttttcgaatctaacatctagttccaacctttctctcgtttttctgataccctgttttgatcttttcatccagcatttgcctcgtccgcttactcgtcagtcgcgcagcccgtattgtgtcctctctactcatttcgatcttaaccaagcgtggtatttccttgatttcctcatacaggggagcgacccgacagatctatgctcgatttcttgttagcgaagaagtcatcatcctcggtatatctctgtgagtgtgctatcgattcattcgcatcaacgcctcttctcaaactcaacatctattaatttcgactattttcattcagttgcgtcttgggtttcggtgtagggcctttattatgggctcctctgtctgagatgtacggtcgacgacccatctttgtgagcatgctctattttatctcctcatagtatttctcaagatgatagagtatactgatattcgtgtcgaccttcttagcttgtctcatacctgcctttcgccttgtttcacatcggaggagcttgcgcacaaaacatcgaaacaatcctcgtcactcgattctttgccggtacctttggttccgcccccttgacgaacagtggaggaacgatcgctgatagtaagttttcaccacgcggcctagatcatatgtactgtatcgacttatcgctcacggatgttgttttcaaacggtacagtgtggagcattcacgagcgaggtacggccagtgctctctttgcattggctcctttccttggacccgtgcttggccccatcgttggagggttcaccgccgaaagcggctggcgaaacgtgttctgggtggtacgtttattcacgtccctgttcattttctgataacatcacgagcatccgtggtcttaatcgttgctgtcctttcaaccacagatgttcggattcgccatggtcacctacatagtctcggcaatttgtgttcccgagacgtatgctccgacattgctccgagcaaaagcccgaaaacttcagaaagagtcgaacaacacaatcttctacatttctaaattcgacaaaatcaataccaagacaaagaaagaaatcttcaagatcaacgtcagtcttctttttttctcccatctggttgacgtcttgagttcgttcggaagttctgacctcacagcgtctctttatttgtttctgacaaatcgttcacagatgacccgaccgtttgtgctcctgttcaaggagccgatcgtgctctgtctctccatgtacaccgccatagtctacggaaccctctaccttttcttcaccgccttccccattgtcttccaaactactcgaggatggagttctggtgtcgggggtcttgccttcctcggtgttggacttggcatgcttatcggaaccgctctcgcccctgtcaacaataagatttatctccgagctacccggaaaagccccactggacgagctcctccggaagccagattgccgatggccatgctgggtggcgccttgcttccgtctgctattttctggttcgctttcacctcaacgccttccgttcattggatcgttcctatcctggctggtgttcctttcggatgtggaatgctccttgtgttttcatccatcataaattacttgatcgactgctatcgtaggttctcccttcttcaattctattacctttctatatgtacctaaattgacgcaggtcgttgccatctgttgttcacaaccagttatgtacgccgcctccgctctggccgccaataccgtattgcgatctctcttaggagccgttttccctcttttcagtacctacatggtgcgtcactattgggcctgtaacaaaagttcaaggggttaaactgacaggccaatctctgtttttttttgccctttgcagtatcaaaatctcggaaacgcctgggcttcggctcttgtcgctttcttgtctcttgcctgtgcacccatgccgttcctgttctatcgctatggagcgaagtgagtcctttccccctgttctttcttgccctcctttgtaaagaaaaaatattgacttccttgtttaaccgtttttgtgtgtattcttctgggcctacaggattcgagctaggtcgaaattttcacccaacatgcctcctgcccctcctgctcctgtcgccgctacggcttccacatctacagaaaatgcttctaaagttgctcaacccgactcagattccgcgctcgagccagagtatgcggctgatgctggactggaagaggaaaaggctagacaggcagagttagctaagaggaaagctggagaccagatcgtttgatcggcccctctatcctcatctctttgcccttcgtttttcttttcttttcttgttcatattcttcttttggtccctctcttttagacgaagcacccccaagcattttctcctttttacctcattccaatcctaatcgtcttagataaccctcgaagagttttcttcgttccacatggcgatatattagactttctta

SEQ ID NO: 183 - DNA, 102726 bp, Xanthophyllomyces dendrorhous
  misc_feature (42039)..(42048): n is a, c, g, or t
  misc_feature (56583)..(56697): n is a, c, g, or t
  misc_feature (88062)..(88071): n is a, c, g, or t
gcgtaaacaaattctttataattatattaatgcagtgcttcttaatatactagcgtcgttaatcatgttcttgagatcttcctgaggccactcaaagaatcgttgacttcccctgttctgttcaaaaacttaagagaagaaataatcgagtgtacgctatccaatcgttcacttctggtaagaaaaaggatcgatgatttgtgagctcttacacacttgattatcgagagacacgatatacaactacattatcgattggaatatggtatgatacaagtagagatataaaaaacaaaacaaagaggcagagagatcgaaacaagaggtatcaacggcactaagatagagcacccaaaaggtgccagaatcttctcaccatttcctcccattttctcgaatccccgccctactagacccaccaagagcagcttctgggaagaatctttgctcctcatatgctctctctctaggtgtaccccaatcagactctgtcccctgaagactaagagccggagtgcttccaccagaaaccgatccccctccattcattctcatcaattctctttcccgttttcgttttgaggcttccaccaaagctagcgctcgagctcgctcagctgtctccctttgaagacgtttctcggtagcgctcgaaacggacgaatgcggtggacgggaggtttggtttgagtgagtggtgctgacggtgttagtaccggacggagtcttgggtttgaccggtgggtgagaagagctggagaggagggtgttcatcaaggtgagcggatctctggatgtctttgagcgttcttctttttttctgggtgaggatatgaaatagatcaaaaaagaagatactgtcaaacgataattctcatagagagtgaatgacacaagacaagaaagcatcatacacttacctgtctctgtctcttctgtacttttccttttcgtcctttgcttcacctcgctgttcaggtcgtttcatctctggatgaacataccagggctcaagttcggaaatcgggcgagaaaggtacatcgtgtaaggatcctcggcttgaacctcgtccgctgtcttcttacgaggtgtttctgcttgtctaggaggctgattagaccatagcaaccgatgggtggaacagaaaacaattagcaatacgagcgaagaatcgatcaccgacagttcaattagatggaagacttaccccagctctctcttctgatgcccaaaagttgagatgacctcgttgatcccggtatgtctcctcccacgtctcgtccttcctccgaccgtgctctctcgtcctaccaccttccttgtcgattcttgtggatacagtacctgataactgtctgtctaaatctcgcatgtcatctcgcgctcttgccttgcctttgcctttagaaacggaggacgaagacggttcgggtgcatagaacggatcagaagcaggaacagaaggataatcgatttctttacgaggccgagaagatgaggaggatgaagattcggccaaaggaggatttgatccatgagcctcctgattccgatctcgaagaagggctagacgggcctcagagtcctgttaatggtgatctcgtcgataagaagagacgatcaggaccagctcagagtgatacaaccaaagtgaagcgtagatagacttacagcgagcaagacacgctcctcttcccttcttatcctttcctcctccttccgctcatcgtctctgacccgttgtttattcttctcaagataaggatggtaagacttgtggacgaggatttgtagtcgaggcattgtcgatggttgtcgcttgcgtggtggaaataaaggtgggacgctgtcttgtccggcggccgttcggtcacgtgttctggctgacattatcaaccggtccgacttgactcatacacagccacaaagcgacgtaatctgctgcggaattatgtcatcggctgtgcgagaccctgactgccgaacacagcaccatcgctcttcgccttcatataaactcaagctaagaagaacatctttagcaacgacaacaactcatacatcacccacctcttgaacattttagaaaaccatggccaactctgaatcatcctcgatttccacaaagatcggttctttgttcaacaaagccaaagattcggcttcacaggcagctggctccattccgttcgtacacttaactctgtctttgtatccttgaccaaaggtaagacaaatctgattggacactactctgtgcttttcttcttctagcagctctagtcaatatccggcgatagattcgattcaacaccagctgcgttcctttcaacagcactacattcctcttccaacaaagtcggccgatccgagctcagccgagaacaccaaagcgcttcagtgggcgatcacctctcagaagggggttgcgcttgacttcttgagcgttaaaagagatggcacgcttgctagcaaagagattcttgaatggggaaagggtctaggtgaagaagatctagtagatggtatgggtctctccactgatacgcgctgatcataaacatttgcttgcagtcctgaccgatacatgtcttctgttccttataaatcagctaccgatagaatggcgtacctctcctttatggcagcccaattatcaggcgaactcgctcgagaattagatatagccagagctcctctcaaagagcttcgaaatctccaacagagcattgaattaaaaggctaccggttggttctttttgtcgtctcctagctaataaatagtttgtgtacgagaaggctgatgtttcttcaccgttgtatcagtctgaaagaagccgctaccaagaagaaagttaacgaagacgaggttgctattttgacccgagatctgaccagactccaggaaactttgccgttaaagagacgacaagcaatcgtcaagtcgaacgagttgagctggaaagcgtataccgaagtaggccccagacttttgagattctatctctttattttgcagcaaactcactcgtatgtcattttgtccctaccagtattcttccaagcttctgctcttgtcgcatgcctcctcttcgcttattcctactcttgcatcaaacgaatgggacaaagattttgcttctcacgtccgaagttcggcccaggcagctctggacaattataaacctggaaaatatatcaacatcataaattggccggaaggtgagcaatctctttgtagaatgttgcaagctaaacctcatcatactgacctggtctccacgaatttgtttcaaaagctggcttgactccctcattcggcgagactcactcagaggagttgtctttaatctccagagatcctcactcaggaattgcgacaaccacccggtcggactccctgccttccgatgtttctcgtcagcaggctcctgctcaaatcccgtcgtccatcaactcggccgcgcagagcgagaatccgtttgaatcccctctcgatgctcctcggttacggactcccagtcctcctcttggcaccggtcaactcaacttgaatctggttcagcttcccgtagattctgcaagatcgtcctcagctagctcgtcttttgacgtgaaggggagtcagcatgaggttggaacccaggaaggactatcgataggaaaaggggttgcgcccacagtggccgagactggggtgccactcatcggaggcggcagtcagtcagggtcagcttcagggagattcgagaagagagcctcctcgggacatgctagagaagagctggaagcagcgagagcagctttaaatattcctacttcatgtgtaggtattactgtctattttcttgcgcttgtgatggtattcatcgatctgacaccatgtattgttccattggtctctttctaggatgaacatcactcttcgttcacctttacagattcatccgcgctgtccacctcaaacataccgacgacggtacccggttcatttcctgctggcgcggtgacagatcagacggattctatcgagactcgcgctcgagaggagagaatcagacgaggaagtgagactgaagacgaagccgcagcgaggaagcgagaaagcgatgcggaaaacaagcttcctgaatactctgtatgagcttgctgttggtagacgatctctgtttctctatgacccattccagtttttcaatcttcattttattgttgatgcaatcacgaacaaaggacttttctttcttgcgataactctactttagtttacctctcttttgttttttcttcttcattgcgatgcattctgtatagctttctgagtatattgataggatgatgaatgcatgagaaaccgaggtagcggtctcccgcgccttcgggccgagagtgatcggtgtgctcgcgatcatggccgccctccacatctccaggtgcagcccaagcgtctttaaatatacactccagctgacatatatcagttattcatcgattgctcagtatattttacctacacccatccatccatccatccatccatccatccattcatccatcatcaaatcaatcgttctttttggtttttgttcttggatagacatcaccggatactctaactcatcatccgttagtcgatttgttcaaacatcatcaaaacaaaagagcaactttcgctgatcgggctccaccgatctaactcttcaaactcaactcggccttaaccaatagttcacctcaactcacattgatgcagtacacaattgtgccagatcctagaactaccgtcccacccaatcccactcatcgggcagtgcttgagaacgcagtgattgggagagccttgggatcgcctcagacaacttcaacttcgtcatcatctccaacatttggaaacagcggtaccggtgtgggatatggcggacccagtgtcacactattttcactcgtttgtcttcattttctttctcaccccggaatctaccatttctctttctaatctttcaacagaaattacagagatctgaacaacttttaatgtttttctatttttgcataacttattttcgattgtgaccttggggttactattggtgtcaaattattgacctgggatcggtggttgcactgattggatatcataatgggtctcataggtattcgtgatcgtaggattattagtggtagcagcttcagggttcgccacctcttcaacaccctgaatgtatctcctagaactcgatcgagagctcacctttttttatgtttctatttatatccaccaatttgatcggcgattcctaccttgattcttttctcctcacagcactttccgattttactatgttcgtcggtcaagatcccgaatggcagcttttcttcgctcagaagacgaaatccgattgcaacgtcggcaagattttctcgctcgaggaggaggtcgtcatttatggggctcgatgaagggagatgattatccaaaagtgaaaccggtgatgtgggaggcagaattaggatcaggggaaaaatcagagtttgaagggttgagtgtggttcgtcccgagtctttggtcgtcaaatgccaactactgctgcagatcggtacatgcgaaagtacgagaacactaaaaaaactgacttatatttgttgattttctttagccgctttcgttatcgacatcagcttcatcgtctacatcggccaacaaagacgtctcctctctatcggtgacagaaagaatatctccacccaatcagctcactttttccgtatttatcttacctccccgacctccgcttgatgaatcgaatccacctcctattactcagactggagaggaggaattgccagagcttgaagtgggcgtcacccggatctatatttcttaagaattatcttttggttccacgcgcatcgttccatcaccgacatccgaccctgcttttgtacccttggcacttttgatacctgcggttatctttttttctctcgaggtctgtctctaagccttactgcttgtttctatgccctatctttcattttgaaacgctagcattcgatccgtctgtatctcatctttcgcgttcacttcacgcgcatgtgggctttgcttctgttcttcttcgtctttgttcgggtcgagaaccctttccatactgtattttgaattctttacggctttcccacgtcctctttctttctttcttcttggtataccaggagatctctatttatacgttatattctccagtcttaatatatttgtaccgataagcccttttcatttttttaatcttaaaaacgttgacaggcgtgaaaaagaagagtcttttgtgcaaaggtataatcttgaaagactattgggtgagattatttgacgacttaaacagtaccgcttgttgatgacattacatttctatctatacaaacaagacctggaagtgacctttttctaatttaagttttggattagcaaagacaaatatttatggagagatgtgcaaatcatagtggagagcatcgaaggaagagagatcaaaacagagaacggaaagtagtttaaacctttgtagcggtagcagtggcggcgctagtaaagctgctgatcttgacagtagaagtagaagcagagacagaagccggaacagaagcagcagatgcaacggcagaagccgaagaagtagccgaaggagggtaccaggtgacaggaacggtgatcgtagcaggcgatcgaacggcggtcgtagggttggcagtgcacttgggcgcggtagcggattgaccaccggtaatcaaagcctgggtcgcgttcttgtgtctatactcggcaaaacagtcaagcaaaaatatgagaatcatgagtgatagcctcgggttgaggaaatagtcaaagtagttgcagtacgaacccgacggctttgataaccacaggaacaacacctccggtctgaacatggaacgcttggtggttgatggcagtgaagaaggcactgaatgaggagcggaaatgagacaataataacaagaaaatgaattttttttagcttttgaaagataaaatcagatttaagggagtgatcgtcagaagcagagagaaacccacgtgatgacaccggagtgggcggtgatggagatgtaagtagaatcatccgtagcaaagatgttgttgagcatctgctgaattcgcaaagcctggatcacccgggtctcttcgtaaactgggttccatagctgatcttgctcggtgaaggacggctcgatgtcccatccagggtgtctagcggcaatcgcagtcttgttgcttcgcttgtcgcaggtgtgaaggccttttgaatgacacaacacaaaggtcagtcaaggaattgtcagcgacgcatgaacagacttcaaaaatatggaccaaccaatagtctctcgctacaatacgaaaaggtacgagtcaatgttagcgcggagatcaagacaagaaacgagaaaagcgcaacatagatgtcgcgtacccagttctccttgacctgcgggacgtaacctttgttcaacaggatatcatgcctgcaataggtagatcggcatatacggttgtcagcgacagaggatcttttgtagtatgagatggagctcatcagatccaattgcgtggaataacgaaccaggtgatgttgagagtgtccatcgatcgggtcataggactcgagtagagaacctggggaagagggatgtcccacttggactcattcttccaagcggcattgaccgcctcagcttgaaggataccggcgggagtgaggtgagcgtcgggacctgaaggtatatacatcgatttaaagaaagagattgattaagaacaacgtgatttatacatgggaattggacgaagtaaacagaatggactgatcagcctcaccccaggtctggtttccatcggtattcaattgactgaagactgaaatgtgaagcatcccgacaggtgatgaatgattagatgcggtgtagaagacttcaattgagagattgaccgccgagacaagaacttacagcaatcccaagcagcatcaccataaaaagcctgggcctggttgtggtacccctctccgtgacgagccatgtagatgactttgtaggaagttaaatcatcagactcctgattgagctgatgaatctttctggtttgttcgaaaaacagataccaggttagcttaagatttcaatagctaagtgcttggatccgatggaaaacacttgcttttggaagtttctccatctgtccttagattggtcgatgagtccgaaggaagcattgagcgcattgtaatcggtcgcattgaaagtaggtgaatcctatcgtgacgatcaccaagacagtatgaaaaattgatctttagtatttgttcttcgatgtgaccagattcatcattgttagtacctggatgaaaatatccgatacaaccgagtagttggtggctgaagggaagacagacaatatgtcatcaattcttctgcccaggtcgaataatcaagaaaaaggaaaaggaaaggtaagacgtacgcgcaaacaagctggtcttgagatcaagtttcctatccacaagagctgcggcatggacagttgaaaacgcagtagaagccacaagagccgcagagatgatggtgttggaggagatcatcggatagagagagattgagacaagtaggtgttcaattgagcgagtgagtaatgcagacggtaactttcagccttctgctttctttttaaacatctgtgtgctcatctttttcctctctccgatttgttcatgacatttgctcattggtctttcccaactcttgaatcacagtctgatcagaacgtgcgaacggagatcggactaaagatgcggaggaaagatgttgaatagccagtcaatagagagaaaacacgtgggttgcaccgctgacaacacgttcatatttgtcttggcaacaccgggccgaagggaacgttatcggaccggaatcgtccgtcttatgatatttttagaacatcacgcgatggtcgtttggtctatcaagaaactagctcaatatatagtacaaacacagaagatatgtccattactccaaccttgtgtggatacggatattgtacagaagtagtttttttttcgagacagtatgaaacaatgtcattcagaaataaggaaataagattgaagagggagaacaacgtatatatctgggcaaacaaagatccttagaagacaaggaaggtcattccgagtgcaaacgctcccgaacctaccacccacaaaagaccaagagcctttttgtccgctccgctctgattgctattattgccacttgatgaagtcgtgctgctattaccacctgagctgccgctcactgtcccgacggaaggtgtcaaagaggaagagttagatgaagcccagatttgagtagcgatgtaggcgtgcgctttgaacggattgttgtacgtctctacagtatgagcgaaggtatagttcgcggggcgagagatatattctattttcgaaacaggaaagagagcaccatcagcctgacaactacacaagcaagagatgaagaatattcgtacgtaagaactgttcaggcacaaatggagagagatgacccctcagtgcaattcctacagtactttgaacgagaagtggaggcggagaatcggtgtcatttgttaaaagagtgttgttcaactccagatagatcgcactacttgttgttgcttgacctgcttcaaaagattgaaactcgatggaagaatctgtggtgatcataagtaggaataatgaggtcagaatcaagaccacatgcagaagcagaagtagggcacgagtgatggaaatggctcactaggtgtaccggtttgcaccactgtggtataattcaagtattgagtgataaactgatactcaacaaaggcatcaaatacttttcgaacagtctaccgccagagagagtttgtaagataggaagacagatacacatacagatgtgaaactcgcgcaagcacttccacacgttccatctccatatatagcgacgtctgcaggagagtagactgggctggacgaccgtgacagataattttggtatagaacatcacgtagtctggacacacgacgagcatatcgcacaacttcagacgaactgcatctgagaggcaactatcaaagcaaacggcatagttactcacggctgagatgtctttagtgtttgaccattttcaacgatgttaccctgaacagaaaagtagttaaaattgctcaacagatcatttccatttgccgccctgaagttcaaagggccatatactttgtacatgtaaggattagctccgagatagaaactcatcatgggtagacatgagttatatagaatgctcacatccggcatcggcttgagggttttgaatatgataattcaaaaacttctctgctaagggagcagctctcaagacgccctcgaagttgagatactcctgatacggtgttccagagaatattgattgccaaactatgttcaatgtgacagatcctcctccctattttgcgccgaatcaggtttgatatcaaaggagacatggccaaggagtggttactatgacggatgatcaagagtttgaaggaaatgaacatagacgtacgttctgcgtagtatcaatgatgacttttgtcacgccagcttcagtgaaattctacgatgggtcgcaggtttacaagatggtcagcgatatcgatatgtcattctatcaaacggaagaaggcgcaatcgagtacctgaaatcccaaactggtatcctcgagaaactgcgaagtacaaccttcgtctggttcgaaggtagccaactgtgcaattgcatcaagttcacagaggaacaaatgtttttctttgtcagatcataaccttatagtcaattgtttctccagcaagcctggcgtcgtgaataacttacgaagatgacccccacaatttcgttctcaacactggatttagacaatacgaagaactggacattccttccccctagatactgtgcggaatctgaagagtcgatcaacaatggcaaataagggctgctgggtgcctcacaggccgatgacgtctgacgtttgatcggtccgttgatggaatgtggaaagatagacgtagggtttcgggcgtgtgcgacgtcttctttcgagtctgatgcagttgaaccagtagaaagacaattttcttggaagaaagttgaggtggatgcgtaagatttatcagaaatggctcgagcgaaatacggaacctatcttggtgacatgacgaagatgcgcaaaaggcagagaatgtcatcaaagatgtcagatatcaagttggcgaattcaaatctagatcaagactgacgaccacctgcttggagccagactctgttgagatctgaaacgtgatattatctcgctctggaaacgtttgctgtgccactgaccccaaggtccgagttctgagaagctcagccagttgagactcatatcagcgctgtggatgatgtatgtccaacatacgtttcacataacgtaacagcaaaaggtttgagagtcaaggcttacattgttgagccgacaagagtatacgaagccatggcagcattccgccgtacctggatatctggataagttccagtttcgttgttggcaatgtagtcgatactatccaaagcagaatcataccgtgatttcaatccaaaacatgttttgtcagtcctcgaaggataaaaaacatcattttagaaagattatgagaacctccttgcagaagaacgtacaatgccataggctccatcccgtcgatcatctgtacttctgcgcccgacagctcggtgatgtttatcccctgagtttcgtagagatccaagatattttcgaagtaaatgttatactgagccgcaatattattggatccaggagctatgtagatttttgtatcgttcgctcccaagctcgaggcgagcgcaaccagcgggaatggtgtgaacgagatgaaagcgttagaataacatgaacctacaaggagtgggaaaccaatcgacaggtgaactttgtcagcgagagatttttgaagcggaaataatgagaaaaatagaagatagtgatgagaggttcactgtagtagtgatggccgtcgttcaacgagttgaacacagagtaaagatccctattgaaatcataatcgcatgagtacgttgcgtttccgatccggcttagctcggctctaaatattgagtcgaagtaagatagcgaacatataaagagtcagtagcggccatgtgtatatgagtatgatatacgtgaactagaagaaacggagaagtaggacgaaccgaatattggtggattgattgagtggcaacgattgattgagctgctcatactcaaagatctaacaaacatgtgcacggcatatttcgaagtgtatgaaaatcaggatggtcgatcttctgcaggatgtccacatggtaaaggcttacatccagattatatatctaagattttggtatttcaagtgagagaaaaacgagcaagtgctcttgatcagcagatgagttctgttgcagtgaccatgatcatcattcaagattctgatggcttgaaagttgcatttttcaccttctgaaccacatcaagaacattctgacggacgacatcgtcgaaggggacagacctaggatgagatggcaagttgaggcaatcaatgtttgcgcagagggttcgagagcccaaagaaattctcacttcagacaagctctagcctgggccacggtgaacagagtgttgttggtgcttgccaatgttgcgcatggatcggatgagacctgccgtttctgaacgtctggcagggactccagcacctgcagtgatggacctcctagtccggaatcgggatagagaactcccgggccgtgacgaaagggatgtcgagcctcggacgttgaagcgagtacttcaagccacaagagggtcagatacatcaacatgttggttgctgacaatgccgagtatcttcacaattcgagagatgatagtttgttcgtttgaggagatcaaggaagagaatcgataccaaccgatcgtatgaactgtgtcaggtcatacatatatagtcggaatagatcatgcctgaaaccttttacttaacctgtgacttggaaggccgagggtttatgccaattataagtccttctgctttctttggttccatcccggaccatctttcttcctccttgttcagttcaaatcagatcaaatcatattatactaagaggaggactgatctatctacggccgacagagaagtgtatcacctcctcagtgtctttcttggacatggccacagacgttctcaaactctggcccgcttcggtcctcatattggctgtgtttaatcctgcaacctctggggtgaccacatgtatgtgtacaggctgttcaggttggtacttatgcgcacatcatagactgcctgacactctctgaagcgcctcacgtatggttctattaccgacatctataatctctctgttgtacaatatcgatagacgtcctccatccacattggtcttttttggcttcccctttctaccaaagtctttttgtggcaggtgcgcgatcagcgactcttactttccaacatgtctttatattcgtcttttgcatcttcttgtctatttctctcatcttctatctagacactttcgcactttttcgaatagtcattacagcgccgtctccaagatcgacatcacttgtggttcttcgaaggtatgcatatatggaccagactcaatgtgcacctgccagtcctcgatatcgtggttgcgatgacgtgtgagaagtgtaaacaaatggttacatcgcttacggcttcctcataaagtcatcattcagttctttgggtccctcttactaacatctcatcaactgtcagaaaatcaagatcaatacaaccatgccatatattgagatcaaggagcttcaacgtatggacatttggtttgaactggccattttaaaacaacggacgctcgttgcaactgataccttgttctccgtctgaccaaaatagaattcaatcgagtcttgagcgaaacctcggccgagaaacttgtagtgattgactttcatgcaacatggcgagtctcaattgctacatagagtgatccgaccccgagactgatgaacctcttttggtttgatacaggtgtggaccatgtcgtgcaatcgcccctgtatacgaacgattgtccaattcggttttgcatgcaacgttcctcaaggtacaccgacacctgcctatgcctgagcagacatgaacgtctgatggacacagatgggctgactttttgagcctttcctggacggtcccttttgattgattgttcaaacaggtagacaccgacaaagtacctgccatcgctcaaaagtacaacattagagcgatgcctacatttgtttttctcaagggcggaaacaagattgatgaggttggtccgtttctgtttcgcaaacttggagttatagatctgaaagtctgatgaaagactactatctgtatctttctttctcaacttatctccctggttctttaacacacaattcaataccctatgatcgaattggaatcatccagctcaaaggcgctgaccctactggattgacagaaaaagtcaaccggctggctggtcctccgccttcctctttcgcttctggatccaaatcatccagtaaatctctcaccgaaggactcgtacgttctttgagattatacatatgtgtcaatctcaagtcgcacggcactaacccacatatcctctgatttctaacagacctctttgaagccggtgatcgacagcagagaacttcagtgtctgaacgaagtcgatgatcacacactgaaaggaatattaggttcggatgccaaagaagggaactttctcgaatcggatgctgacgaggtgggtcattccgtttctttccgcaattatgagcgtcgtccgacttaccacaatgctattctttcatctttctgcagcaacttttgattaccattcctttccttcaacccactcgacttcgcgctcttgtcattcgaaccgatccatccaagcttgaacttgccccaaaacgcctcaaacttttcatcaatcacccttctctcgggttccctgaagctgaaacgtttgctccaacccaggagtttgagctcacatcgaagcaggtcgaggaggccgaagggactgttcgactcgatctcagactcgttagattccaaggtgtaggaagtttgtcgatctttgtggttagcaacatgggaggggatgaggtgacgaggatcgatgggatcgacttgtttggagaggtcatggagggtggcagcaaggggccattgcagaaagtagaggactagatcagagagatctcgagcaaagtatcagttaatcaatgtctatgtttttctgacactgctatgaatcaagatcctttgtactcggcgatttacggccactatgtgatggaactcagtttgtcgaacattgacatcatcagcgcaagtgatcggaagaacaggaagaagactatgaatttgttgtattagaaacactacaaatttaaatttgatcattaggattttcacctgacaatattcccgatctgtccgggcctttttttccgtccagtcatttctcacttttttacttttctttccactctttcttcttcttctcatcatcaaacaccaacaccaacacccacacgccatgtcacctcaacactttcttcccctgctcactccgtcgagtgatgactcctctattcttgagccgctttctcttttaggtccgatcttgactccaatagcagaactcggtcaacttccagcaaacgcatccgcatacgtgcttgctactgccaaggataccgttgaccagctgattgaagttctcaacaacggtgcccacaaagtcgtcgtctctgccgagcaggccatcgagctcgccaagtccgtgtcaaaggagagactggtttctgttgtggctttcacggatgttgaggccttgaccgaagatgtcaagaagagtgtcggaggtttcctcgtcaccggggttgctcatgtatgtgctcttacatcttctacatttctttggcgtgcttcatggatctttatatgagcttcaagcttacaagtcatctgctccttactcctcacttctgatctctgttctttcgttcatcacgccgacttggtcatcgctacaaaataggccaatgacatcctcgacacccttgctccattcaaaaacactcacactctcttccttcacctcacgtcggctcctgttccttccgagatccgattgcttgtgcagaagtcgattacccctgtccttcctacaaccgtgctatcagtctcgacaaactctgtccaatccaaaatctctattgcctccgccttccttgcgcctctcacgagcgaccgaccggatggtttgttccccacgttcgtcacctcctacgctcactcgaggaaaccgctcgggcttgtctactcatcgatcgagagtatcaccgagtctattctgaccggtcgcggcgtgtaccagtctcgaaagcacggactttggcgaaaaggagagtcttccggggcaacccagcaggtggtctccattagagccgactgtgactctgacgcggttgagtttgaggttgtccagaccggaaccggtttctgccacttgggaacttccacatgtttcggcgagggctctttcggtggaattgctgcgttggaggatacattgatcggccgaaaacaagacgcacctgccggctcatacaccgccagactgttctccgactcaaagcttctccgagcaaagatcatggaggaggccgaggagttgtgcgaagcaaccgagaagtctgacgtcgctttcgaggcagccgacttggtgtacttcgccatgaccaagtgcgtccagtccggagtcagctggcgagatgtcgaggccgcgttggagaagaaggctctcaaagtgaagaggcgacagggggatgccaagcccaaatggacgggagagaagaccgatgagactcctagggagcctcaggagaagccggtgctacctgctgctgcgccccctcctcgaacaaccgttgatgatccggacgcacccatcaagatgcgaacggttcctgctctctcgtcgctttcagccgaggagtccgccgctttgcttgtccgaccggtgctggattctcaggccatgatggccaaggttcagccgatcatcgattctgtccgaaacggaggcgatgccgctttgctcgaccttactcgaaagttcgaccgactttccgccgatgcacctgcctcgaacgtcatcctccctcctttcgctgaggagctcatgcaaatcccggaggacctcaagcaggcgatcgatgttgcttatgagaacgttcgcaagttccaccaagctcaggccgaggacgaacctctggtggtcgagacgatgcccggtgtggtttgcactagattcgccagggccatcactagagtcggtgtctacgttcctggaggaacggccgtgctgccttcgtccgctatcatgttgggtgttcccgcccaggtcgctggatgctcgaccatcgttctggccactcccccgcgaccggacggaacaatttccccggaggtcatgtacgcggccaagttggtgggcgcgacctgcgtcgtcaaggctggaggtgctcaagccgtcgcggctatggcttacggaaccgagagtgtgcccaaggtggacaagattgctggaccgggtaaccagtgggtgacggctgccaagatggttgtccagaatgacgtcaaagctttggtcagcattgatatgcccgctggaccaagtgaggttttggtgagtgtttctctcattggtcttgtgttttagtattcgtgttcattaaagtccatttctaactatccgctcttcatctttattcgttttctcttcacctcaaaggttgtggcggactcgcaagcgaaccctatctttgtcgcgtccgacctgctgtcccaggctgagcacggtgttgactcgcaggtcgtcctcgtcggtatctccctctcaaagacggagcttgctgctatcgagcatgaagtcgacatccaagcccgagctcttcctcgatgtgagatcgctcgaaaagcgattgctcaatcgattatcgtgaacgtcgacaccagagaagaggctatggcgttcagtaacgagtatgctcctgagcacttgatcctccaagtcgccaacccggcggacttggtggcagacgtcgtcaacgcaggaagtgtgtttgtcggtgcctggtctcccgaatcgtgtggtgatttgggcgcaggaccgaaccacaccttgcctacctatggtttcgccagacagtactctggtgtgaacacattgactttccagaagcacatcacttctcagcagttgtctgaagatggaattagactcctgggaccgtcagtcgttcgaatggccgaggctgagggtctggaaggacatgcgtcagttgtttcaacctttattcaattgttgaactctgttggttcaattgctgaactaaacacatatcttgctccttcctccttgtgaccaaaacagtaacgccgtccgagtccgacttgcgcacctcaagaaccagagttaattgaccaatctctcctcctcttcggttgctgttttatctcaccccgttcttacccctacatctaatcttggtcatcactttcgtctttcctgcttatcataactttatagaaatgcttttcaaaccctatatcctttgtcctatccacgtatctttctacgttctcttctctttccattttacccccacatggtccttaaagttagggaaggtggatcacacgattgatacgccacaggcaacggaggaatgggcaacaaaagacacataacgaaacgaaagtgggagcaagaaaacaagagtttttcgagacaaatgacaacttcagaacggaattcattgaggcaaaccaccaaggtttggaagtaaaatgtccgggtgatatgtatatagtgatgtacgaggatgatacagcaggagaagactatcaagaatatctaaggcaaggaaaaattggggctaggctgtctacgagcatctcaaaacggaacgcttcccatctctcctgtagcaaacaggtcctcatcgaaatccacctgatcctcgacatggtcgtctctttcctcatcctcatcatcgtcctcttcattctcttcctcttcattctcttcctcttcatcctgctcccctccttcgcccgcttctccctccccgtctaactcaccttcatcctcctttccctccctaccttctcttttgaccttggccggcctatcacctgtgcctctgaatcgctgagaactgtaaaagtaactttcttcctcatatgagtttggtagactgcccggcatgctgtctctcctcgtcctgtacgttcctgctctctggccttcatcctcgctgtattcatcatccgatgaccatcccggacccgttaaaggtgagacaggcctagaaatgttcgttccgtggtctccatccggtttcttatgaccagtgttggtaggggacgtgggcgggttgacaggcgtagctgaacgcgaacctcggagagagcctgtcaagtttcggaggacactaagtcgaccggatgtatccgaacgagcggatagagctggagaaggtggggaaaggtcaggaagatcaatgtcgcaggggggtgctcgccaaaagttgaagtcggtgaattctggagtccacttggcgtgcacggacgggaacatttgatcgaccaggtcgttcatgaagatgtatctatagaaccaagatagaaggatgagcttctttgaatcaacagcttgtattgcacttgaagaaactcacgaagatttgtgtccagccaattccaacaattctgtctttacctccccattcgaatcgatcgtgaatattctcgaactagggatgttgatacttctatacgaaagcgcatcattgatccggtttccaaaaccggcatagaacgcgttcttgtgactatttccgaagagacgttgaagatctcgaagacaggccattttgaatacttccggcttacgaaggatgacctctctgtgataagttggataaggacaaagtcagtttgtcaggttgtgaaagaagcagaaatatatcaagcagatcatggctgaccgatgaagggaagtcattagtcgatcagggctcatgatgaccggtccttcaggaagctgataagacccttgactgatgttcttcaagtaatctctggtggagtcggcttgtccgatagcccgagatgtaaggtacataattttgtatccattgttgctgaattttaaattattgataatcgagagcgaccagaagatttagccaattcagcttggtcatgttcaatcacaatcaacgagggttattcaggccaataggaggtcacttacactatgtctgtgtagagcttggcgactccagtatgagtccaatccctgcctacagcagcaaatagatgacctagcgcgtctgacctgtgaggaaacaaacatggttagacgacaacccgtattcagatcgagagctctcccctgaagattatgaagagacatactttgtgattgtaccatcgatgtccgagataacgatatgatcactcacgtcccagaggaagatccgagctgcgcaggtggcgactccggagtaagacgatgtaaccgaaaatgtgatggtgtttgctcccttcttcagattgagtaatttctaccaaaagaccacaagtagagcaccaacagcaaaagtagcgtatcagtaaacaattgatgcgtatagcgtgatgcagcaattcttctcaaaagtcgtcagaacgaacaagttggtctgatgataacctgagggtcttgacgaaatgctttgtgctctcctgctccgccgacacgggtggcactgttgatgcagttaatgacgcagccgaggagggggtcacatccggcggtggttcctaattatcaggtaacccacagtaatttgattaaaattgagatggtcaaaacacgggagtgcaaaaacaaattggacgcacggtcgaagctctgctacttctcgaaggcgttaaaggtgccaagttcgattgtgttgctgtatcttggctcaagcctgatggctcgtcctcatctccgttctccgtatggcctttgtaaccctccatatcgattacgacatctgcagttacaaaagagttaggtttgacgtatccatcggtcttgagaactcttctgcgaacgcgaagagtaaggagagaaggacttaccatctccatataccacatcaggcggttttccctggccactcttaatctcaggtaaaagatcgtctccaccttcattttggccatctccttctcctcctatagaactttttgcttctctgttcatctctcgattcaccccaaaaggatgacggatactatcgtatgcctcttcgagttgctgctcagccttgatttctgaaacatatgacgtaaggtcctgactgtgcgtgttgactgcctgagcaatcgaatgagccgtggtggatgctttggaaagcagagatgacggcgaaacggacaagccggtaagctttgtaggggatgtcgaagacggtgaggaagccgagaggaaatcagaagaggaagggttggttggcttggactcttggtaggaaaaagaagatgtagatgggttggaataactactctgaggaacagatggttgggatgtacttcgggtaggtgagaggggtttttggggggataattcggcgaaaggcgcgcgaggagttctctgggtcggactgagaggtggcgagggaggtggagacgggtagagggctggagacgttggatctgaaaccgttcctaaggagaagcataaacccgccaagatcaaggatataccgacgcataaagattaatactgatttcagtggttgtggaccgcggcgagataatcttaccatttattgtccaagcgttcagatctaaaaagtccggctcttccacgacatcttcgttgtgagcgtttgccacatcctccattgtagtctggtcgtctaatactccaaagcgttcgctattcgatgtatcctcagtactatttgttatgtccaatgacacaatagagtctgttttagagtgcttggggacgccctcgacgatagtttcaaggtctgtggtgttggttggttttttgttgaccttgaaaagaaaaggccgttcaagtcattagtcagatagaatatagtatagagttacaagcgatataaatccagccatacctctgttgctccaagcagcgggctggtgagtaagtcgtctgggacggcttcatccgtttcgaccacgaaaaacgcctctccagcttcaccaactttcatgaagaagggtacagggtgagagttgactgtaagagtcaccttcttctcacctgcgcggaggacctgaagtttgccgaaccgaacatgaaacggagaacatgctagaacggtgctggatgacgacggagtcgactaaaggagaacgagagaacgaataatctcatcagtttcttttcaagctcttgatgcaaaagatttgatgacgacgcgtttgatgtttcgagtgctaaactttcggctatcaagtcttcatcttctccactatcagcagcggtctactacacctcaacacgtttattggacgatcatcccacgttgtctacgttgatctatcgataaatcgcgttcccgttagagaaatcaggccggattgatggattaagtttattgaaagaccgaacagacacatctaaacaaacatcgcaagctgttgtcgcctgtgaatgggttggaaagagtgtgtcgaattggttgaagaacaatcacacttatttgtgaggatttggtccgaaacatattcaccccaaaactcatgacgaagccttaagatctgagggaaaaaacggaaaaggagcggatgtattccctgaaggaggagaaaggaacctatcgtctcacctcatcttccctctcgacaacgattacatcaatagctccgctcaacgtagccgggttgatcccagagtagtattggtacgccctggagaggtactataataagcgagtgcaaggattgagaaacatagcatacgtaatgagtatagatcagccaacggatcggacaatggtatgtgccaagcaacaacagagctctctacctgcatagctgccttagggagctcttcagtaaggtgactgtctgatcagagtatgcgagtttgatagttgatgtgggtgatggaagatgagcgggagaggcaagaaggaataacacgtcggatcgattagttggggtcagagaaccgtcggtctacaccggttactcgagcagaggttacgcttacgacacaggtccgaatgtgaagggatcgttatcttatcagtgatgtcacgtgcagtcacgttccttagctttattgtaacccaaacgtaatctatgggttgtcgttcttttcaccttctccttctcacctcaaatccagtcctttccagaccttacctatttgcaaacagacaagcacgatgagtgaacctaccgcatcaaagattgaggacatagcctctgatgcagagtcagatagggtggatgatgctgccgccgacaccccgtcttctgcggctgatggcgagaaaaagaagagaaagaagaagagcaaaggaaagaaggtcgccgacaagatcaagtatgtgataatatgtcgcgctatgttttgttcttgaaagtctatgccaaagctagtattcactgttttccttcaacttttgttcatgatccttctacagatccgccctccctggaggagaaaaagagattcctggagctatcctgaacagggtgatggaggacgtgaacaaacttcctgaggctgaacgagagcattgtgagtttctctttgactctgcttgtttctctcgtctggttatgtccatcgatcagtgagaacatcattttctgatcaggtgttcttttcttcttacagtgaacgaggacgaagtccgaaaggcacttcaggccatgaagctgatggacatgcttaaaaacgagtctcagggactctccgtgaccggaaagaacaagaaagacctgggcgagcataaggtaccttcaccagaacatttcacaaccctcacattgtccggattcttcttcaaaactgacaatattttttaatagttctggaaaacccaacctgtgcctcagtaccttgagaatgggcaagaacctttgaaggacggccctattgatcgtaggtgttcattctgccttaagcttctatgatcggttcatacttatccttgtgtcgatcacgtcttctctttctagctcctaagcaagtttctgaactcagacaaaccccataccctctacccaaagactttgagtggtccaccgtggacgtggatgatcaaaatcaggtgtgcaaagatgctagttatttgttgagatgtttgttgaaactcaccctacggcttcctgcgactcgacaaaactcagctcaaggaggtatacgatctgttgtctgccaactatgttgaggatgaggacgcgacaatgaggttcaactacagcgccgaattcttagactggttcgtctacacttctgttatactcggcaggttcagctttctcaaataattgcatatttaacgtctcataatcgatgattcaatgtataacctacagggcactcaagcctccaggttgggttgcttcatggcacgttggagttcgagtcagctccaccaagaagttggtcgccttcatctctggaattcctatcaagcttgatgtccggggaaagtcagtagcacgatgagtttctttcttctatcattcttcttgacgccaaagcattccaagagtgttgataccagctcacatttcttcactaatctagccagttcaactcttctgagatcaatttcctttgtgtacacaaaaagctccgatccaaacggctcgcgcccgtgcttatcaaagaggttactaggcgatgcaaccttgaacaggtctggcaggctatctacaccgccggtgttgttttgcctactcccataggaactagtcggttcgtgtctgaccccatataaatgcccgtctcgcaatgattttcttgctgacgtatggttgtacctatgggggaatactcagatacttccatcgaaacctgaatcctcaaaagttgattgccatcaacttcgcaatccttcctcgaaacatgacgatggccagatgtatcaagcactattctgttcctactcagccccagattcccggttggagagagatggaagagaaagatttaagtcaggttggagctttgcttaggagatatttggcgagattccaggtcgcacctgtttatgacgacgatgagttgagacattggttgttaagtggaaagggagtgggcgagaaagtgggagggaagagagacaagcaggtcacctgggcttatgttgttgaggtcagttgccttatccaatttattaccttgcagaagatgttaacctaatccaaacaatcatctgtgaattcttctcaaccaaacaaacctaaacagaaccccgagacgcaccagatcacggatgtgatgtccttctattctctcccctcaaccgtcatcaaatcaactcaatatcccatcctcaatgcggcctacactttctattatgccaccgatgtcgctttcgcttctgcctcttcaccggccgaaggaagctcctctagtgccatcgttagtaggtctgatagaagggacgtactggcggacagactgaaggctctcatgggtgatttgttgacggaggccaagaacgtgggttctccaactgtttacctcttcagtagttacgatcataaaactgacattagttgatgcgcttgattttacccttcctgttcttctcatcaaggccgatttcgatgtggtgaactcgttaaccggtctagataacaactccttcctcgcccaccacaaggtaatccttttctaaccctcttcaagattctctacctctgtttccgtaccatcaagatctgcatatgctgacaatcggagaactggttttttttttctggcttgggcgtggatgataagttcgggccgggtgacggatacctcaactactatctcgtgagtgttctctattcgtttgtactttggttgatgaataaaagggaacgaacaaatctaatctcttcattgacacatatatccttcgccaaatagtacaactggcgaactcccacggtgaccggtggataccctgatgatcgatccggaacgagcgagatcggtgtcgtcatgctttaaacggaactggggcttattttacatcgagatgtgttagaatagaactagcgctagctattttgatcatgttggctatcttacagtcgtaaatcttggatatcttgatgaattgtttatacccttctaaaccaccaaattttcataaccgaaaataatcagagattgattcactcgcgaatacaaagacttattctttgtctttcatgcccccatcttcgcctagatatacaccgcgaccgttgatgccaatccgtctcatatcatacctgatccttgatttacttagacgactgacaacgtgtatctaaataggacgatgctctttgggttaatagtcattgatcattaaccctaactttatctgaagatcccaagcgcgattatgattaccgatgcttggaagtttcgtctacccatccagtatgataactcatctcaacctcccctacaatcaatcgtctccctcctcatcaaaccctcctcatccgcgacatattgtcgacgtctaccttcctgatgatcatgatgttaagccacctcaaggactgatagttttcatccatggtggagcttggcgaacgtcttcttctcaggacccaacgctggatgatcttcctcgagggattctgcctcaacagttcgctttggcgctacctaactatagactaagtgaccaaccggaagataaaatcgaaggaaagaggaaagtacttcatccggatcatgtgttggattgcaggatggcggtagagtggttggtgagaacaggcgcaggggggttgataaatgagaagactaaagaaaacgtctggttgatgggccattctgctggtgctgtgagtgttcattcttgcttggttcctcctgtgcgtcatcctcttgatatcgaatcatattgagagagctgatccttcatcttgaaatttacatagcacatcattgctcatttcttgttagagacaccatcgatagcacccatccccgctgacatccgatctacaatcaagggttttttcttctctgagaccatcacagatgtttgtctctttctccttcctcttttttcgcactcgttcttctcatcactgaagcagtcgtggtttgatcgtccaatggacttttgaaaatgtagatagacgcacttgttgaagaatacccagattatcaagaatggttcataacctccgcctttggaccacctccctacttgacatcatccccttcccacccctcatctccatatgcgctccccccttcctcctcgctccaagaatacagaataatgatatctcattcgaaagccgacacacttgtctcgacttcacagccaatagccctggcgagcaggttggcagcattgggattgaaagtagaagtattcactgatgaggatataggagaacatgatgaagttttgaaggacgctaggtttgggcaaagggttagacaatgggtcggagtggatgtctgaagagtttccttccttccaattcattggatacagcataccgctacggccatctttatcttgtcatgctagaattcttatcctcttcgaacgggaatgtttttgtagaagcgagattacgaggtactttcttggatttttatttaataccgtggggtttcagtcgcgaagatttcctttcatcctgtccgatttctctgaatactctcttatcctagaagaagctgtacttgaatgaaatggtatcactatcttttcagtcctccaaaaacagcaccaccaccaccacccatcgttggctgattcgggtatccatattgtccttgctggggttgttgttggtacgattgatatccttgtttttgttgattatattggttgtgcccgccaccgcctccgctgtatcctgggtttgaggacgacaaagatggcggctggggtttggtgatgtgacctgcttctctagctttccaagcttttttgatgtggggcgcgaatttgaagagctaatatgtttccaacacaagaacacaaatgaccggagacgtcaagtatggagataagacttgttgtgagagatcgggacaacagagaggtttcttcttttgatgatagaagaagacagggaacgaacctcttcagcctcaaccccgtccatgatagaaactagaaccttctgaacgatagacgcatggtttccatgaatcttatcatcccgaactctcatgatcgaccaagtttgacgatcttctagccaagtgacttcgacgacggcatcgtcgtattgaatcttgctttctttcatcctgttgtcatatcaaaaaggaggatcagaaacgtatcgtgcgcgacggttgattcgatcaaggcaagaagagaaagactcacctctcccactcgtcaggctcaacaaccataccgtcgaagaattcataccggtcatctcccaaccattgatacagcttaaatataggcatggcctcaaagtctggttgacttggattcgcatctagtgctggaaatcgaagctctagtttgaagtctatcgaattttcagacgctggtttccacttcaagctaatgtgaagaaacgagaagatgggagaagggaggacggatatcagagtgtgcaaaaacgtgcgaagtgcgaggacaaagaacgaaagagaacaaacatattcggatcagtccccacagtgtatccactatcacaagctgtgaagatcaagccgtcatgaccgtgttggagtttgggtatatccaccttgaagacatcttccacaccatatgctctgttcattttcttacacacaatctcaaatggtttgttcgatgaaggcggaagtttgtccaatggacctattacccatttttggagacgctttgatttatagcacagatgaagacgaacatatgaacagaaagagttcgggtcaggatttgagttgataaacaatgacggatagcgaaaacgcacaccgtaacgggacataagactcttctttagaagacttattccagagaaaaccaagcagtcgaatgcatatagtcgaagagtttcctagagaaggttccgagtcggtagacaaccggagaagacaaggcaaaaagcgaagacacggaacaattgactgtcagatacgttctcggaaattaaaagaaaacaagaggataaggcagtaaatcatgcacaaacctttccagtttgagcatcaacatccaacacaagctctccgtccagcaaggtcttctccagagggcgtcgagcaggatcctccccgttgggaaagacaagaccttccacttgacgaaattcctcttttcggtcaatctgttatagcacaggagaaataaaaacgcaaggcgtacgatgcaaggtgatttcggggttaatctgacagtaagtgacttgtcaaggtgagccggaagaactatactcacaagaaacacatcctgagctccttttattttgttccacgcaattaacactagcacccgaactccatccgatttttcgcagacccagaagctgcagatgtcaaataaattctcaggataagacaacaaatggggaatgcagtaggtgagaggactaaacgtactcttcttgttcaagcaggcttaacgatgcttgagtaaaactgacgggttgactaccaggaaatctggtcgtttgagaaaacaacatatcaaggtagtaagctcttctctactttcaatagattatcctgctatcacgatcgaaagaaggaaagaaccataatcaaagatagtgcaaccactcactttggaattttgaggccacaaaggtccatgacatgttcgttgagaaacgcggtttgttccggtgtgaccagtttaccaggaatttctggaatcctggttgtacttgctggcatggaaaactagtgatgactttatatatctgtataaatatttcttctctattctgtctgagaatgtattgcgaaccaagagcgataggaaggaaacaaaggtgaaagtctaaaggagaacgacttgaataaagtattagcggttccagtcacagccggccatgtccgctgtgtgaagaatcattacgaaaggttgtaattcaaaactcaagatataatagagataattgtagttcaagtatgaattccggttagtcaccaatcaacaatcaccttaccttctgttctcgttttacattccaacatcaagcaaactacaggccatcagatagatgtctggggatacactcgaacaggccgtcctttcgtaagaagtccatggtttactagaagcttatcaattgctttcttacaatctcgcattcttcatctctatcattctagaggagctctctttcgagatccttcggcagctctagacgagtacagagtagaagatcgagaaacgccctctcccgaacccaataccgatgacgagcttggttccgacctggacgatgatgtcggtggtgtcccgtctttagatactccctcctactccgtaggtggtggctcatccaaaaagaccggtccaaagggcgtcatcagagatcagcgcgaagctatgcaacggaataggttcattcagcttcggaaccgtctagaagtaaatgagcgaatggaacgaaaggcgctcttgggtccaacatgggaagaagaagtcagatcgagggaggaggatcaggctgctatggaggatggggatcaagacggagatgtcgttgcgagatggagggatcgcaggctggcagagttgagaaacaagccgaacgaacggcagagaggatttcttagagaggtcggaatggatggatatctgagtgctgtagaaagtggatctagttgggttatcgtccttgtatacgagaaggtgagttccctatcagttgtgatgtctcttccatatcctcgctttctgcatatgtgcttaattcttgtgacgcctctcgaatctaccctatgtatcgtaattagaatcaaacaaacacgcctccatacctcattccaaccttgcagaagcttgcttcagccaactctccaccgacacatcacttccttctagcctcagcccgaaacctatccttctcgcttctctcgaacggcgaacccgaccgagatgtattaccaaccatgctcgtatataggccttccttagacggcaatcaggatgcggagctagctcatagttggatacgggtcgatctcatgttgaacaaggacaatggtggagagggagttgaaagacttttgctaaagtaagtttataaactgctccactgccttgtgatcaggtcgagtatggagacattgacatctcatgaatcacgcgacgctcttctttgatgcctttgtagcaatggaatcattcctcgtcagacatcagaagataatgaggacgaagacgacgacgagctttcagacgacagcaaatagtgatagaaactaagaagaacaacataccatgttcctgcctcatacattcgaagcctactttggtacctctctaaggattacaaacgttgttgacctctcgctgctgctttccacttctcgtgcagaccacagatctctgaattcatactaatccagcctctcgaaggggtttgaaaatcagcctcacagacaacagctactgtttcaacagagcttttagtactcttattgctggtcccggttgtttgttgttcctgaaaagaattctctccgtgctttgagttcctggtagccgattgactcacttgtgttcaagtttgttttctctgatgctcgtcttgttgctgctcaatactcatacatatacacttattcacaatcattatcgccactgtccttgtccttaactcatcgttgttccgatacagaatcaactcacatgaaccaagatgaggctcgcaaaggtgctcgacaacgcctcgctcgtcgtctgctcgttaagggcgtctcctccccttcggattcaccttcggattctcaaaacaaccgaggggcccgtcgagcttcagtagtaatcgtcgatgagaataggagtcgaaaatcaaccgacttagaagggatcgataggaccttcaaagatctttgtacaccagagagaaagagtgcagaaggccgattggagagagaaagggtgcaagtgggagaattggttgttgtgttgacgccgcctgaaggtcggttcctgtccctatcacaagttttgacttgaatagacgcaaagctatcctttcctcctcagatcagaggtataactgatcaacgtgcaatccgaaatcaacagaaactcgacagccgtcatcaacgctttttccatctgtttccggtccttcacccacattctcatttcgaccaaggaaacgttcgaccctacggtcatcctttactcgatctgactcatccttctccgtctctagtcgaactcgaacgtccggttcagactcatcccggtcgattcagcgctcggcttcatatcatcagcaacatcaaacaggtcaccaggctgacgacgaagacgcagactacaacttcccagccgatgatgctcgagacgatctgtggaacgcttcgccgacaccgttttcgacacccagtcaagaactgccgtctaacccattcggcttcgattcgacttgggtacacacgtcagatgaggcaccgcgcctggaaaacctcgaacctgctctgaatgtatccggtgttgaagtagctttgcattctcaaactgagattcactcagacgaagggcacgaacagcagcaggtaagatcacagtttgtgaccactccgccacccgatgcccctcttccaactcttccgacctctgctatttcaacggatgttggatgctcacctgaagcttccttgagcgggaaaaaaagcgagaagtttgagtttgcgtcagcagataaacttactatgccagcctccataccggaagaggatggtcctaaccacgaaacatctgttgaatctcccgaaaagccatcttcatccgttcaaatcttggacgattcgtcatccctggtggacacgaacttgatggagaacgatgtatgtataatctcgattgagaattccgatctctctccaccaaagatgaaagacgataagaaggagaagggaagcatgggaaaaacgttgaagacctttcggtcattcaccaagcttttgaagcttgtcgggtctgatggaaagaagaatacagttgccaggcaggatgcaccggctcatcctattcaggcatcatctacttcaagtgatcatacaattcctttagaaggagaccttccagtaaccgatccaggtgctcatgctttgtcttgcgcatcagatcacgagctgcttcctcccgtcatgtcacgactatcccgatccgactcaattgattttgtggaggacgacaatgatccaaatcagaccccaatcaagaaatcagtagtccgaaagctcagtctcgcatcactatctaacgtattgcgatcgtcaaatcgaaaaaagagcctagaatctatgcgcggcacgcggtcttcgttttcttccgatgtgccaaagtcttctttgatcgaaaaagttcctgctgttcctccgattccaacttgggttcgaccctcagaaggagtcgatagcccaggaaaatcttcctcctctcaagtacaaacacaaccatcctcccaacatccgacatcgacatcaacaacaacgccgatacagaacatgacgaccactgaaacatccgcgccaacatcggtctcttacgagcaccaagcgttggaacggccttctttcgctgtggaagctgcttgctgggctcttgcaatggtgtacaccgagactccttcagcatgtcctacgaaggccacatttcctgatatcaacattcaggacaaggtggagatagagttggagcagaacgaaaagaacgaagtcgggaaagatgtcgacaatacagatcagcagctgtttgagtcgaacagagctcgggctgaactagacgaagagagtgaactttcattgaagcaagagggggcgcaagatacggaaagggaaagggaaatctcaatcgataccgcaaacagtacgccagatatagataccgatactgatactgatacgggggatgaaggatttttcgacgctgaagagggagaacttgaccaggatgtgaatgagattggtaatggacaagaagaggaacgcagcgaagacgatccatcccatgtgatcattgaagtaagtgtttttcgtttctaacatcaagaacaattgcctgacttgaatttatgttcgcctcgttctacaactgttaggtattgcgagctcattctggctcatccgtatcggcgtccgtctctaccgtctcgtcggtttcatctgctctgtctaccacgtctagatcgacctcattatcgacaccctccccaacgccatacataacagacaccatcatctttagctcgctgtcagaatcaattcgaaactcatcggaagctcatgtcactgccagtggactcaagaatcttgagacaggagaaaaagcgggcgacaaatcaatcgcagagaatggagctttgtcacatgctgagaagtggggcgtaaggtttgaatctctgaattttgaagatttagagctggacttgagcttctagagcgagtacaggagcagcttccagactcacatcgcggacatttcaccacactcctcttctcatttcttcttcagtgtgattctatctgttatatattccaggagaggagatgtttgcgctgcctcatagtcttgatttcattctgcttgtccttctgtctacttcctattcccacaagttagcgactgtcctctttggttggtacaatttctcttggagtctcgaatccgtcttcctcttcttcgtgtcttcatcaaataccgttttggctagcttatccgagatcaatcttgtgacacgtctcctttccttgttcttatgcggtaccaatacattcacatactccttaattctctgacttttacccaatctatccaccgttcgccgtgtctgtttctttgtttttattgatacttgtagtaaaccatacagcgtttgataccctcgtatatattctctcacagtccgattttggaaagaaaatgcaatataatattctcaaagaaaaccccatcgacaagacctgatcagtcattcccgaatcttaacccatcctaacactctctaggtctcccaatctcctgtctacttctctctttaattcttcagccaacgatttgacctgttcagatttgcttgtggatgattcacgaagcacgacgttaaggatgttgtaagggacataagtagcgtttgcttgtttaggaaggacgtcgattgatggagcctgaatatacgaacgtggtgtgcttgggtcagcaacaggatcaaagaaaagaacatgatgaagagaaagtataaatatatcctatctaaaaagacgactgactcttctgatgagagcgatggaatgctcgagggcttccttgagcaagtcatatgtcagatacgactggatcaagcgctcagggtcgttcacctagttaagaaaagccagaatttggaggaaagatgaagatgggtcagacgatcgatcatacggaggacaagcgaaaaagagcgcagactcaccgaaaagaattcaaccaagaaactcggaatagggaagaatctatcacaatccaatagcttttcgagcacagcctgtctatacttgaagaatgtggcaggaccatcgtgtcgttcaagcatgattcgaaggtactgggatgctcgaccagagatcggtccatctagcgaggttaccgttggtgagtcgataagccaatccagatggtcaagagattcactgaggatgacagacaattatatcgttagaaatagtccgaaatgagataatgaccaaaagagagtgaagaatggactgacggaatgcccaaaactcgcgcgtgagcagccgaatgagcggcctcgaccgtcttgatagccagccgttcgaaaactgtgtaacgaaaaagtaaagaatagctcagcatacacgtcagatacctagaaaaagtctactgcgaaagttcacttactaccagtcaggtctacttgcaactggcgcgcgtgcaagaaagctgtatcaaacattccagcctgaacgaacaatgcgatcgcatcttccgcagccaaggtatctacaccagcttttcgcgtgagttcatgtctcaaggagtggatcaaagcaaataggatagaaacgacacctactcgattggaatgaatcagggaaacgctcggccaaaagcaaagttgacagcaccaagttgtactctcgtcgaatatcctccagttccacaatctcaacgtctttcgttcgagcagacggagagaatgtttcttccggaatataagaagtgagcttccttcttttacgtctctgtgtttttttttgtgaagaaaaacaacccacacaacacataagtctggcaaaacgagtggcgtatcaaagacaatgaggaataggcatactttgttaccagaatcagccgacagaggaacagctagccaagcctgcttctggtcaactaacgatagcgcattgatagcgagaagataagatttggcccgtcttggtccgatgtcaacgaatcgaccgttgatctctccaaatcgacgtccctgttggtacatagcagaagcagctgtttgggataagcagggagaagggaaatcaattttggtctgcgcaacaacgagtgggatcgaaaaagaagcaacttacctgctcgataatcgcctctgcggatatgccaagagtataacactaacagataatttgggaacaccaacgggtctgaatgtctagctttgaaagccaatgttctctctacgatatcctctagtccgacaaaggtaaagtgagtgagacgatcgacctcattggcgtgacacatgaccgtcaccaagtggctgacagcatcactgatcctgttacgagcagggaaaggaggaagtctgagtatgattcgctacaaacacacgcaaaagatcagaatgctcggatatgttacttacgattctcgataaggcgtggtcgtcaagatcatatgagcatcctcaaacctacccaaagcgactgtgctcttgaaaagctttgaccagaagtccagagtgtttttcggacgtgacgaggagggtttcactgagtcagaatgagtagcttcgatggcgagattggcgaatttaacgatagaagcatcgagagaggtagcttcgtaaaacaagataacgagcctatagaattcgacgaggtcgacaggctggctgattttggagggaagcaaagcggaaagggtcggggagacagagattgccggacggccatctgtcgagacagaacgtacacacacatatagaagtgaacggtgcacataaacaaatcaatatcacgatcgtcgaagagtgcgccatctagatagattttggtccacgaaagaactcaccaaaagcgcccgaaagttgttcaaacaaggcttcagattcttcaacctgacccagtactaatctcgccttcgcctccacgaaagccaaaccttcgtccttcatgaacctctctccaaattcgaccgcatgttcaggatgaccagcctccaacaacgccaatgccaactttccgtcttgcggctgaaccgcccacatgttctctcgttcggcgggacagaaaggcaaagaagtggtctggaggaaggaagccgtacatgatgagatggatgtcaaggtcgatgttgaaggcagagcgatcgacgtcgggacggatcgcagtaatgccaacaagagtgaagggagaggcagagtgtttgatgaagagtgagaagctaggcttgacgaaggatggttgacgtgtaatgaatcgaatctttcgagtagaccaagatctccgccgaaactgtcgtttgcccccgagttatcaagggagatcgttcgtgataaccatcggagagccgacagcttttggtaaactcctaatgtcgaaaggatcgccaaaggaagcgagtctctcagctgatcttcaccttccttctcgacctctcgatcagatgtgacctggtcgagaaccaaaatgagccctatcaacaagttgaataccaaactgaacctccattccaaggacactcgaagactttcgtctaagaaagcaatacccagtggagatagtgctagtccggactcgaccccgttttccagctctcttacttgattaagagcgagagtcaccagtgttgtgatatctctgttttctcctaaacctgaatctaaaaagagtgaggaaatctctctagatgtgctagacgacatatcgtctgaaatataagaagcgagcttggcctcgaatatgtctaaacaagtatcctcgatgggacagtttacaccagtcgcgaccagttgatcaaactcgccttccaacccgatcttagctgaaggaggcaatcgttcgaccacagaccatccgatctttgagaacgcgacgacatcatcctcgtctgtggccccatttaggtgacctcctccattaacgatcctcaacgccaagctctctccctttccaccttctacaggcaagaccaacccatcccgctcgatgacgacgacgccttcttcttctgccgtgtttccggattcgtctcctcctgaagctcccatcttgacgatcccgaccccccatctggcatctctctctccttctacgactcgggccaagaagccaagccattcgatctttagttttcgaatgtaatccgcgtgcatgatctcccccgtttgaggagacacaagaggagcaagatgagaaccgacgatggaatctactctggaagagagggagggataactctgagaaagcgcggcgttgtgagtggttgatggaagagactggatcgtctggatgtacgactcgagcgcgctttgtagagacgttggggcgaatcgggaaggagcaaatagatggttgataaagatctccgcgacggactctctagtaagcgctctgtcggaggaaccataagcaccgacagaagagaggagatcttcaaagtagtccaccgtgaagccagtgttgggttcgaccacgtccctgagagtttcccatcctccattcgaaccctcaatatcctcccagtctgactcggacgaacctgtggatgaagagagtaaaccatcgagggacgaggattggatgacggttctgcctttgagatcccaaacggcccagatagtgtcctttcgagatcgcgcgccggacttgccaccaagcaagacttcaaagtccctcaactcaacaccaccaccggcgacggcgcttcctaatgagcctccctcaaaagaagacggcggggaggctattcgaacacctgagaatgaaggttccgagatggttcccttatgcgtgtcgacaacgacccgataagtgacaaaccggccgggcgatatgaacgcgttaccagcggccgagctgggtgaggaggatgaagaaatggtggtgcttgagggaggaaggtagaccactagatagaaggttgacttccaagtgtttgaggagacgatttccatctcgttgttgtgttggaaggatgaagatacaggcgaagaagaggaagacgtaggttttcgagagacgactttgatgaacgatctaggaccttcggtaccgtttccgccttctgtgatcaatcccccgctttcggctccaacaccattggcgaccgagaggtctactgttcgtgcgcaaaccccggtaagaacattccagattctgagctttcggtcacgagatagcgagaaggtaaggttgagagtgtcctcctgagaataagacgagagcgcgatgatctcgtttggctggaggtgggaggcgccggacggccgagaagagaaggaaggaagaagcgatgtgatgctggacaggtacgacgttggtttcaactcagtcgatgtccattcgtctgttcaagtaaaggttactccatgttggacatcagcacgagccaggtctgaaaaggccgacaggttgatcagaccaatgccatcaagcaagaaagaagaacaaaccatcgtctctctcaattttgagtattgccccctcgctcagaccaaccatgcctacattctcatcgactgcccagaatacgcctggctgccttcccctaagccagtcggttagatcgatctcttcaaccgcgccatcccttctcaaagcctcatcccatttgagtccggacgaggggagggccaacctgatgagaacgcctcttttcgttagcgccagcacccagagaaccgaacccgctggatgagagaacaagacaggagagctgtgaagaggttccgggaaatgcaatcggatcggctgcttcagacggacatgggacggagacgagattgaaagagagagggacgaaagggagagtgtgagtccgttgttgattgttcggagaaggatattggaagagggagaggaggtggtatagatcgcatgagacggatgatgagggcttgggaatgtttcttgtgggtatgtcaaccttgtaggaacaggataagaaagaggtggtgatgtcggaggggtgggaatatgaatcggaaagtgcgacatcttgccgggctggaaagtagagagaaagagggcgagagattgagttgagtttgagaacagcgggcaaacaaaacacaggtcagcagatgctttctcagagccagttaccactacatctagccaagttctggcttctccctctcactctcactctcgctttctcacctgaatcgttccggaatggaagccgtttgggaaaagagagcattccattttgtaggtgtgttgaacgaagggcgaggaaacgaaaaccgctgatggttacaagattacgtaagtgaaatcgttacatgtcaggtgtcaggaatacgggttgggtatcacgtgatctgatacgtgggttacccctacaggctattcgttccctccatcccttatgcctcttcgcccattttccatcatgctctagtttgcatggttcatgcttcatctttttagttctcgtgatctcgagcctctctaggctcgtcatatgtatatctttagtggcagaccaaatgcgcgaggggtcctgatataaaacggggacgccctcgcgccttctcggataagagttttcctcaagctgagattcttgttgaaacctcttatccaaagtatattgttaacagtttggtctgcttcagatatattaatcgccagagcctaagtgtcaccccgcgaaccaagtgattacacttggttaccttcttaacaaccgagccttacatcagggatgtgacctgagtgctacacctcggtaaccttcttttggttctgccgcttctcctacttcggtattccttatgctctctcattacatcaacatgcaggtatatgaccttccagcgcaggtgcttctagcaccttctatgatctgttctcttatgcataatcgttggagtnnnnnnnnnnaacgcaaaagctgaccttctttgtccaatatttctactgatcaaacgaacttatattcgtaactatcgaattccttagaccgagataccaatgtgctaattgcccttccgaccctttggcttataaccttgtgagtggattatcacgtttttgtctgcgtatatcttttctgaataccttcctgaataccttcctgaatccgtcttgtcatagtgcgcgacgtgcgagagaagatcttatcttattcatgatcctatgcatgtgtaagcaatcagatttgactccatatcttcttttgttaatttgttataatccattaggattaaagaaatgctcatcagaatcaacccttcacaatcacacactgaaagcttcatccgattcgacagaccggtcgacatccctgtgaagtcccttctcccccttctccccgtattatacaagaccccggcgggaagttcggttgatcctaatcagcctgcacctcctgaaggctactccgaggccgcgttaaagaacagaaacttgaataaccctacgagtccgttcaatttccgtcttttctattcttctcgaaaacgatgagacaaacccttcctcttgtttcttggctatatatgtgtatgcacatggcatacagtgtatctcaaccacctctaccaccccagcactgtgtgtgatctatgcatggtaagcatctcttcttcctcatggtgtttgcctctcctgtgatatcatcatgcagggtatcttacgtttacccgtaaaactcatcattcaacattgatttgaaaaacagaccccaatctctggaaaatggtatcggtgtgcagtctgcgaagcttcgtttgatctatgtgctgactgtcatggctcggccaaccacgacaaaggtgtgtatctccatccgtcactggctctgcaagatatctttcgtggtttctcaccttctgtgcacaacttgtgaattcggggcggtggcagatcatgtcttcgttgtgttcaaatcgaatgtggacatgtctgcttttaggtgagttttcctacgaatatatccgggctctcgttgcttcttcttctcttctctacagccaatacttcaaatctgaatgaacaatctttttttttgctcatcttttggtagagatcttacggcgctttcactttcaacctcccgtccgttcatatcccagcaaatttatttttctgatggaatatcctctttacgttcttagggttacactttgcatttacttccattcatcttattcctctctgcttcctagtatctgatccttgatggacgttatttgtacaatttcttcttacgctgtacaccattatctcttgtctgccatgctcttcataatccaagtactgttattctagaactccgcacacacgctgaatgatatacgacgaattgattagtaatgaccacgagttactaccgtcttcggccgaaacctgcgtcggcgtttaccgtcgtttttcttcttttcattcctccttctgaacacatcataccctaccgactaactacttctcctcctcccccgattatcgttctatcgatatcgctatggcaacgtcaactaccaccccaaatagttcagcagaactccctccagtgtccacgctggagggattcttatgtggaggtctagctgctgtgacggctgttaccttctgttagctgtctctcaacacttctctctttcgacgcttcttgtcttctgatcttttcgtaatcgttctttcttctctcttttgctccattccctcttcatacagctaacatcccagaggtgtgcaaaactcgacttcagctccaaggtgagctaggaaagatgactgagaaggtatacagcagcgtgtttgatgttgcaaggaagacttggaagaatgaaggaatcagagggttgcaaagaggtctgggaacggctgtaggtgtttcttttcgttgttctcaagacttgacgttcttggttcaaatctgatgtattttctttgagaactgaacagtacggctaccaggtaatacaggttcttatctcttagaaaagcagtcagtccggttaatcaactccatttttcgatttgaataggtccttttgaacggatctcgtctagggttctatgaaccaatccgtcgatctgcaatgaagcttgtgggtaagagcccggatgatcagaactttgctgtagcagtagctgcaggtgctggaagtggttgtatcggaggttggtcttcttcttttccagctatcttatctctgggcatgtactgaaaattcaccccttcagcctcccttggaaatcctctctaccttgtcaaggctcgaatgcaggtcaggccctttcaactcgctgaaccctgatgttgatatatttgtttacgcatccacgttcgtaaccaaataggcatactctcctttccttccagtcggcgcacaacataattacaagtccagtttcgatgccttccggcaaattcataaagcagagggtttccgaggaatgtttcggtatgttctgtctaacctgcaagagctaatgaggagattaagtatttgtgaggtaattctaaatatctgttgtctgaatccgctgcctctgacgtggaaacaaacaggggtatagacgcagcgattctgcggacgggaatgggaagctcggtaaggatcctcgattctttttcttcacttctgatcacttattgactccgcctagaatcatttgctaatcaaacgtcgctgtataggtgcaacttccttcatatttctttgccaagaacttgctgacagaaaacggattgacctcaccgactagtttctggacgtatctcctcagcagtagtttctctggaatttgtgtttgtgtaagtcctgactgcaccgctagccttctcgcgttatctgctgtattgaagagtaatggcaaacatgagtatacgcgtattcactctctctctttgtttcttctatcttgaaaccagattgtgatgcaacccgccgacactgtcctgacacggatgtataaccgtgcgttctgtcaatctatcttgactgttgacagtcgaatgcagtcattctgaaacccactaatgccaattaacgtacactttgcttctgccgaccttgcgcgtctttagagcccacggaggttcttcctaacgggcgctcgaaaggactgctctacaagagccctatcgactgcatgatccagactacaaagtccgagggcttcttcggactgtacaagggaagcaccgctcacttcttgagaattgccccgcatactgtcattactctaggtttgtattgagtctgttcttcttgttctgttcatagccgttactagtgctgacaatttatggtccgccctccaattgcatactacacagtcgccaacgaggtcagtcaatcaccgatttccttgcgctgttaagagagtagcccggaacaatacgtatctgatttcttctgtcttgtcttttaacacccaagctcatcgtcaaccaatatcagcagtacaaggctcgtcatgcagctgtcgaagtttagtttttctacacaaaaatgtatcatgtcaatttgagagccaacagaaagcaaagtttcgtgtacctgtctacctagcagtattgactcgcggacaagatggaaacctctccgctttcgcttactaatacttgctgtaccttgcatcgcacttaccctctccattaagaactcctttcccgaacgatcacgcttgaagaggtactatccagcagaacgggccgtacctcgatcttcataggttcgaacgggttcctaacataaattcgtccgacggtcctgtcttcctttgtgccttgaaactccagcgattatagtggctctgctctcgttcaaaccctcgacctgaataactctaataccgtcctgattcaccaaagaaatctcgttcctgtccgatggacgtgggcgcattctttccatgcatcggaaacagaatcgttgaagtgtataaaaccctgagaggatgtcgatcttcggatgtatctattcttcttcccccattctgacctcctctttcccaacacattcttttgttgatttgttcttgattgaaactagaagaacaccacagccccttcttacattctttcttgactcgtttactttcgttttctccttgaccggatcgaccacaatgtcttttgccaacaacacgagcggactagtgaaggaactgcagtgtaagccttagctttcccctcttttcacttccagttttgtctttttctctctgttcttggctcttttctcaaatttcgacagtctttctttctatccttcagctatgaaagaggtaggactccagaagtcatcgaatctgattcggccgactcctcgagggcccaaccgatccgctcgatcgttctccatttcatcctcggtctcgtcctcggtctcatcctcgacctcgtcctcttcatcttcctcctctaccaattcatcccgctccgcattcactttccttcggagcccaccggtcttgaactcgacgccgattcctatcaggctgagggactcgcctttgcttttagatcccacctcgccattcttcaggaggtcttccatgccatcgtcgctgacgaagcaggctgagactggagaagaaacaaaggtcaggaagcctatgcaaccaatcaagttccagagaaggtttcccaaccttccccgacctcagtagttgtatgatgaattctctatctatccctgtttttattcgttatatttcctagggtttatggcctccactcttacttctttgggttcaagttcagggcgtttctttcttttcctgggtctacacatctatccctcaatctcttctattccttttgggttctttagggacattttttttctttaacgaacatcccttttaaatccactattttccgtctttatttcctgggcatatatttcatccatccatcttctcaatctacagcacatctcattccttgatgatttaaaatcaaacattaatttatattgggtttacggttgtcctttccttattaactcttgacaagcgaatctagttccttcctcttccctcccttttcttctcttctttgggcttcatctcgtcaggacatccacaccgttcggagtgataagcacctgatgctcgtactgagcggatcttgcgccagccttttcaagaagcgattaaaagagtatcagttagcatccggccctgttccagacgatgaagacaagatcgagacaaaccttagtaacaacggtccaaccatcgtcccacatgtgacctccaccgatatcaccgtctttgtctataaagatttgctcgatcgaaggctcgatcgtaaagcagtctccgggctgcatgatatcttgttctgtgtttctgttatgtagtacccaaggcgggtggtgaaagactctagatattccgtgacttgtattcatacgaaaaggaaaaacaacaacaacaacgacaatagatggcatacagcgaacggcgagttagttgatggaagtgaaaaggggaagatgaaaagagaaggaagcgttcttacccggaaaagagatcagatactaggaagccttggctctctgtgaatgattctatagcttctccaatctggctgtacggtacttctggtccgcagactgagattcccttttcgagcgcttccctcgctacttcacatagctctcttccttccgaatcctgccatgtatatatcaaattaaattgtgtacaaacgtagactcattcagcccgagagcaacacaatagaaataacagccagacaaagagaggagactgactaaatcaggtagcatgaacgttgcgcttgtgtctccatggtatccatcgagataaagtgtgatgtcgagattgactagatcatgtgagtctagtggtcgactataggtaaggttggtttgcagtagtgattagtcagtctgtattttgactttgaacaaacaaatgaactgatagagaagagattcactcgtcagggatgccgtgagcaatgacctgatccaaagagcgaaaaagtaagatcttgattagttggaagcagggatacgaagcgcattaaaagtctgggatgggacggacgagctcacgttgttgacgcttgaacagagtgatttagggaaggcagaatatcccaatggcgaaggatatgctcctttagagattataagttcgtgtatgcgcttgtctatctcggcggttgtgactcctggctgggtagacgaaaaagagaacgaaacgtgagcctctggcgacgtctagcccagaatgacgtaccttaccttgaccatctcgccagcctgtttgagaacatctcttgccaatgcagcagcctttctcactttgagctcttcttccgttcctagatcgatccgaccaccttctgggataaggctgactggttcgagtggagataagccggtgtgaattgaccagaaatctctgggaacataatgtgggatgggtatatgcgcgggaacaggaaacggttgtgggaacgaagtaatctgttctttcgggggatatagcgggatgaacctgccaaactgagagctaggtatctgtcttgtcaatctcgtcaatgtcgctctcatcgattataacagcagtgaaaggaaggatgatggaggaacgagatgaagttgacagggtggaggtgacaggaaaaagacgagcgtaaccactgtggccagaataacggcgggcacgtggtttcggattaactattctgtaaccaagggtctagacctttaatttacgctccaattcttttgtgctttttttctttacctgcactttcgtttctcgttcttgatctcgtccgacttcatctttatttggtgtttcctcttgttcttggttttgcgttctttcttttcttttgggtttctcttttctccttcactcacctcctctgctggttcttcctctctcatatacacgcttgagaaggaaagaacaacaacaacaaacatacatcctttctgccgcttgtctctatctttttttcttccttctttctatatatctttctttctttcttctttctatatatctttctttctttcttgttcgcttctatcttgttcgcttccacagtcagctcgcttctatcaacatggagcgttcgccatcttccgacgttataccagctccaggtcaggtctccttctttccgtcgacaactgccagaccttctttcgtgcctcattcgtccccgaggtcatccacctcgtctttctcggcctcccctccgatccctggtctggcagagcttaacctgaactcggacgacactgcctcgacatcatcctctccatccaaaaacgctataccggccgatccatcggatccaaactttgaattcggagaagcggtattccatcaaaggcgagcggcctggcttgctctgcctgcctcacggaacgaaagaaaagagcaaaaaagccccggtcggctgggtctgctggaagaagtgttggacgagctcccagagggaaacattcccgatgatatatggaagggaggtctcgaaggagtctggaggggcttgattggaggtaggcgtgagtctttccaatccttgaacttctcttcttctccttttgattgtgctcgtgcgtgtcttgaacaatgtgtcgttctggaactctcacttctaaaaggcctagcaaatcctatgccgctcccaacggtcatcaaggtatgctttcccgtttttccttggtcatctctcgtttgtgttgaccgctcaaaaagttcccccctcctccttcatccaggttctcaaagcaggctggatcaaggatgggacatggccaaccaactatatcactggcccttcgtcctctcctccgttgatccctccgctttcagctgttgaacaacctatcatccccccaaactttgcccccatccccgacgctctctctccagaatccaaccaaaattctggcctcgttactgattgacaaataagccttagtccagtaagacaaagtatctctcctcatcgttcggacgaccaagcacagggtggatcttcgacctccatatcaagtacttcgactttcccggcttccacagttttacttggttccactctcaaataagactcttatccaatttaattaaatctctgccctcctctttctcgtctctctgctcttcaattcttcataaaataacataaactcgtagtgttattttgatcatctggcgctctagaatctctaatcttcaacaatgtatcgataactctcctctttcttcctctttttctatacacatccatattcgactctgcatcggattgcacggtctccgtctctttaccttatcatatatgagttctagaatcttgtctcatctcgttttcaccccaattcctttttggctattccaatttcgttgctattgattgtgctattgtcgagatattgagtcgttaagaagaggagaagagagaagtaaagggaaaggcaaagcaatcaaaaaaagggcgtcgtgctgacgtgttttgtctggagactttctctttttcagtctacctgtttttaaagccctttgctctttgcttttcctttatcggttgctcgcttcgcttgtctctattgagcaacgcacatcatcccactccatcctaatgcatttttacagtgatgatcatctcgaacgaaatagagatggatccggatgagaacaaagaaggagagagaaaaaacgacgtttgatcatacaagttttcgaccttccctctcgccggctcgctgacttcccttctttctcccccctctatccctctcgtcttgctacgttgcctcccagatgacttatttagtcatgtactgatccaacaagatctgttttctcctatccaataagactttgtccatctgactcttcgtcaacaacgtcggtcgttctagatccttttggttgaggatacctatccctatgaaacccactcctgctgctccggttgtatttgcgctcgtgccatgcatgaggctagcactggtgtcggtcggagattcggaatccggatcggtcaacttgagttttttggaggactcatcctcggtcggctcctcctcagaaacagcctgggcctgcccgtcatcttcctctgccgatcgttttgatgggccggtcgtcggtgctgttgttgttgctgctgttgacgatgatggttggacaggggttatacgagggaaaggagggatggattcagttgatgcccccaataggtttgataccctctcgaaccctgctatccaatctgttttttttttttttggtcgttcatccatcaagaacaaacaaacacgtacgcatatattacgcgataagcaaagaaaacgtaggtgatcgacttgaacgagatagaaagaaccaaagaacataccactctcttctcgttctctctcggcatcgaggacggtaccgtccgtctcgtctagatctccataatactccggtccttggttcctgtatcgtctaaagagttcggccctttgagactcgtctgtctctgccaccgctatcgaaacgaaaggagaagaaggggagagagtgaagagagaatattagacgtcaggttccaaagatagagggtgcatttcttcacgcgtctggtcgacgaaccttttttcgagaagagttctttcactccgggcaattcctttgctcgaccgaaatatctggaggaccgatccaaaagaatgtcaacagatggccttcactttggcttgaatttctagaagaggacggaagaaaaggacatacttgtaacccctggtcccggggacttcctttccatcctcatcaaccatagcggtacttcgtttatagtttgctccaccaagactgacgatctgtcgctcatagtgacccttttctcgcatgagcttattaatctcgtcgttcaagtctctgatttcataatcagttaatccggctagatatcggttcggcagtttgtgaaagggggggaagaagaaacaagaagaagacgatattccattcctcctgtcagaccatgattctatgcagactgaccgatggaaataaagtccttcgaggaggaaaagaaaagtcaagaggagatgttaaaaagggaggacaaaccatcctgaatctttgaaaccttccgactgatctccctcaagatctctcctctgtaccgctcacaatccttcagattatcaaccgagctcgccaatcttggtcgtctccctccctttggtctggcgaacccgagctcgacctgttgggcctctcggaatcgatagagcatcgatctggtttcatccgaaaggatgtaagaaagaaaagagggaggaaaaggacgcgttcagcctcaattgacttctttctggttcttggttgagattcagccagagccttcatcaaacacgccttctcatccattcgtcttcgtaaaccatacatttcaactgtagctgttcaagaaagaatctccgaccgaacactcatacagtcgatcttcagaagaccccttctccaactccagctcgaccgacgcgagatccagaaagaatggaaagaaaaaatagatacgcactgtgatttctcttcatttcgagcctacagacgtgatcgattgaggaaagtccccagtacgaaaacaatacaagggcaacagcgatgagaataaaggatcaaagggaggaaatcccaaagaaaatagagagagagagagagagagagagagagcacattgaataaatggatctcggatgtggaaatgccggggactctcaattgaactcaaacacataccattgttgtgaatcaatctgccgacacgtctttcttcaaattccaagctcaagcactatctctaaagaacagttctgggtcaaccgagagggagacaaaggagggggaagagggaaagattgaggaagaagatagtttgaagggcgtgtgaggtttgatggttaggatatcaaaacgccttatggccgcttgggggttgatctgatggattggttacgcctgatgtaaccacaatcgttaccgttcacgttttccttgtacacagacagacacctgatttcttggttgaagggaatgggaccgatatgtacgtatccatttatattggacgatgatagatatttatatagtgaaaacaaggtttttttaagcaagatgatgtctattctgatgaacggagagaggtacgagagagatacgagagatgaaagaaaaacgataagaacagcgcaaagaagagtacgagacagaataagtaagtagacaaagagaggaaacaacgaagtaaatgagatagttacgaaacgataacgttaccgaagaaagccaataggaccaacttttacagtatgactctaatgtcaacgccagaaagagaggcagagaagaaggagaaacatggtacaacgatgacgcagaggatatataagaacgaataacgggagacaatccgagagagccagccaaagggaacacgaaaagaagattgaaaatgaggagagaaaagagcaggagagaaagacttaatccgctccccaaagcttataagtcgactcgaccagtccggaatccccctgacggaccgacatagactgtaggcctagatcgatatcaaaccctgtgcccagattcagacccaaacctaagcccggaccgatgaggatggggacgttgtgatttgtctgttcttcgaaaggaacagttgaaaatccagcggctggactagagcgggacgttcggagcgggcggtggcctggtcgatgagccagctgagggtacgcgtctggatgaacgggcccaggggccactccaggccaagttagtggcgatggacaaggtgatagagaggaagatgaggaagacgaagatagcgaggatggtgggaagatagaatggatcgaagagatcgaccatgagtgggccggtcttctcgttctgtccaataacggccgagaatgcgttttcttttcggactcaggcgaacgacgaactgaactcgaccagcgagaactgtcctgttcgggagaacgagggaagtgactggaccaacgggatccatctggaaactgtggatgagaagcttccgggctgaagaggttcgtatgaggattcaaatgagggcccttgtccgtttgaaccggtgagcgggatgagtcaaacaaggtggacgagagagggctaggagtaggaagaaatgtcgctgtcgatgctgtcgctgttgttgtagagcaagacgacgaagaaaaggaaggaggacggggcgagggggcgaaatatgaaggctggagaacggatgggaattggcgcggtggactccgtcggtcaggaaaaggggaaaaggtctgtgagagattcgaagggggagtgagcaaggatagccaggaagaggaagttcttgagggaaggatccaaggatgattcaacgactgaccttattctggggagaccaacccttgaccaacagaccatcctcatcaccgatttcggtgacttccgaccggatgtctcctctccttgccttcaagttgttttttcggtctctggccgcgcgggcttgttcttctgatacctcagtatacacgcatgatctattgaggcgggagcaactcttgcacggatcgtcccctgaacagcccgtttttctgagagagatggaaaaatccccaaggtataagagagagagagagaggaataaaaatcgtcagaagatcggaataagacggccaaatgaaaaaggagcgttccgattaacgaagcctaagaaagacggacctgcttcgacatgaatcgcaagcccttcgaactctggtgtgtttactcgtccttgagcctgaccaagaccgaggccacgagggccaaggagaccaacgagggtgatggtcggctgccggcgctgttgtcatcatccccgtaggtgtagacacttctgagggtacggctgatgggaaggatacaccgagggaagaacccgaggatgatgaggatgatgcgatggatgatgttgcgaatggtgatggcactggtgtgagagtaggattcattcttcttttttccaaagtagagaagaaaagaggagaaaagaggagaaaagaggaggcgagcgggatgataaagcagagtaacgtgttgaggctgattgacatacaagagaacaataaaaagctatcggaaccgaacgaactgaatggataaacaaacgatataaccacccaggaagaaaacaaaaggagagaacgggaagacagcaagaaggaataaaaaaccacaaaaagaaaaaaagaaagaaaagaaaaacggagaacagaaaagaacgccctatagatttatataaacggacgcatgtatggtgttgatcaggatgatgaattgaaccctcacatttgaagagattatcttcatcattgaatgaaaaatattggagaaaaaaaatgaggacagaaatgcccgggatctattacgtgcccggcaagaaaagagccggtaagaagacgtaggtaaatgatcaagatggaagctgtgcctttgagaaagaagccgcgcatgtggcgtagcggcgcatcaaagccggccgcctatgagtgagtgcgatcaaaggtgatggtacccgcactaatgccattgcttgcgctactgttgatgtgatatgtatttgtactaacactggcaccactggcgttaaagtgatggtgtggttagtggccgtatcgctcctcttgctgatcatgttgccaatatagctgtggctactgaatcaatgacgggctgctggcactgctcatactattaccaccgagcttggccttgctgcgattaccgccaccgagttataattcatgcgactggttggtgtgatccgaggattttctccccttgaaaaggaaaaaaaaaaagggggagaaattttcaacagcagcaacgggtgtaatctttccttttgtcatacctgcctctcattctcggtcgttcccttcgatctattcttggataattctcctcgccattgctgcactttgctcatccgacgcctcgtcattctgttcacttggcttacctccttttgtcgtcggttattatgcttctttctttctttctttctttctatatccgtgctctctcgcgctgttctcattgtttgttccgattctctatgcacattgttctgcgtgttctctattccgtgccggctgtcagggatgtgacctgagtgttacacctcggtaaccttcttttggttctggtttctcctgcctcggtattccttatgctctctcattacatcaacatgcaggtatatgaccttccagcgcaggtgcttctagcaccttctatgatctgttctcttatgcataatcgttggagtctaaggatgatatataagacgggtcccctttgccacccatagcatagtctaccaagtctgaatcctttgtcattccnnnnnnnnnnnnnnnnnnnnnnnnnnnnnnnnnnnnnnnnnnnnnnnnnnnnnnnnnnnnnnnnnnnnnnnnnnnnnnnnnnnnnnnnnnnnnnnnnnnnnnnnnnnnnnnnnnnctaaggatgatatataagacgggtcccctttgccacccatagcatagtctaccaagtctgaatcctttgtcattccttggttccctagtactcttgttccattgttgtatcaaccttattcatacgatttccctgccttgcgctctcgtcacagtcaccaagctagagagcctgaacttccttcttgccagccctattccctgcctggttacattcttgtaaccttcccgttaccctctgaacccggaccctgacattacatggctcgagcgagacctgtgcaagcctcttcatcacgtgcatgatctttgtgcctcatctggatagggaactcggcccgttgaggtagctgagtttcccaaaggccagacgatgatagaaagcgcgctggtaaacttttacctggtgatagccatagagattctggatggtgtgtgaacagcagttatattttggtagaagaaagaacatttggaacgaaacgttctgactgggagaaattttcgtcgctcagacgatgatcgaacgagatactcatggtatatgtgaagcctctcgcgaaaagcctcggtagtctcgaccgtcaacatagcgacagcagcttcatagacaagaagctcagttgcctggaagatcttgatctcaaccacattactgacgacctggctcaaaggaaatatcgcggtcgccgacttgggatcagacatcggccagccgttgtcgaatggtctgccggatcggtttgttctcacgacttgaccgatgacgtaagagtttcgagttgggctaatcgtttatcatcctgttcactcttcaacacaaccaaccgcctcgatcgatatcaaacaatgtctaatctacctcctccttatactgccgagcctactgccgttcaacctgatgctagttccgatgaagaagaggagaggcagcatcgatccaacatgcttcgatcgtcctccctcgatcaggagggcagaagaagtttagaagatgagaccagacctctacctgaaggatggatccggcagttcgatgagaggtcagatcagctttttttactcagaacggccagtgcacataggcatgccagtatatggagatgctcataatttcgatcgtcttacatccatagctcttctcaccatttctatgtcgacacaaaggccgaaccagctcggtctatctgggttcacccttttgatgatcctgaattcattgcttccattcccgactctgagcgatctcgatttgagcaacatatctctcctgctgttggctcatctcaaggagcacaggcttctcagtcccatcagaccggtcagatcccaggtggaggcacaggaggtccgacctggagcgatgatgtccaactatcatctcaagatcaagccatccttggtcgaaagggcaatcacacaagctcgaagcctgcgaccacgggaacaaccactttcacagattcgccccggttagacttttcaggtccctctgtatcagcacacaaagaagctcaaggagctaaaatccaccaacaagcacaaaatgcgatggggggatcaaacgtggagaaagataccgtcaagaaggaaagaggatttggcgaaaagctgaaagataagctgacaggaaccaccagggaagagaggaacgaaaagaagaggaaggagcgagaggcagaggccgtcagtctccccttttctcaatatctatcttgttcttcatgctgtctgtataccaacattctcatcatcaatctcacaggcatatcaaaagaaggtcgaagaagagtttttggctcgacggaaagcgctccgggaagccaacttgaacaatccacaacttcgtccgtctatctctctttctgtttcaatcttgaagtcttgatcagctatctgagatatagaactgacacgcatcttgaatcaatttctcatcacaggaggatactacgctcctaggaacgacatatatgctcctccagttggtgtctactctcgaccgctgtatggctccggcctgggctacggatacggcggctacggagggtacggaggatatggtggatatggtgggtatggaaggagaacggggatgggaatgggagtgccgcttgctggaggaatgatgggaggattggcattgggtagtatgctaggtttgtctctcactcttctaaatctttcactggtgtatgattctgatctcgttgtctctgttgttcattgatcaatatataggtggagggttcggaggtggagggttcggaggtggaggattcggaggtgattttggaggaggtggcttcgggggaggatgttaaagctacatctgcttttccagatgtcttatgttcttttccgccttcgtttttagccctctttgattgcacttcatatctcgttttgttgaacgtatccactgtacagagttactcttgtcttcggcttcttcttttcggcacaaaccacgggttgactttgtcactgcctcttatgacaatctatgttctttttctgtaattctgaaatatcttctaaacaggcggatgtcatgatcgccaaagtcgggatgacgtcgacccggatattttactgaaccgcaaatgttatatatatgtacgaaaaagcttgattcctctgttattcatccaactctggcacgcacacatacacactttctttcactctttaacacattccttcacttggaagattttaagctttcagattgacaatgactatttctaacgaatcgacagttgcgcctctcaagatcgccatcatcggtggcggtaagctcgtcgctttcttgttgttgcttcaacttgaagccgaccatccgcgtttgatcaggtcacttgcgcatactctcctttctgccttgtcctttggttgacttgggcttgagttttgacctatcactttcaggaatcgctggtttagccgcggcgatgggtgttctcaaacatcagaaagagggagccaacgtcgaagttgttatttatgaagctgccgttagaaatctccttcccgctttctttctgataatctctcccgcaaagaggatgttgtgttaattgagctaacaattcattctctttgccttgtatgtagcacgagttcaaggagattggtgctggtgttcgtgacaatttctcttcttcctccaaatatgtgctcctatgagcctcggctaaagaccggtcagttgatttcaaacaggtatcctttggacctaacgcccaaagagcgcttcacatgatcggtcttggaaacgaactagattcgatctctggaggagatcctggcgggagcgaatctgacgatgtatggttcgacgtctatgtcggagaaaagcagacggtcaagtccgaacgcgagatgatctgcaaggttgaagggaaagattctgctaaaggatcggttcatcggtttgtcttcaatcttgttggtttctctttcactcggcttgtatgcgctgggtatgaaagaaagctggatgggcactgaacgagaatgtgctggttctgacttaatctagggctgacttcctcaataagatggccaacttggttccagaaccggtcaaacatctcaatcaccgttgttcgtcttacgaaactatcctttccgaagaaggagaaaatgccggtgggaaggtcctacttcgattcgcagagacgaccgaccagaacggcaataaattcactccagaggacgtcaaggtggatgttgtgttggcttctgatggaatcaagagtttgatgagaaagtgtctttacaaacgtatgtgctctcaataatccgccgtcttctatctctgtatttggcaacagaaactgattcgtttgtcgtcgactctgttggattctcaggaagaggtttggatggagcgctggaaaaatactctggatggatcgcctggaggggacttatcgaccaggccgagtatcatgatatcatgggtaaagatgctagtaccaagctcttgcttctcggtcaggacaaacacatactagttcgttctctatcctcaatatcaaatttctctcgcttatcagactgacgatctcgaatcggttatatataaatgttttcataaagactttccccataaaacatggaaaggtcgtcaacctagtcgtaagtcttctctcgacctgtacgtcttgtgactttcaggtgtcgaaaatgaccttccgttatgtatctatagggatttgttcaagatcatgataatcaaaggctcggagatcacactggaccgtagtccgaggatagacccaaatccgtgaggctccatgttcagagacacacaaatcatcatattgtgaaatactgactagtgtgatttgattgatatataggaacttttggaggactaagcctcattcgatgagaaatacttggctatttttaaggtatgtttctctcgacaacctgtcaaatgaacagaaattcaacctctgtattgcactttttcttaaggcgatcgaagatccatccatctggggaattgtaagatctttttatcctcctttcgattccgattctcaaatctgacatatgtccttgtacacagttcgaccttcccgttttggagcacaccatcgatcaccatctcgctcttataggagactcggctcatgcaacaactcctcaccagggtgcaggagccggtcaagctgttgtctgttcttttctccagctagcctacattgatctgcggtgctttgctgacccactgctgtcttttctcttaattggatcaactaggaagactctctctttatcacagctatcttgtgctccccagtagtgtgctcagctccactcactgagagatcagcaaaggttcaaaaagcccttgaattgtatgccaaagtgaggcatacaagaggaggaaaagttcaaacgacctcggctgaagctgggaaactctgttcgtcaactgtgctcgtatcttgatttgtgtaacgtttcaggaactaacgttctatcctactttcgtgcgctggttgtggtctttagatgaattcaacgaggttaatggtgaaggcaaagatcttgagaagatcaaacaaaacctgatacaccggatgggttggatttgggattgggatgtcgaagcagagttaaaaacagccctcaaagagctagaggagctctgttagagcaagggtagacttgttagaaatcgttcgttgactttagctccctcaatatattctatcattcccaaacatcacgctcaaatgtaatttacaagaaagggaaagacctaaggagaaatacagaagttcgaactgtcaagagacggcataaagagattcatcgagaacagtgtatggaattgaagtatcgctagaaaactatcgatgagaggatcagaggatataggtagagatgtgtgtaagtagatgaacctgaaagtcaaatagatcaacgttgatatgcctcctatctttattgactctcggtgatgaagggaagttgaacaagataacatgcttggtcagtatccaacacaaagagtagggagtgaattatcctagacaaaagagatgagcaaaaactgcatgtactattcggcagctgctgttgcacatattagcgaaaggtcagcgctatggtcgttgctaacatgaccgatattgatgactgatagactgatgatgttttatcagacagctagattccgccgggtctggatcaattcttgttgatcttcggtttggttttgttctcgcttccgcccctctcatcctaccgaatgtcctacgtttttgtgaataccccggttcttcacgacctttgggcttatctcagactggtgaatatatatctgggacatgcgcggtgtgacagagatatctttccgggctggctcgaacacttggtggaggcgatctttctatatcgccaaggtcgagacccaaaagcgctgtttcaaactctcgctcagtacagatgccattggagtatctgccggagtttccaggcccatgtaacctccgactgacattgaccactacaggtggagacggcagggcgagggtgaagttcgacgctgagcggaatgcgtaatcgtcgtggtttatggtctgaggatacccaagtctaaaagggccacgtatcgatcgtcatcggttgtggttactctcaccaagcctgaggcttacagcttatggcttttcaccaggaagaagcatttcatcaaggtacagttatagattgatcgatcgaaatgaatgatgaaacatgagaggtgatatgaaggtaggtgagcagagcacatacggagtatcataggatgcgagataatagtcatggtgagaatatataaggtaaatgcgtatggatgaagatgagttttgaagggtgaaatggaagaagagaaatgtatagatggtataagttcgtttgtgcatacgaagaaaatgacccttgagaacatgaaaaataaaggtttccaagaagagtagagaaagaagatagagagtctatcatggagtgggaacatgttggcaggagcagaggctcaaactatcgatcagcaactgatcccttcttcgagagctaaccagaaatcccagaagagtcgggatcacatcgatcgattctcagttatgaatttggacagtataatgagacaaagcatcacggaactcaccccgtgtagattcaaaccgcgcgagctgacgctagtcgtcatagaactagattgtccggtaaggacccggcgatgggaagtggctgacgacatagaagtcgacccgggtgttccaagatgggaaggcgcgtaagctgtcgtagaatgaggaacgcgaactcgagcggttagagctgtgggggcactgatgttgagggtctgtaaccggaaaaagaacgtcaaaagtatatataaggtcacgtcaatgatattaaaatcgaagcatcatttttcggcctggatactgactttcttgggtgcttcagagaccttgggcttcacactcgaactagtcagtgtaggattcgacaccttactagtagtcggctgcaacgtaggcaacggtcgtggaccagtcatccgtttagacatccaaggatgcctcaacgccggctgaggcttcaatcgacgatccgggtcccaagtaagacatttagagatgaaatcgacaaaaagatcgtcgtctgactttaatacttgagctagcgtcttcgttcctggccgtcgacgtttccccttagaattgactacaggccgggctgttccttgggtatctatgttcactcagaaggggatgccatcagttacgaacagaaagaaaatcgaacaaaattatgtataaatacataccgaaaaagagattctttctggagctcttgtcaataatgtatttgtctggcatgccaagcacttccatgatgcaagatagctgctcctgctcattttctccagggaagatagggaatcctgtatataactcggcgagaatgcaacccaaactccacatgtcgatggcctgacgcagtgattgtataaggtgagcacggatgcgtagtctcatcgttagaacatcagacgagggctagagcttaccatgtgatagttcataccaaggatgacttctggagatcgatagaaacgactttggatgtatgtatagactatatagccaaatgttccggcttgatcagcctagagatcagaacaaaactcagattggcgctgaagagacaaacctttttcatgctcgaagcaactacttccaaagtcgataaccttgatgacactttttgccggatgaccaaggagaacgttctaccaaatcggccaacacgagacaataagctttatatccagacgatgatacatacagagaaagtgacaaacctcaggtttgagatcacaatgcacaatccgatgctgcctcatcaagatgagcgagctcagaagctgggttgtgaatctacgaatcaacgatgtcgtgaagccagcaaaactgttggccttgatgagttcgtaaaggttgatactcagaagctcagtggcgatacaaagatgattccggaagtagaagtgctcggtcatcttgattacatagtgcttctcatcaggatcctacagaaatagaaaaaggggaaaattgatgaagatattcatgattccaaatttagtttctcgggaagaagctataagagaaactagcaaactcgaagaggaagaccatacccattttcgtaaattttctaagatctttacttcaactagtgcttgatgatgaaacctctttttgtttcggataactttgacagccacacattgcccagtttgatgatctcggcactgccagacctgtccaaacgatcccttgccaaggagacacatgatttcgtaccgataggccagatggtcgccaggcaccatgagaaagtcccctcgctcgtcatcatagccgtgattttgattgttgtctgacaaagtggcctgccgtttcttgctgtgtagaccgatatagtaaattgagctgtactcggtgatctctcgacgttcgaaatccgaaaggtcgttgaaatacgacttgatggttgctattcatcaattcataagaagaaagaagacagtcaatataagtctgtataaaaggttcgataccatctcggagaaaaccttgtgagggaatggaaccaaagagacaaaccaagcggtgttgaggccgggctagcttcagtcggttccgggaaattcatcagcgcttcgatctctgaactcgtggcccccgttgattgtttctttgccttttgcctcttcaggaactgcctcatctcttcatcgccgacagcttcatcatcctctatgagagacggagaaattgaggatgatcgagacgaaggaccaggagctgaaagtgaggtggatgatgacgaactcgggagtctcaaggagagtgaggggagtttcgagttgaccactcgggtggaagcagaggatgtgtttccgtagcctgtcaagtcagtcgtactagccgaaggcgtgtgctgagatttcttgataaccaaggaagacatgtcttttgaggtctttcgaagattcgccgccgacgaagcatttgctttcaaggaagcgtttcctgcggtaggtggaacagggagttgcctagggactcgagttgggaacgagctcatggatgcagaggcggaaactccattcaagcgtccagccgatgactccatctcgccatcgccagatttagtatcaagagctgtagctttcgggcctgaactgatggtttttaactcttcatttggagatgctccaactccaaaatcagacaagttcgagtcacttcgagtataactcgaatctgaagacgttgtggccatttcgccagcctttttagagccactgaatgcactaggggcagaggaggttgtcgtcaccggtgtggtcgtctgtcggctctgtcggctcgcaattcgagggatcttagtgggcgtagcatcaatcatccgagtgaacgatgcgctcgacggaattgttcctgaggccgcgacagatgagatcccgttcattggtacgaccgatggtgatccggcaataattggaagatttgctcggctaactcggttgaccgtgttcgcgtgggatgagacagatggttgtcgacgagtggaggctagacctccattggcggatatggaagacgtagaaagacttggagataccttgtgtctagcacccgagctggactttcggtcgatcattgggtgagacatgctgtccattagcggagggggaatagagatggattcactcttctctctgtcatggctcgagatggtctgtttaccaaaaagaatcatacgagtcagtgtagactcggggtctattgccctaagggaaatcactcacttttccgcgcttccttcccagcaggccaatactgctcaatcgaccaggagaaggacgttccttctctgctgaatctgattgctcttttcctcctcttcctgcataaggtcccaactcactccggcctaatgaacctcccgtcgtgatcggtccatcaggtgtctccttcagtgcagcagtagcaagatttctcctagacgaactacttttgagcatgtttgagagtcccattccacccaacattgattttctgacactggacgtggttgaagacggcgacgacaaagttgctgactcgttgattgaggtcgaggattgtattcgacgagaacttgagatcgacgcccgaggagtcgaagacgggtgtacagattctgcgggtacattgagcgcgcctcctttagcagcaagtgctttcactgaagaagacgaggatctcctgaagaaagggatggatgaaggggtcaatcgcttgttacttccactgctgctggatgagtaacctttggagtcgcccgccagagccggagctgatagtttggacgatgatgacattgtcgaggcatgtctcgagacggctgccagatttgagcccttatccagaggagttcgatcagataacgcaaacgagtcgatcgagttggaatgcttcaaatttgaccaaggcatacccgcatttttgggataatcagcagatgactgggaaaatgagcctggtggaagcgacggcgacatggaaagctgttgatcttcaggagcagacagtgaagtcgaattcttatgcgaactcgaccggccaagatgcaacgcattagtaaagctccatttcttacttggcacccttgaactagcagcagaggaaccactagcttgagaagttgtcgaaagttccgatcgggtttggcggtcgatcggtgggcgaggtagggatcgattgggtgtcaaatcgtttcttttcgaacctgtcaaaggagaagctgacagggtggcttgggttgaagatgtacgaaacgtcgagttaggggcagaaactgaggtgggaagtgcttcagaacacatgcggtcgccttggtcatatttctgtgtttgatccgactccaacgagggtgtcgcttgatttgactgagctggagatgggacgctatattgcttgggcaaaggtggcacaggcggaatctccttacctccaatagtacctgataaagatcccctccttgttccctctccgtcgctatgggatgaagcggcgtcacttcctatactggtcctggttgcacttctcgcagaaccggttgcattggatgaaggggccgtagaatatacagcgctcgtggagatggaagatccatgtttagaggaagtacttgaagaagctccgatacttgctcgagctgggccaaaagatatcgacctcggggataggacctctgagtcctcctgttttggtgatgaggtctgacttacaagcattgcaggcatggaggctcggattcgaccagaacgaccttggttgctctttttgtcgtcagaagagggtggaggaggagttcttgaccgattagctgaatcgcccttggacataataccatcagatgacttgggtttgaccagacgggtggactgcctctttccagcagagggagaccgcccgattccgtccaactttcgaagggcttctagggtctccggatcaactaccttggatgggttttgctgagaaagccctgatgaactatgagcggagtccattcggaaatgatcctgtttttttggagaagggagagaatttgggagagggggtagtgggggttgatccgacgagtcgttgtgtatgttggagtttgaaccttgccgaagaagctttttgatggaagatgtggacggagatggagggagatgagaaaaatcgtttggatgggagaattgtcgaacgatctcgtgagctggcgaagatgggttactgattggtcgtccagagttagaggagccggtaccagaccgctctcgttctcggaatctcctgctgtctgtactgccgaaggggtgaggtgaaggatgaagttgaaacccttctgacgttcttcttgattctctcttgagtatggagttcccgcccggagaaggttgcgcggaggacagcggcgatggcgaaagcgattcgatgctatgcttagtagaaaggccaatcgacagtgcagaatcggagacgccctgattttccttctctgccaactcttccaaatgagactctccttccgatccccatctgtcttctgcaaattgatcggatagctcgcgtttgtgcccacccgtcgtaaatctcttcggactgaaggagccttggccgatatttggagaggtaccttgtttgttgtgaaggagacgatgatgagaaggagacgaaacagacaaggttacctgaggcgaggaagaaggcggggttctgggtggttgctcagacgtatagtgagaagatccaggtgtcgtttggctagactcagtctcaaagatatcacatatgggcaacacatgctggccctgatcgtcctcgaaccgtctagtcttcctctcagcccgcgcttctcgggattctaccccggatggctctcctttcgatgatctgctttcgcggtcagtcgatatctgctccatctcttgatcgggattatgttcccagccatgggtttcttccagtttcgatgacgctgcccgcagtctagggttcggcgaccagtcgatagttgacccgaccttgttggcccatcggggggttgtcagctctcctacaccgacgaggcctcgacgatctatcgtggatgggctaggtggatccggggtcatcgggaaagcactcggaggggtcaacctgtgtgacatcagagataaatgcatatgtcaggtgggtattctgcgaacgcgtttcctgaattcattaaggaaaccgtgggctcacatccgcgacttttctcctcgcatggcggaagaacgttctgggagaactcctagagcactagatagaggagtttgaagcgaagagctaaattgatgacttgaagaacgagggagaccctcggacttcttcgccgccgaaacaggggctgtcgaagcaaccgctttagacgttgagacgagcgaaggtaacgaaggagatggcttaaacaccggatttgctcctcgtatggactcgctggtctataaagatgaacaagataaagagctgttagtataagttcctcattagccaagtgattaactcggtagacgtacttgatcctcggcccttattgaaaccatgtcccgggtccgcctatcaggacttgtgagctccagagcagtaggagctggtttcctcctgttaacgctactgctcaaccctccactacgatcgactctcgagctctgggcatattcggtcaatcctgacaagggagcttggtcgagtaacggggaaaatatcggaccagtattcactttgtctttgtcggaagcgaaagatgtgttgttgggcccaaaggagatccgatggcttgcattctgctctctggatgagcgagatgaaggagagggaatcatgattgatgaccccctgtgttcttaggggggcttaatctgcatcgtatggccaattagctgtcgtcagaaagatgcatctgactgatgaacgaacagtggccctgacttaccacagatcaaccagagggcgagacaagtgatggatcagaacaaatcagacagaagaaattggctagaggggtatcaaaaggctacctgaacagaaatgttgttaggagaaagatgaaaagatgggaaagagatgggaagccaaaagaaggcaggaagaatggaaggatggttaacgaaaggaataggaaagttgaaagagatgaaagaatccaaacaaaccacatctttttccgttgattgtgactgttgcgagtttctaatatttccttgtattcccccggatcgtttgtattggttcgtgtcccattaggatattcgtgctactcttctacaagttaaccttcctttctccgttatctactctctcttcgatgatcactttgtgctgtacagctcatcgagtgtcttctaagtcttttcatatgacgatgagaacggaattatctcaggatcccggctggtaataatatgtggcttttctctccttctctatatctttcgcgtttcgctgttctctcctgaattgggccatccgtttccggctctgcttgagtgcctcatccctgcgcttctcctcggccgtccgaggagggttactatggaagaaggaccgaagagtctggaagataggcataggccagtctgtgttcatacaaagtcccatatgtttgtgatctaactcccatcagaggcacgagcttctgaacagcgtctcaggccatcaaggattatatcaaagcttactgtggttaagacggaacggggtgcacgctgagatggtcactagtagacagatgattaagaacacatttcttgagtttctctctcagtcaactcatgttcttccccaacatagtcctgcttgcgtttgccaagcggatgcaaacttagtgccttggtcttggcgttcataaagattagtgtgattgtccactagacttaatccctgaacacagcgacgggctgacagccagcgcagataccgtctagccgagaagataagtcttgtcaggccggacttttgaccatatcaaagaagtctctctgaaactagtagaacacgtcttcctcgactccggagggtttcttccgttgtgtatgatactgacgcgagaagcaccggtagtaaggttctttgagctcagaaccgacagataagcaagttagtttcttcaatttattcaggtttcagttcatggtggcttcttgagcaaagacggattgtgcacgtttcaaaattggccgtcttcctctcgtttcaccaacgttctctattcgtattgacttttgacaagaactgaacgttgacgcgttctctgatatcggccgacatggaaatgtgttgtagagatgacagatgtagtgaaggagaatgtgcggagaaggggatggcagcaaaggccgctgctgaggagaacagatgtacaaaccctatagcaattctatcaaatgcctgactctctcttctcctcaagctgctctcaatgttttcttttgtctagactgttgttatatttgattgtgcttcgtccgtgaaaggctgaacgacaggtggaaggcgcagatttagacatctccatcgagcttagagtcgttgttttcttcctctgtttgcatatctgccgaaactccagctgcacctgcgtatcggtcctcaccgacagcctctctcatcattctctccagccgatcctataagacaaaagataacatgttacctatgtgagtaaatatcctgaaaagaggggtaacaaatcaaagagggaaaaacatacaggtgaaatactcctgcttcgacttcgccaactttcacctccgtcactacccacactaccacttctactcctgcttctacttctactcctactcctactcctactcctatctgatccggcactcctactaggactcctactgacaaacctctccctgtcttcgtcctccctatcacttccatcacttctgctcgccctgcctctttcctcgtcatcttcttcatcgtcaccgaacatcttatctcctaaagctgattttcgaggaagtagtccctcagtctcctcgagaacagatcgtttggtcagacgagggaggatgatgtcgcaaactctatcctctgttagaagttgatcgacaaactcatcaaacggtacgatcgaatagccacctgggatgcaaatgagacaacaggaagaaaagacatcagttcagtcagaggtttacagaacgtaatataacgagcgctgaagtccgaaggagcagaaagacgaactttcatctctgtatcgaagttttcgatagtctttcaggagtggttctaggatctcgtagacttcaacagactggaatgtcaatctcacgtaaaatactgccaccgcacgaagatacctatacacgagtatatatgtacgtgttcatgacgcgcaattggtcaatgatgtgttctttcgagagaagatgatagattgaatactgacttgaattcttcggccaataggtattcaatcagaatttccttatctggttgaagttgaagtagcttgaggacgagacaaagaaactctgttggcttctggttgccgtatgttccgccaatattctgtatagcaatcgctttatctatcagggtctccgctgatgattatttggatgaggagaaaacgaatagttcgtgacatcagcttcgattgagggttgttccgaatcaagcgaaaggatggataacacgacgaaccagtcaaggcaaaacagtgctccttccagtaaatggaatcataaattcttgctctgataactttctcaacaagactctacccaaagacgttaagacaaaaggcgtgacttcaatcagtgtcatcgaacacgtcaagtctattgcgagggtaagcatgaggctgtaaaaagcttacttgagggttgactccgtggatgtttttatatcctttttgagtgacgttagccattttggttacttgtgtgtgtgtgtgtgtgtgtgtcttaagagctcgaatcgaacgtatgagtgatagctaaacccagaagatagactacacgttggctgggatggatgggtgatgagagaatgatgtatcgttctctgctcgctcttgttttcaaggtaaccgtgcgaagcagtctaagacacgctcgaattcttagcacgtaaaacgcgtctacatttttcagaagcgagaccttgaggaagataatctgactctgttgtgcccttccttttaggaaagatgctgtacttgttctctgtttctctctttcgttgttcctctgctcctgtctgaatcgaaaccgatgacatatatttatgttacatgaagagctagcagtctacttgatggtcattcagcgttgaggaacaaattgtcagttgcgaagcgctaacagctaaagctaatttatctagaggcgaagcagattatgatgatgatctcacatttgccctctctacagactttctctctattgcttctcatcctgcaagctctctaccaatctgcccaataatgaactctccatctctccttttccaccgttctctcttgatcgagcttggaatccggcgaggaatgcggccagatgagcgtgggtatcctcagcaggaatagggatcgttgagagcgtattgagaataagcggaggagtaagctgagtgtccattgttcaagtgtctgttcggatgatacgtatgagggtatgtgagtgtgtatgggtttgtagacgtgtgaccgagtgtgaagaatgtgtttgctttgaaaagctgaatgagaggtattagggttaaattcgatacaagtcttacatcagcctcagcaccttatcggttgatctctgacgtcttccctttccttcagcattctcctttacacagacatccgaactatcaatcatatcagtcaacatgacaagagcagcagcagcatccatcttggatacagatctatataaggtatatatacgtcgctcagtgtacgagctctgatctctggaagcaagcgtaccaccaactgacagccgttctccgcacgcgaccacacatcgttattttccacaagctgacgatgcagcaagcagtcgttcaatgtttccccaacgagacggtcgagtacaaattctataaccgacggccagacacaaagttttcgcgattatcctttgactggttttcgactaaagttcaaggtacgcatagatggtatttgaatgtagcctcttccgcccgtcgcgctaatttcactcgatccctcgtccttcgaattttagaactctccaaggtcaagctttctaaggacgagcggacatggcttgagacgaaatgcccatactttcaagcgacctacctcgactttctacagaatctgaggctctctcctgaagatcaggtgactgctcattttgttccggtctctgcggatgaagtagatgttggagacgtcgagatcacggtcaaaggcctttggaaagaagtcatcctgtacgaggtccgtgtcttattcgcaatgtccatcacatttgaaagtctagtcagacatccctttctgatattcaaatctcgttaactgttcaacaggttcctctgatggcgctcctttcggaagctttcttcctacacaccgatacggactggacaatcgattctgcaaaaggtgagactttcatcctctgtgtaatcacttcgtttatgttctgaaatggcttacgttcttcttctgaatcaaactttacgactgaccgtgacatctcacagataatgctaagagcaaagcggctagccttctagcacacggtatcgcgttttcagagttcggaacccgccgacgtcgatcttatgaggttcacgacctcgtacttcgcggtctcttggagggacaatcagatgctaaatcaaatggatattccggagctggaaggctcgccggaacatctaatgtcagaattctcagcgtttctctttctcgaaggcgaattatattcactgaaaaccacctcatcttgaacatacatgaacaggttcactttgcacataaatatgatctaaacccagtagggacgatagcacacgaatggacgatgggcattgcggcactaaaaggatacacagatgccaatcccatcgcgttagatctatgggagtctggtgagaaatctttgtcgagaaatgtatatgcgcgacgttcagtatatggcttcttaacaagtggtctgatatctttttctcatataaagtttacccaccctctcccacatcacctttacataccgctctcaccgatacgttctcaactcccatcttcttttcgacatttactgccgaccgagctcgagcgtggcgtggactccggcaagactcaggagacccgattgagtatgcaaatctggcaaaagagacgtatgatagattgggagtcgatatgaaggacaaattcatagtcttctcggatggtttggatgtcaagacgtgtgttgatatccagaaggtccgtcactgtctcttcctcttatttggttccacccactcttcttcgagtgtagcttcccgtctatttctctgaatcaagcgggcaagaggtttaacgggcataacactcggttcaaaggcttgcaaagagattcagataggagcgacattcggaataggaacgttccttacgaatgatttccatcgtgcaagtgattcaaaggcagactcgaaagcactcaacattgtgcgtcccccctttctttcgctttccactttctctccctctcttcaacttcctggtcgaagagtacgttctgaaaatttcattgtttctggggatcatactactcaatgggaggtacttaggtgatcaaattatcgatcatcgatggaacagactgtgttaagatctctgatgacttgaacaaagtctgtccttctctctcccttaacaatttatttttttagaattaatactcactcctggtcttttgtgtatgtttttgatgttcgctatctcgtagaacacgggcaaagcagaagttgtagccgctgctaaaaagacgcttcaaatttagtttagactcccgttgactccgaatcaacaagaaaatggaaatacgaacgaggaggcgctaagaacgagaaacgagggttgtggctttctgaggattttgatttgctatcatatagattggactgatttcttagactggagaaaccagtcaccgataagagacaaatatataaaaaatacttctcgtggaacacgttgtaaaggaaagaaataatatcgttccatctcatccaattatacaatccaatgtctaggtctccattggtgctccccctgtaatcgatgacgagccagcagcagcttctcttgtagcttgttccgctcgttcccttgcgagcgcccacttaacttccttgacatcctggtactcgtaccaaagcgccgagagatcgtagttgtcgataaactcccaaccagtctccttgacgtgatacagattgattgtgtttccagagtaggcatcccgctagatgtgagaggagaggtcaagatatcaaacgttaaaggccaagaacgagggatgtaaatgaagatgttaaatatcaaacttacgtgaccagcagcgcagatcgaccttcgtcctaactccttagcatcatcatctgataaatcccagttgtatccctaccgacccggcccggttcaagagaagcgagaaatgaatggtcatacaattgcacgcgtcagtattgaaatagaaccgatcctctccatgattcatcatttcttttctcttgcgtacttttcacacaaggataaccaaagcaagtccaaagctgcacaagagtacgcacctgatctaatactccataagcaaaggtcgatccagaaccgactgaaaagacgtcaccttttaatctcgaaccgtccgaatccacgtaatacaatgctggtccctatgtttcgatcgattcataagacaaaacgaatgccagaagcaatgatgagtctgtgtagtccaaaaaggcgtgttgacgtacagacgtaccgtcttatcccatccacagatcattgttcccatactaagtcccatacccttgtacgaatacaccaagttagaaagatacttgctggcagctgcgaccgagatcctctccttctctcgaagctcatgcagcctgcattgcattccaaggtaggtttcccagtattgacaatcggctaagggggaacatggcagcaaaatggagggaaaagaagacacagagtttatcagaaatcatacaggagggacgagaacatacagagtagaaaagaatgtaccagctcctccggccatggttcccaaaagatacttgttgatctcgattaccttcttgaccgttcccgaggctgaatgaagcgtatcaggataatcatagatcagtcagcgctaaggattctaccacaacaaaatgagggaggagtcgataggagtctttcataccaatatagctccctgcggtcgctcgactatcgactgcaacgatgatacctcctttgtaccggaacgcgagcgtggtggttccatggttgagcttgatcttgcatgatggatctgagtgatcatctgtatgaagtctaaggaaagctgagggctgtatcggagtgagtaggccaaagtgtcaggatctttcatgaacaagagaaagggaaggagaatagagagaacagctgcaagccaaatcgttcatccaagtccctctcaagtctggtttgttcatctctattcaaaccgaggtgatttggcgacgatctcttcctgctcttcagccagaccggttttgctcaaaaccatagcaagagagaactttgtcttgaattggttccggaatgaatgctctagaaaggcgatgcgaacataaaaagatggatagaaagtcattcaaacagtatgacttacatcaggaacagcagggactccgaatcgaacacccttgtcggtctcgatgtttccaaacaagttttctgtttggtcttgttctggacgaggtgagaactgggagaggagtttgttcatgtcgtatgtatgtaagtaaggacgagagtgatgggtgatgaggtgatgaggaagagatggatgtgagcagaaaggtaggagaggaaagtgatgtggatgagattgacagacaaggcggcgtggaggtctggtctgtcgatggttacggtgaatggttacaacgcctatcgtgccagtcagagcgcaaggcaagtctctacagggttgcgagtgcatctgatggtctcgagaagagaaagactgtgtccgtacaagattcgtcagcccgattagctatatgctcaaggtacaacgagtcgaaagtaggatcagatggtgggaaagagcgcgatgggtcatggtacaaaaacgatattcgactacagagttccattagagaatctcactatatcccttgatagacaatccggctgtagtccttaattacagaaccgactaatcattaatagaaaaaacgaacgagcgaattagacggaaagaaaagaagcggaaggaagaaaaaagtctcttctcttctctcatcattacatccaccttcgttctgtccaccaagcatcctctgttcatcagaccatcgcacacatctgacccatctgagcgtacatacatatatacatattcatccctataggacaggcgtcacgtaatgttccggccttcaatcctttctgcggtgtctagaccgttggctaggcacttttcgataaccccggccacccagatcggtcgtcggtcatccttgacgagcccagttcactcgtatcctaccctgccagacatacttcctattcctcttcgatccatcacctgtccatctgttccctcgccttcggcctcctgtgctcctcctcactatcttcgaaacccactggatcctatccttcacccggattgtatcccattcagcacccttctcgagaccgcccgaactcaatcgttcgttaggttcccactcgcctcgtccgccttgcccactcaggcagacagcccgctggagggtcatctcaagatgtatggcaagcggctcccagcagagtatgagactgctgccagagaaggcgacgactcgttggacgcttccgaacgacgggcaaagctattcgagtgggagaggtgtacttcctttagggcgacgtgcatgaaacgattggcggagaagaagcttgtccgaagggccatcagagtcggcaatggcagggaaaacactctcgatacaactaccgctgtgggtgggatcctgatggacagtgtgaaacgaaagagaaagaaaatgatgagcaagcacaagtcagtctaccccctcatcgctttcttcctccgaactaggctcctaggctctggtatactcactgtattcactttttctgcatccaatcattccttctcgtcttaccagatacaacaagcgacgcaaggtatgaatgctgatctttcctctgtgccatctcatatatcccagtcatttttcctatcagtaaaattcactaaatattctttctctttactcctttgttctgctttcaggctacccgaacggctcgacaaaagctcggaaagtaaagccctaatagactggatcagtaaaacgagatgtactctagccgttgtttgggagcactcttttctctgccctggatgtgttttgtgtcagtctgagaaagacttgacgatgtttgaatcaaaaacaatgcatgaaatataccttctaatattcttctctttctcgctatgacttgctgcaaacgacctgtggattgtttacattgtatttcattaactggaatgaaagaaactttcagatcgccccttctgtcctttcttgaccttttcacatcctcccacctccgatcagcccagtctgttttccttttccaccgccggaagcctcaagtttctttcgggtgtcatcaaaccgacggacgatgagctgacactttgtttccttgcagagcggtagagcgagacgttgaatgtcggatgagaacaagctcaaaccagaggctcgctcgatttgctccactatgaacagtgcacaaggaggatatgtatttagtcgatcggagataaaaggaaaaaaagaatacaggacgtaagagaacaaagggatcataccgggcacttggaaagactcaagaggaacctcatccctttgttttcgtttccgagatagaggttatcagaataattaaagttaagacagtcagcgacgaagggaactagatccaacagactgctctcaagaaagaacttgatagtatgaaaaaggacatacgggatgatagcattaggcagcacgaacccagccatgctcacttccctgttgatggacttctttggatcctcacctcgaggcacacgagacgtcaagatgactttggagaaatgagtgggcacagagatcgaaggtgggtttccgatcacttcgtgtgtcacacgccatttcccatctgccaatgattttgtcggcaagtacagaggaatagtaaagacgtaaacgtctgagaactcgttcgtcaactttcgacaccactcctctaggtaagcccagtctatagtttgataaacaaaggtcagtactgatcagtctgcttgattaggaaaagagaatgaataaggaaacgagcaaacgaacagtgtctattgaagccatctcccacctgaggagcgatattagacaacaagaacgtctcgttcatcgcttcctgaaatcccataccattaggggtcagcgtttccttcgccgcgcgaatacgatttaaaccaaggacaagggattgctcaaacctgactgatcttggcatctgccgcaggaaccatatgtcctctgtcatatccactcctgaagtagtccttaagcttcgccctaaagagacccgggatatcttcatcttcttcgaacttagacttgtctctcgaaatcgcggtggtctcaccgggctgaacaggggctttggctaggttggcgatcgtgagatgttcagccgtctaagaggcgcaatacgtacgatgaaaacgtataatatcagccaaaagaacacagagcaaggagagaagaaagaaggtcttacccaagcggctaaggaaatgaacggagttgagatatgaatttgatgagctcttataggttccttgtcggttagcaggaaagaaaccccagacaaagaataaccgactgacgatgttgcaaccgtcgatcgtaagcggtgatatacctacacagacataaagaccgcggagtaattagttcttatctaacgaacagaaggaaaaaaaaactctgttaaaagcacacatacgctctccttctcagaacgtccgaggtagaagcttgttgagaaatcccaaaagagagaagaacaattagggctcatcatcttccttctattgatcttgaacttgaaacgaactgactgggcactccaaatttccaaatctctccatcgactggcgttctgaatcctgtattcgatccgatgtccaagatcgctctggtctcgctccttgcctgtcctggagtagaggcagaagaataaggagcagaaccaggagcaggcaacacggtgacctgtccaggactcggaacggcgatggcaaccgatccaggcttgggtttggagggaccagtcagataagcggtcgttcctacaccgaggaggagacctgtggagaatatagccgattggacgaggaccgaaggggccatggtgttacaggttttgagttgtgggagacggacagggtttaaagtagcccaaatgagagttgctttgattaaaccttccgaacggttgtagagctctcaaattatgttttaattatcgggcgccatgcctttacaacaagcctgatagttatttggttttcatatgttcgcttcatctctggtccaaaatagtgataataaacatgaatccaaacagtggcagaatcataggaagaaaagaatatgtatagaaagaaggcaagatagaaaggaatccctcagtgacattaagggtaggccggacccgacactcattgtggatgcacgatggcagagcacatgtgagcttgactctaattgtgttggcaagtctcatcatcaggattcccttcttactttgtatataaatgtgaattgacaagaaaagatgtagatacggaaacattgagcaggacatagatgatcagggttcagttttgaaattgtcagtaatagctggctaaagaatgagaaaaattaagataagtcttcataaacacggactaaaataagacccaagaagaaaggaacaactcactcagtctttactttctcactccatgtccttcagcatagtaaaggacaaggagcaagagaaaggaaattagaaagaaaaagacacgaggacaatggtggtgaacagaaggaaaaagttagggaacgcagagtttttgtactcgaattttcgaaggacgccacaacataatccacgtgccccatcatgcactgctcttctctcatggtgactacctagtcagcgaattttgtctttctgattaacacctggataactcgaacacgtcctagctcacactcacacaacttcttttactccaacttaaacaatatggccaatcctcgtcgtaagtaacatttcaattgggaagcaggtagagctcttgttgttttctcttaactagtctgattgcaaacgttgctctattgtcggtctatccgtcatccagagcgaaataagtcccgatctggcgcgaaggctatccggacgacgaagaacaaatcttcggctaaaaaggttgttattcgaggaccggctcctcttgtcgctgcttgggacaagaagaagactgtgcttcaaaagtaagctcctgtattttctacttgatgttctaaatgttcttcttcctctcaaaaaatccggctcggtaccacacgcaacggcatggtaacttactcttatgtgtgtacatcctgttatctatcctattcgccacgtttctcgtcgctcttagctacacagatcttggtcttctctccactcttgcccctcgtcgagcgggtggaattgaaaaggagattttccccatctcgtcgtccaaccctactaccaagctcgctcctcccaagatcgaggttacatcttctcttccgtctggaaagatcccaaaaggatatggaaggattgtgagggacgaagctggaaatgtggttgacattatcttggctgaggaggatgcggaggagatggaggttgagcaggagcctgaggaggacattgggaaggggaaaggaaaggcaaaacaattggtcaaaggtttgtgcatatttcctttccgtttttctgttctcctttctctctcctccccttcttctggaaacagcaacctaaacatccaattcgctgtatcaaatcagaacttgaggaatacgccgcttcccgtccatcgagcaaacctcttcgccacaccactcctgccgaacaagagttccttcgagctctctacgccaagtacggccaggacaccgctgcgatgagcagagacatcaagctcaacaagttgcaaaagacgaaaggagagattgagaagagtgtcaggagggctggtggttgggagaacgttatcagagattgaaagggaaggaagaattagtgtgatcttctcatctcctcttctttcatttgggcctgatggcgctcagttgtacattactctatccataccgcatctcttttgtttcctttgcgacgagccgttgtcctcactttattcaagtttacaatggcaatcacaataaatcaagcaagaacagacaaataagccataagccctttctagaacttgaaatttccctcatcccctcttccacttgtttttcctctatccttccttggaccggcctgtcttgatttcttcctacccatctcttccgccaccatgtccgacaaatcttcagtgtctcgactagaagaaacggccgaggcttgccgatgggcttcatatcgggctgccagttcttctttgctcatcgatgcgagctccgatggatccaacgtgagttcgatcgtacccgccttgcgctagagacaaggagaaaagattgggatcagacctccaaatattagagagagagaaaagacattgccggggagaattatttaaaaaaaaagacaaaccttgacgccacggtcctcttcacccaataccctggtgggtgctgatccattgagatcatagcccctctcacttcccatgaaacctctgacgccaatgtgcttctcctcgatgactttgtacaactgttgaggctccacactctccgttcctgccctggaaaacgagtcctctctgtcttttcggatatcaaggaattctggagtctccataccggaaggaacggtagagattgtgctctgaagaccagaaggagtctctgttccggctgcatcagccgaatcagggaagatctcgggagtggaagatgtggttgattcatcatcggaatcagactcttcttcttcgtcttcaggttctaattcaccccaaagttcagtctcgatcggcaacgcgtattgatcctctgcagggttcccttgaacaccaagcacgtctccgtatatcggccggttgtactcgtccactgggggtcggccccatcctccggggtggaaaccccattgggcaccgttaggaataggcgcgttgagacctttgattcgaagtgacgggtacgaaggtggtggtccgtatcgctgcattgagatcaaccacggaggaggagcaagaggtgggatggacaacgcctctgtgagttcttccgacagctctcctggtcgtttctctttcaagtcggcctcaagctctttcccttcgtagtagctgatgagagaagagaaggtgcaaagtgaagccataccggtatcagcaaacgaagtcctttgattgctgaaaagcattcaaagaaaactacatacatctctccaaagtccgtcatcttgggtttggtcgcgaatcggaaaaacgcgtcgtgaagcttttggtaatcgatatcaatcttgcccattttgggctgaactcgttctctcgtcttttgtttcaagctctgctccttctccttctccttgatagcatcccgctgggtagcgattccggtatcggcgatgtgcgctgagagatgttaaataagaacatcagtacatacctagacgtcaggcagtatgttcaaggaaatatggacaaacagggaagttggaaggctgctttctcgactcctcgcttgccttggagataatctcgcttggctgaccagtggccgggcacagggacagtacttttgatgcaaagacgcgtgaatttagctgtagtaacttaagggaaccagacatgattgagccgctcttaaaaaggagggaactcactttcggtacgacttgagttctacaagtaaccttggatcacgagccgttggatccgtccattcgatcacttccggatgggacaccaatgatttcagatctgctactgttaatctctgcaaaggtttggccgggccgttcagttcttaatctttccaagccaagtctggattcctccacgagtgaagcagactcagtcaaacgcgtgcgagatcagggggagaggacgaaccgccagctttctctgcttctttttgctcaacttctctttctcggctcgctcatcctgatcttcctcgtcctcatcttcttcgtccgaataaataacctctcctttactggcaataccgtctccgcccactccgtcgacctgttagaattcgaccccaacatgtaaagagataggattcggaaggcatcagatatcgacgaaagcggaatcacaacgtcggtagtatcaacacgtaccggtgtagactggtcgtcggcctggaagcgttgaaggacggaagcaaacgaagcgaacgcaggatctgaaagatcaatggatgctgtcagatcttcgaccgaggtagcaggtgtctatttgaacccaagttacgatgagcccccatatcatagaaggaaaggcgagaatgcacacaagtcagtcgataggcgaggcggaaagcattaaaagagttctgtcttgtactcttgagagaaatcgatgaggacttacacttagctcgctctcaacttcactctcggcatctactgtactctctgcatccgtggtctctgcgtctgtgtggtctgtatgtccattgggtgtttctaccgacgcattggccttcttagctttcttcttgtccctcttgagctgatttcgagagagcttctgaggtctagcctccgaattggttgacgatgatggtggcggcatgatcagtcagaaattgaaggatatgaaagctgaccaaaggatgaagaaagggtcttgggtcctaaaggatgtggatcgcaaataagaaagacagagacagagagaggatatgagcgatgtatagtgatggttacagatcaggtgttacgcgtctcgctcagtgatatcctgttcgatttacgcaatctcttactcgttatgctaattcctgatactcattgcttagtctctaacacacttctctattgatgttggatactcaaatatcggttctttgccctgattgtcaagtacaaattcatctcttccccgtgtctatctatcgagaggtgctccatgcatcctcagagatgttcaaagaaaggaaaaactctgtgatgcagtaatgtacttttctggcaaagtgatcaaagttcctaatggtagacatcagctccgcgtcccgccctgatatccttgaaatatacttcatgatcacttcctattttctgcccgcgttccttccgatcttatatgtagtttagtccaagcaagtgacgcacttctatagctcaaggtggccattattttcctgcacatgcggatcttccacgcttcagtttgtcagaaccgctcttgcgcgcggacaatgaaaagtaaacaaagtgttaactacctcatcgttgaaatgctcgtatgtcagttctcctatcttgtgattctgaaaaaggcctgggaagatctagatatttgcaggctctgtagttaactatcttgaaatttttgtggaaattacgcgtaaagaaagagacaaatgacaacgagaagggcaagttcaggagggagaggaatcaaagaagaagagaaggatcatcatccacacaaacgaatcgttgctcggagatgtcgttcacattgaaacgagccgactctcggcttagttgtcttttgtatcactcttgttgttctttaaacacttcttcactcgctctacggctaccagtattctggtttgccatctccattccgcctcatccatcaccattcctcgcgcatgcgctcttacctccttcgattattctaatttgcagtccataatttacattgcactatttgatgcccttctctttcttatctatcagaccttatttactctctctctctctcttttgtttttgatcggacctgtactcggaaggggcagaacatacacaatcaccgtttgctggatagccggtcgtgttaaaacaccaaatggatcggacgtaacccgaatctggaggttactaaccctaacggacggttgaaagagatgccgtcctgctgcgcttttttctcccccccccttagccgtcttttttcttgcctttcgttttctacccctcttcttttccttcctccacgcttcgtctctcctttttttttttcttttctttnnnnnnnnnntcctctcggtagtcgttcgacctcatcctctctcaaactctacatcaacatcataatgtccacctacagaccctccgctttgttctcctccgctttccccatcctctccatcgccgagaagggtgagaaggccggagctttcctcgaccagaaggccgctgaggccaaggccggtcttgagaaggccgcttctattggtgatcttaaggcccagcaggcccagcaggccgtcctcgaggcctctggcaagaagcccaccggtgtcgacctttacgctcgattcgctgttgccggagtaagcttcttttctccttatcataacagcgtcgtccattatagtatcatcagatggtcgagcgatggcttgctcctaattttttccctctgccccctcaagggagaggaaaagattaggagtataatatatccctttacacagatggttcttgtatgcctgtcttctctcaaagttctcatcactgacccactttgcctacacacatcatctgcttcaacaggctcttggatgtgccatcactcacggtcagtccatcttgcttcgattgcgtaattcagagttaaagttgggagtactgagcgatggaccgcccaattttcctctttacgtcttcctttccatctcttcatattctaggtgccgccactcctatggatgtcgtcaagaccaagattcagcttgagcctaaggtctacaacaaggttcgttaattgatatctctagtcgtctttcgatcacctacctctatttttctcgcttggcaaagttttgttgctcatagtctctcccttctgtgtcatctctctttgtcttcttccagggtgttatcgctgccgcccgatccatcgtcgccgctgatggtgctggagctctcttgaccggtcttggacccaccattgtatgttccgctaccaatttgcatatcccattatagtcgagagctcatcatgcataacctctctgtcatctctacataggtcggatactccatccagggagccttcaagttcggaggatacgagttctggaagaagaaggccatgtgagtttatgtgcttctgcctgcttcgactggataggctattttgatactgacattgatcctgctgttgtctatcaatctagtgactactacggtatcgaggctgcccgagagaaccgacaggctatttacctcggagcttccgccatcgccgagttcttcgccgatgtcgctctttgccctcttgaggccgtccgaatccgattggtctcccagccttctttcgctaacggtcttggtggtggattcgcccgaatcgcgcgagaggagggtcttggaggattctacgccggttttggtcccatcctcttcaagcaggttccttagtgagtatcggtcgttttcatacctctttaacacaaaatgtgatctggatacttagactgcaagttcacctcttacacagcaccatggccaagttcgccgtgtacgaggttgctttcgagaagatctgcactgctgccggcaagaagccctctgagcttaccgagggtaccaagactaccttcaacttgggagctggtttgatcgccggtttggccgctgctttcatctcccagcccgctgatacccttctctctcgaatgaacaagaccaagggtgcccccggagagggtatggtctcccgacttgcgggtctttccaaggagctcggtatcaagggactttacggaggaatgaccgctcgattcgtcatgatcggtaccctcaccgccggtcagttcggtctctacggttccatcaagagcgccctcggagctactggtggtgtcgagatcgctaaggcctaaataaggttgtaagcagtaagagagaaagcctgtgggtgggtgtttaagtgagagagggaggagaagcgtcctcccttttgttccttgttaaatctgcgaattctttcattctccctccttgttctccttctctcttttgtgtttcttttgcacgttcccttgtatatgaaatcacgctcggttccgccttgttcttctcttttgttacgtgtcttgtttccccatcccctcgcgccttttgcttcttttctccatcatcttctttatccttttttttttctagaatgtatcctttggattgcacattgtctctgaagcgttggcacaagtgaagtactacacacattggtatgaagaaacaaaatatgatcctggcatgtttgctgctctaacagtatatctttttctgaacgtgttttcctttcttcgtttcaaataagacgcatgacatcgagaacagtaacatgaaagaggaagctagttgaatacccactacagaacaacaaagaaaaaaaaacagagaagagacgaaatcagtcacagtcttttttcaaagtttttgatgcaagtcgagagcaaaggatgaaggagaagaaggtggtgaagtggaatcagcgatcttggtgattaatgttagttctcataggctagatgggcctctgaagtagcaaatatatggttgatcatcattttgaagtggtagccaggcgagctgcagggaaaggaaggaagtgtatgcacaacagaagaggaaaagacctaccgataccagacaaaagagaggagacctcaactgatcatatgggagacagagggagaacgaagggagaggaggggtagtgggagaaaaagaaatttggcctgaaaaattcagttgtccgtttacagagcgagggttagaagagccgatatccatagcgaccgtcgtcaagggagccgacgcttagctagcgggctgcggacaaggcggattgaccggaggaacccgtgttgtgcctggaccgctcatttcaccgaactcggccttcgggtgtcgacggaatgatgatgggcacgaacctcggccgaagctacgagggcggcacagatgatctctagatatggatgctccgagattagcagtgagctatctgacatatgcatatgtgcatccacataggtgaagatgaatgtatgtttctagttaaagaggtagagagaaaaggagagagaaagaaagaacgatgggaagagagaaagcaacacgaagacgaaaagtaatataacgctggatacaagactgaacgaattggaagtgatggctgggcaaaaagcgaaggacagagagagtgacgagtgattaggcagcctattgaatatttccaatgacctcctcttcttatcgactcatttgtcttgaaatccttttctcctcctctcctctcggtcgctctttcgtccgtcttccagccaacgtctcttccttctttctttcttcttcgttcaaataggtttcacaagcacacacattcatacatacatccacatccacactcttgacgtttctctcggttttttttccttcgttggaaggtacgtccctgccagggttggccatctcttcttactcttctcggatgaatatagttggaagggccttatcttttccatctccatcgcatcatcagccatgaaatctcatctagctctctttttttctttttctttctttttctttttcttccttctttttcgtctctccttcatccttgtgctcttcttggtctctattccaactcgattccttcctccttcttgattctttcttcatatagaaaggctctcctatatctactctgaaggattctttggatacatccgcattccatctcaattcaatacacctaacgcacacagatgcagacgatcgcccctatcgaagcttggacggctcatctgtcgtctgggttggatgctagcatgccttgtcagtcgttcatgctctctttccattcttctgcctcttgttctcattcgatttctccttttgacgtgtcctgactgtctatataaccacatagccacccctggaacgcctagccacacgtaagctcattctgcgtcgaccgccaacgcccagctcttctcgttctcatgctctgttgctccttcctttctctctttctaggatccaaaacatccgaaagaaggcagcaggccatggtggaccgctcaagaagcttatggttgccaaccgaggagtacgtgttgcctttttctcatatccttgttctatacttcccggaccgaataaggaacgcgccccacaggcctcaatactcagaacacgcgagctaggcactgagataaatcatttcttttggggatgctctaggaaatcgctattcgaatcttcagaaccgctcacgagttggcaatgactacggtggccatctactcttatgaagatcggctcggcgcgcacagacaaaaggtcagaagcgccccttctttctttctctctctctctctctctctttcttcgttctctgtctccctgtgttaccttcccccttccttttcttccctttatcttttctttttcttgactgcctttatgttgctcatctatgggagaaaatcagcttacaagttatatcttcacgtttgtgaaccctcctctacatggactcaactctccaggctgatgaagcctaccaggttggaaaaggcatggcccccgttgccgcctacctcgcccaggacgacatcatccgaatcgctctcgagcacggagtcgatatgatccaccccggatacggtttcttgtccgagaacgcggagttcgctcaaaagtgtcacgacgccggaatcatttttatcggaccgaggtccgatgtcattgccggcttgggagacaagacaacggctcgagcattgggtgcgtcccggtcccattatatcctgcgcccttttacgtgctcatcttccgaacttaacactaaatttaaccaacagccatcaagcacaacgtgcctgtcgtgcccgggacggagggagctgtctctgcctgggaggacgccgaggggttcaccaaggagtacggtttccccgtgatcatcaaggccgccttcggaggaggaggtcgaggtatgcgagtcgtccgagagcagtccgagatgaaggacgcctttgagcgagcaactagtgaagccaagagtgccttcggtgacggaacagttttcatcgagcgtacatctcatctttgccatcaacttgcccctaacttgctattgacggcccagctgactcgacatcatttcggaatgaacagggttccttgatcaccccaagcatattgaggttcagatcattggagatgatgacggcaacatcgtccacctctttgagagagattgttccgttcaacgacgacaccagaaggtccgtacactctcacccatctctgaatcgcaataaattgcatttctctgacgaagtttctatctacatcccgatacttcacaggtcgtcgagatcgctccggcacccgactgcagccaggaaaccctagacggtcttttcagggatgctaccacgatcggaaaggctattggttactccaacgcaggaacggtcgagttcttggttgaccagcagggtcgacactacttcatcgagttcgtcttcgatcttcctctcgtttctcttcctccttgacttgattgatatgtcgcgacttttgtcaggaaacttacatctcctgttctttttcttcttgccgctgtgtctaatagggtgaaccctcgaatccaggttgagcatactatcactggtgagtaaaactcaaacgaaacgcgtgatcgctctcctctttgcgctgcgtagaagctcaccgagtgtcctatattccgtgtccccgaacgatctacagagtgtatcaccggtatcgacatcgtcgccgcccagatccagatcgctgctggagcctctttggagaacctcggtctcatccaggccaacatctccaagcgaggatacgccattcagtgccgagttaccactgaagatgccgccaatggtttccagcctgatactggaaagatcgaggtctaccgaagctcgggcggaaacggtgtgcgactcgatactagcagtggtttcgccggtgctcaaatcacaccccactacgatagtttgctcgtcaaagtctcgtgcagcggagcgacctacgagatcgccaggagaaagatgctccgagcgttggtcgagttcagaatccgaggagtcaagacgaacattcctttccttttccggttgctcactcatgatgtcttcgtgtcaggtaacacctggacgacgttcatcgacgacactcccgatcttttcaaattggtgacttcccagaaccgagcacagaagttgttggcttaccttggagatgttgccgttaacggtagctccatcctcggtcagagcggacctcctggtttgaccgatgaggccgtcgtgcccaagttcatgtcaaaggaggacccgaccaagccgatcgataccaaccagccatgtctgaccggatggaggaacatcattgtaaacgagggtcccgaggctttcgctaaggctatccgagcctaccctggttgcttgatcatggataccacctggcgagatgcccaccagtccctcttggctactcgactccgaacgatcgacatggctaacatcgctcgggagaccagccacgctttgcagaatgcttacgccttggagtgctggggaggagccacatttgatgtttccatgcgattcctatacgaggacccttgggagagactacgaactcttcgaaagctcgttcccaacattcctttccaggctttggttcgaggagccaacgccgtcggctacacttcgtacccagacaacgccatctacgagttcagcaagcgagctgtggagaacgggttggatatcttccgagtgtttgattctttgaactacatcgaaaacatgaagctcggtatcgatgccgccaagaaggctggtggtgtggttgaggccgccgtttgttactctggtgacctttctgatcccaagaagaccaagtacactttggactattacctcggcttggttgaccagctagtcaaagagggtatccacgtccttgccatcaaggatatggctggtcttcttaagcccgctgccgctaccacccttatttccgccatccgaaaggctcacccggaccttccgatccacgtccactcccacgataccgccggtattgcggtgagctcaatgttggcctgtgctgctgccggagcagacgtagtcgatgtcgccatcgacgtcctctccggtcttacctcccagcccgccatgggagccgtggtctcagctctcgagcagtctgacctcggacctggtatcagccacgagcacatccagagcttgaacgattactggacccagatcagacagctgtactgctgcttcgaggccaacgtccgtgcttcggactctggtgtgtttgaccacgagatgcccggaggacagtacaccaacctccagttccaggctacccagctcggattgggcacccagtggacggagatcaagaagaagtacatcgaggccaatgagctcgccggaaacattatcaaggtcactccttcctccaaggtcattggagactttgctcagttcatggtctccaacaagctttccaagcaggacgtcctcgaacgagccgacactctagacttcccaacttccgtcgttgagttcttccagggacaccttggacagccctacgaaggattccctgagccccttgtgagcataccgctctgctttggtttgcgactggcgcttgtttgtgatttactgaacgagccgtcttcttttctattctttttcttttctttccttccattttagcgatccaaaatcatccgagacttgccaaggatcgataagcgaccgggactcaccatgcagcctctcaactttaagaagattaaggccgagcttcgggagaagtacggtaagacgatcacggactgtgatgtcaactcttacgcgatgtaccctaaggttttcgaagagttccgagggttcgtcgacaagtacggtgatctcagcgtggtccccaccaggttcttcctcgccaagccccagattggagaagagatgcacatctctatcgagcaaggaaagatgttgatcatcaagcttctcgctgtcggtccgattgatatgacgaagggcactcgtgagtgcttctttgagctcaacggagagacccgagcggtcttgattgaggacagagacgccgcgatcgagcaggtttctcgagagaaggccagcagcgatccaggttcggttggtggaccgatgtccggtgtcgtcattgaggtcagagtgaaggaaggccagaacatcaaggctggcgatccattggtcgtcctttcggcaatgaagatggagtccgtggtgtctgctcctgtctctggtcgagtcgccagagtggtcgttcagccttcggattcgattgctcagggagatcgtgagtcctatttttttttctctcgcaactgccgctcgatttagagaatcatgtcaatctgacaacccttcttttctttgttcttgggaaatttgaaacagtccttgtcgagatcaagcactagaggctttagatagtcaccttacatgctctactcaaacatgttactcgtttataaatctctttttggctcctcttcatctcgcctttctgtcggttatttatctcgttatatttcttgagtttaccgagtcgagtgtacgtttaccacgtctggttctaaatcttcttactgtccatcgagtctatcgtctggcgtagctcctgagagaggagcaggtagaggagtttcctgagccttctttaattgtatatgagcctttctttctatatcctcacaagtctttcgacctttttccttgtatctttcgatctctcgcctgttcgctttcagattcgtaaaagagaaaaccaccgaggacagatcggaacggaaacgttaaagttctcacaacttgaatagactgagaacaagaaaaaaagggaagaaacgaacgcaggaagaagaaggaatgatgggggaggaagaagagggcgaagaagaacggggtttacaaaggacgaagagggaacaagatgagaagagaaaagtgggaagaattacattatagagtaaatttgaagacggattccatatcaagtgtaagaaaaaggaaccaagataaacacggcgtgtccggcagatagggaagccaagaaggaaagagaggtagaatgagagggtaagatgaacgatgagaaaaaaaagagaaaacaggaggaaggcgaaaagagtagcgaagaggacgtgggggttcaagcgaagaaaaagagaaagagaagtcgaagagagacaaaggacaaatagaagaacgtctacgtttcgatcctaagcattcaaccaagatctttcctctcgcccgactcctcagtaacaacaccgacaactgcatccacaccacttaaaccaaggtcttcgtccgccttctcatctgattgaatatctcctacaccagtgcccgtgcctgagatagctccgttctcggctccatctgatgctgataacactccctgctgctgttgctgttgctgctgttgttgctgctgctgctgctgttggtgatgagccaactgagatagttggtcgaggtgatcttgaccgtgagaatgaggatgatcaagctcctgaggatgagatagagatctgttcggatctatatttgttcgcacgtccgatcgttcggttctcatcagtgttaatgccgttcgaagggccgcgttctcattacgaagctgttcaatcttgacttgggcttcttgccatctggagagatcaagggcataagaaaagagaataaatcggaatggtgagaaggctgctgcacatggatctgaggaaagccgatacatccttgctttatgtatgagaaaggtaaaaaaaagaggtctcaccttctgttggcatcagcttcgttttgttgagcgatcagaagttgctctgctttatccgataaatctttgatgtttctacgagcaaggaatatacatgttgttcaaaatattagcagctgaacgtgcacacagctccgaaccaagcaagcggcaaggaggtaaacagagagatcatgaagaccggacgaactgatctcttcgttgtctgaacgcccgttgagctttcctattctgctccgccctcttcgttttgctcaactctcttcctttaccttttctcccgtttccaccgccggagcttccttcaccctcggcctcaagatctccatgggcctgccctcccacatcggcacttccgaaatggtcgagctctcttccgtacggatcttccccaatcgatgactggatcccactatcttcgcccacaccagatgctcggtcggccaagagaggcaactgaccctgtccgccagtcgaatcgtccgtcggtccataaggcccaagatcatcggtatggtggagatgagggttcaagtgctgatgctggtgcgggtgttgatgaccgccctgctgaccgacgccaagaggggctgattgatgagcatgagtctgggactgtgagtgagcatagtgatggtcctgattggacgcgtacggatgggaaaccgacgggagggatggaagtgtgtggtacgtctggcctgcgagcggggcagaatgatcttctgaaggcgagtagatcgatggaggggaaagacgcggagagttgctttgtttacgctttttcgagactacaaggcaggtgggtttcattcattcgttaaatgcaggcagtatatcgaattagtattaagtagaaagaagtagtcaatgcctatttctgcgcgacgacgcgaaaacgaggacaaacctctaggtttcgaaggaccggcctttctgggatctaactcgtgatcatcggcgtcatggtcctggtcttccctatgagtggatgttgagtggaacgagtccgagaccggtagaggcaaatcttggattgttggttccgaagctgaacagacggcaagatcagtaaaggattctaagaatagacagcatgttctcacaggacgagcggttggtcagcaaaagtgtaagttgaaacgaagacgcgactatttctttttagaaaaaggttgggcagacgctcttcatcaatttccgaccgacagcgtccacactcagatgttccgcgtgattcactcggtataacttcgagatgtactctgctgagagcaatctgttcaattcggacgcgccttgctcctcatctatccatcgacttgtctgttcaagtggccgtcagaacgttacctcgcgtcgaaccatagattcgccggagttgtcatactcaagcaatcgtcgctcaaatctttaaacaggaaacaagagaaggaaagaggaaggcaaaggagaagaagaagacaacggagtgtcccttgaagaagaatgggttcttacctgaaggaggcgcgtctccgtgttcgtgttcttgaccttgctctgggtcggtagcacgttgatcatgatcgtccgttctgggaatccggtccaagtatgccctgagaacttcactcggtacttcgacgtgaccttgagagttttggatctgcatcggatggtgtcttgcctgcaatgtagaagatgatagagagagagtacacgatgagaagagcaaggacgacgatgaacgatgaagggaagatgatggttggtagagcgacgctttcggcaagttccacttacctaatcaaggccgagtctgactcagatcttaagtagtttattatgtcagtttcatatattcattcaactattcaaaatcatcatcaccttccaccgactctcgccgaagcctcgcatagagaacacgtcggccacgcagacacagcatacttgcacattcatccgcataggactgatattggcatccaggcgttcatactcacatactcaccgctgatatctcacgtactgaccattgaaagtttgtagattaattagaagagagagagagagagagactgtacggagggctgaatgtgtgtggagaaaaacccaagccccacgtaaggctgaccttcggatgagacaccaagctaataggaactcaaagaggaaaagaagggggacgatcaaattcctagcgcttctgcatgctcatagagtgctagtatcgacatcactttccgacaccttgtcttctcccatcgtgtagcctgaaaagttcatgttgcattccgaacgtgcgtaccaatgccgagagattctccacttggcagagtttatccacttggtttggttgcagtccaagatttattctacgttaatttaccggatggtcgcacgattgccaagcaggctcgattttttctgtcctatctcctcgttttcttctcttgtctcactctatctcctcacacacacgcagacggaacagctggcactgacctcgacactggccgttttctggccgaccgatcaattcctagtcatgcttccaaattcttgtgctcggtatttgcaaactggcgaagtcctcaccaccgtgcgatcacagcatgggcagatcaaaagaaggatagcgacgatgaacaaaaagtttgcgttaggtctctgctctataaagcccaacggtttgtagatcattcatctcttttctccttgtccatacagctcatcacacttctttctcctcttaaaaggcatttgattctcgccatatcatgccgacccttcacggtaagattttgtttcgtactcatggcattctcttcttcctacggctttacactcaccttatctacttgcgctctttgtcttgacagagtacgatttcttgtttgtctttgggttgatctttgctttcttggatgcctacggtatcggagcaaacgatgtaagtctttgacctttgaccaacggttgtactcaatcacatggcttacccttctctcccacaggttgccaactcgttcgccaccgcgatcgcctcaaagtctttgactttcaagcaggccatcgtcctaggaggtctgtgtgaattccttggagccttgctactcggagccaaagtcacggataccattcgaacaaagatcatcgatttgacactatttgaggataacgcaccgatgcttatgctcgccatggtgtgcgccctcgtcggatcttccgtctggctgacgatcgccacccgactcgccatgccggtctccacaacccattccatcactggtgccatcgtcggagttggtattgcggctggtggcggtggtgcggtcaactggacctggaacggtcttggaaaggtctttgcctcctgggtcgtcgctcctcttatcgccggagggtttgcctgtgtgagtctgaacaatctctttctctccttaattccctcttagggatcacttctcttatctatcatgattttcctactgtctgtcagattatcttcttgatcacaaagtatggagtccttcgaagggtcgaccagcgaaaggcggtcttggtcgctatcccatgttggttctttgtcactgcctctgtactcaccatgagtatcatctggaagggagcgcccgctcttggattggacaagcttcccaactcgaccatcgtccctgctatccttctcaccggtttcgttatcgccatcttgtctatagtctacgttttgccgtacgctcaccaacaagttcacaagaaggattacaacctccgaccttaccactttatcctcgggccatttgtcatgaaccgaccgtcacccgatcaggagctcaaccccaacaacttgtctgcgaaagaaaagattgatgccaacaaggctattgttgatgaagagaaatcttgtgaaggattggacgccgcttcttctggatcggatgtcatcaacccctcgcctttgaacacagagatcgagaagaaggacaaggtcgacccatctgttttcgtcggtcactgggctcttcctgccaacctatggcgcttcgttcgatacagaatccccaaagttcttctcacaggatggaacactgatcttcacgactactcgaccgaggataaggatcaaatcgagcgattgcatgccgctgcagagatctacggaaacgacaccgagcactactttacctacctccaagtcctgaccgcctgtaccgcctctttcgcccatggttcgaacgatgttgcaaacgccatcgggccgctctctacgatctacttgatctggtcttcaggctcgatcaccggttcaaaagctccggtccctacttggatcttggcctacggaggtatcggtatcgtgatcggtctggccacctacggttatcacatcatgagagtcctcggaaaccgaatcacccttgtttccccttccagaggattctccatggagctaggagcagccatcaccgtcgtactggcctcccagtttgctctgcccgtgtcgaccacccaatgcatcgtcggtgccacttgcttcgtcgggttgatgaactttgaaaaggacgcggtttcgtggccgacgatcaggtggatcttcatgtcttggctgttgactttaccctgcgctggtttgatgtctggtatcctctttggtatcatcatcaactgcccccgattctaaacgtaggggttgtgttcactttgcccatttttttctttttcttttttccttctgattctttcccatctttctttttggttcattctatat

SEQ ID NO: 184 - DNA, 19543 bp, Xanthophyllomyces dendrorhous
tatataaatatatagacaactattgtacagcgttctcgataactggggtctatctctccatcttgagcgcgacggcccatcatctattcgtctccttgtacataccttatctcattagactttcttctccttgctctatgatgcagcacgccaagaatctgtcccagttgtcaatcgtcatgttgtttattcaccttcattcgaccagcatcgcattattcggagcaaacaaaaaaaaccatttagatatatattgatcataggataagaatcgaagaaaagaagaagaagagggaatacaaaaacgagaagaacaaaaaggaaagtacagtcgactgggaagcaaagaacgcaaggacgagcgaaccttcacgcatactcctctgatgcctcaaagtcgaactagaagagacaactctgatccttgtcctaacattctgtttgactctccccatcttctactcgagacaagcgcctattagacaaacatatatggaagagagaaagcgatgcagagctcatatcccgacatactaaggatagagatcacaaagaaagcaaggaagagagatacaaagagaaggaaagagagacgagcgaaagacgaaggtttatgaatccgcagctgaaagaagcaaaggcgtagaggaaacgtgccaatcaagaaaaacgtccaaaaactacacgcgagacgaaccatctgattagtctatcgggaaaagaaagaaaaggcacatgtagtagtaagaataacagagtggaaagctgcatgaacgggtgggtaatgatcgaatcagaaagaactggtgaggagggtcacagggaatcttggtttccgctgcagcaaacccttccaagacaggagaatgcacatctctatggtgatcgaaagattctcatctaagtctgggcaaccttgcgcgcaacagttcgctcgctttctaatcgggctctattggcctcgaacgcggcatctcgactgtgatagatcggtttgttaagaatgattagtaaagagtcgtgtgacagatctgaagatgaggcgagagaaacggttgtaactgatgacgacataccattgctgcaaatgtgaacacttgtgctcttcaggcaaccgatgggtggaacagctatattcgaggtagagagacgcgcagtgagtcccagtcagcatctatttgcgaaacatctgtcagaccaataagatcactcagatctggcagaggacctacaaattgtaagagcaatgaggacatgttccgatcaatcggacagcagggttcggacatctgaatagccagagtaggaaagaatgaaacgaatgagcacgagagaaaagagaatcgcgccatgccgtgcaagaacgggaagagtctacgtactggacgcttgacgcggatgcgggttcctccttcttatcagtcgccggtggtggcgaagcgccattggtagcagcggcaggggaggatggagatgaggcaggtagaagaacaagagtcttgaactggcaacgacgtttggcaggcctgtcaacggagcaatgaagagtgggcaaagaaagaaaacccgaggaagggaagaaattgacggtcgtcggagcgggacagatcagtgattgcggtggagccagaaggtagataacggcaagacttcggacaaaacggaagacaacgcgacaacctacattctaataaacaggaattgggtttgagaacgctattaagggtacgggcgagggtgtggatgtaagagttcgagtgtgtgtggcgaggaagacgatgtttctttggttggttgttggctggttgttggttgttgatcgtgggtggaagctcaagagatctcgcacgcataaacctccacggtggatcccgctaaagcccggaggttttatgtggcggctgtggctgtgtcatttgtcacgtgggacgagtcagtgctacgccttaccctccagttatgtaccaatcattctatctagcttctgcttggtttatgggtgcatatcaagtacacagcacatacaatgacgcctggctttgtatcaaagtcaaatgagctttggaagtatgagacagaggggagtgtgatctcgaacgatggaggctgtagagattactgtgtacgctcaggatcttgttcttttcagttccttccttttttttccttggtcttgcttgttggtggtggtggtggtggaggaggatgctcatcgctgatttcttctttgcgaaaaaacacaccaaaatgatacctgaaaggcacacgagcgaacagcactatcgtatcttcgtctagctctcttgctcgctttgctgtcgttcgcgttgatcgagaaagtaagatttccgaatccaaatcaaaatcgtcataaccaggttagttcttctctctatctgtatatgttcttcgtcatcatcgctcacacccacttggctttgctcgggctgtgcgcttttatgagaagcctcagaccaatcctttggagaagcatatagctcttcctctaggtgtcatctttgcggctgcagctctcgtatgtctgggttctgggatgcacgtttactggaaaggcattcggggtttaagggatggcaaaggctttgtcggagcaggacggttcgttctctcgttccggccttcatcctctttcttttctttttgactcaaccttcatgtggcgccgtcgactgacaaacttgtccgatcacgtctacaaatcagagtcaacacggccatccttcttttgttagcacttgctatcactgtgggaacaatcgtgtttaccgttgcgtcttgagctatacgttctgcattctttctctcgttcagtattctctcctctatattctcgtgtacgtcggagaaactcaatatattgcgtagaccgatatactcgaatctgtatcttttaaatctagactgtattatgatatcctcccatcgttattcaatgcatcgatgcctctgccggttgattagttcgatcgcatactttattcaaagcggccgactgtggatgaggacgaacgataaaaaagaccggcgactgaaagagcgagatccggcatttttgccaatttcgcttatccgaggtttttcaactcgtcctttcttcagccttgtgatagccaactcgtttactctctctctcacaccccaaaagtcaccttcatcgattaaatagaccataaaaaatgacttacggtatgggtttcacgttgtcgtcaggtctcgtagacagaccaagttgaatactgaaatgctctcgaccaactctaaccgatcgtacggaaacagattattttgcttgcctgcctcttgcagaccgagatcagtgagtcctcttaggttgtcctctccaacagaaccttattgatcatccccatctcaatcttcatgcgtgaaattacctatttcttccatctggttcgctctttagaattgccggattgaacgaaggattcgcgaccgactcggcacctcacaaggtcaacctcggaatgggaacatacaaggatgagaatggtaaaccgtgggtgttgcccgtcgttcgaaaggttcgttctgatgtccgacagacggattgtgtttcaaattgagaatctgtccgagacaatcattcaacttcgaaaagctaaccaagcttttggggtcataaacaccaggcatcagccatcctagcagccaatgcagacctcgaccacgaatataacccaatctcagggatccccgagttttacaacgctgctgccaagttgatctttggacctaactccaaggctatcaaggaaggtcgagtgtcaaggtttgtccttttttgcttcttacccggtcggataggcatttttccaaattatgtttccacgtttttttgttttctcttttttccatttttcatgcattcattttcgtttttgttttattgctttatgccttcttttcgcgaccaacacagcactcacaccgtcagcggcacgggatccaaccagttgggcgcgctcttccttcaacacttttacgacttcccttcgtccggtaaaaagatccatgtcccaaatccgacttggggtaggttttgatcgttctcttgtccaaatatccatgtcttttgacgcaagcacattcaggctgatctgtttcctttctttttattattatcttctatcttttttcttctttttccaaatagtcaaccatgatcctctattcagactagctggcctcgaacccgtcgagtatgcatactacgatcccaagaccatcggcctcgacttccctggcttcaagggctcgctcgagcaggccgaggagggcagcgtgttcctggtgcatgcgtgtgcgcacaaccctaccggtgtggacccgacggctgagcagtgggaggagctggtggaggtgatccttgccaagaagcacttcatcttcattgatgccgcttaccaggtatttctcatttcagtttttttttctttcctttctttctttctttgttgtcttgtgcgaatggtcctgacaagtcttgatttgtttctccttgataatccacagggcttcgcatcaggggacttggataaggatgcaagcaccattcgactgttgacggatcgaaacgtgccgcttctcgtctgccaggtttgtttcttcctagaacctagacggaatgatcgcccggttctgatgttctttgtttctcgttgggactatcgtatttggtgtttcacagagtttctccaaggtatgttcagacgcaaataacaatagatacatcattcctcgtcaaacctaacgttacaccatatcttggcttttaatagaacgccggtctttacggtcaacgagtcggcgcccttcacgttgtgaccgctagtaaggcaatcgcccacaacgttcattctcaggttgagaacctccaacgagctcagatctcatgtcctcctgcctggggagcaagagtcgtcacattgatcttgaacactccggaattgttcgagttgtggaagatcgacgtcaaaatgatggcagacaggatcaaggcgattagaaagactttgagagccgagttagagaagttgggtacaccgggtacatgggatcacattaccaaccagatcggtatgtctcttcactctcagcccatttcattgacatcacgttgaaaactgattgacgtatgactgtttgcttcacaggtatgttctcgtacaccggcctgacgcccgctcaatctcgagcgctcatcgataaatcttactaccttctcagtatgtcttctgttatttgccttgctcaattcatcactcttcccatccgtcttgtaaacatagggtttaacggtttttggtatctccttttacgatcgaccagcttcgggaaggatctcgatgtctagtttgaatgagcacaacgtcgctgcctttgctaaagccatcgatgaggttgtccgagcttaagaatatatctttatctagaaaacaaaaccgcctagcggatgtctctttgttcaaaaatcctgttctctctctattttcaatatcttatttatcgagcaataccataaaaagccgagaaaagtcttattgtacgattgattttcccatgttgtagagcttctgaggctaaggaattagatcgatgtatgtaacaatttgagcccagcatccccacaatgtgtgcgtccagtgaccatatttccataagatccttacctgatgactgatgttgtcaagaccggtttcctattgagtatgaaggacgactactcgcctcgggtattttcgagcgggtagtgtgtgaaatccaaagaggggtggaaatgagtggtgacgacgacgcgacgttcgatgatgatgatcatcatcaacccttcacctccattcacacgctgacgactcttgtagagagacacacacacacacacacacacacacacacaccccggcatatacacaatctacatctttcagattatcaatacagatcttcaggatgagcacaccctccagctcgtctcgttatagaaacacacccggcacagcccgttctacctcttctttatcactcacccgtccgtcacagacaaagactagctcttcgtctactgctcttgtgcccgtgagggagaagactgggcagttcacgaagtccttggataggcaatatgttcttgaggtatgtaccttcgttttggtcggacatcttcggtaaagggctgcaaagagtttcgttcgactgcctgcacacatcctgatgattctccactttgtgatcgtctcatgacatactcgttcataggaagacgcctacacagaagccctatcagatatcatcgctcgagatttcttcccatctttagccagattggaggcgacgaatgcctatctggaagcggtggagagtatggacgaagagaagctggaggttagcgtaagaagattgttcgaggttgatggtggtcagacacctgttcatggttcgtccttccgtgtctctctctttggttcatcaactgctctctaacgagagagaagatcgagtttgaaagagctgctcttagatgctgtcttcttttcgtctcaccaatgcttctttatatccccaatgtgacaggcgacgccaggtctacacctatgccatcctatcaaacatcatccactccattgtggacatctcaaacgccttctcagacaccataccgaacacctgttcatcacccatctagcctctcgtcttctcaacgatttctagctggtacaacacctgctgcacccagctcgcttcccacgcttgataacttccaagcaaacttcacgtcagaagacaacgcttcattcaccagtatccttcaggaggaaaacggaaaacggaaagaaaagtacgcttgggcctatgagccagagcaaaaagtgaggcttcggttggaagaagcgcgagacaagtgggtcaagcggttaggaattgaggcctccggtcacgccgacgctgtgaaaagtcaggagacgaagttgttggagtcaggctcggcagatgggggcaagaggatgtcgatagaaccgaaattgctggataaaggaaaaggaaaggagctcgtgctctcttcgtcttccgaatctgacccgtcggcgatgcaggttaccacctttgctagacctgttgggacagaagaagaaacacctcttccatcggcggacatcgtcttacctgacgactcttatctggccaaggcattagtcgaggctggattaccaccgaccgctgtggatcagcatgcggtcgtactccgggaggaccgagcgaaaaacctgaaagagaaggctgagaaggacaagagggatatcgggcatgaaggttggccattcaaggtgcgttttttcctcgacctacccaacggaggatctatcgtcctgatgtgttgcttacctccttttgtgttgatggcgcttcagactcgtaattcattgatgtttgccccggacgtaaatgtctccccgcacgagattcaaaaggcagctgtgttaccttcgaatcaggctccgaaagcaattgttcattcgaacacacggttctccaatggactggaggacgattttgtaggagagttttcaggggtgaaccccaatgagccgcccagtccaacaagaagtcggattgcagctgctatcgatggaacaccttgtaagcttctttttaccgcattctcgattgtttctatcaaagccttttgcaaaatgtatcacttcttatctgacaccgtggctgatgatacaacggaacatcagacccagaatccgaatcctctgactctatgcccacagtaaacggttacccgcttgtccctacccaagcgtctccgacgccatcaagtctcggtccagaccgaatcaaacagcttctcacctggggtacacttctgtctactcctcgcgctcttggcgctctcggtgaggcaggtggagccacccctttcaggatcaaagaccctagtagaagggacgatatcggtcgacgactagcttcttctgctggcagagcgatttctgatcgcgcaaaaggtcttgtgcctgcgagttccaaagggagaaaacgaggtgtgggcgagatgaatccgccctcatggacatcgtccacaccgggcgataagctgaagaaaagggcagggagtacagtagagttgtcccccgcggggagagggttgttggcaaggacgcgactgggaagtctgacgcctcggtcaggaggaggcagtggcctgggagtctccggtaggacctcagaatcgggtggtagcagatctagaggggaacgtggatggagcggaggaaaaggtgatgggacgagagcagaggacatcagtaagcttgcttgggatgcgtctcctatgacatcctctcgtggcaaaggagcggaaagatgagcgccccaagaagtctcgaagggtgtacacaatcaatgctgtaccaccacattgactccatcatgaataccgaaagataaataaactgcaagagtcatcaagagcatgttgctgctactacttctgctgccaccacagatagcgccaaaacttacgtaatccattcgacccggcaactcgtccggaacttcccttgacttgctcctactttcttctctttctcccacaaccatctgttctttctcccggccaagtgtctattgtctcgttgatccatcatatatacatacaaaaatgactgccagtacgtctcagtttccttagatatgctcatcgtcgctggttgtgtgctggaagaaagccaaaagaaagatcactgctgccagctattgatctgttattgttgctgcttccatcatgatccgtaactgaccttgacctctctctttctcttctccttcgtccatctcattcgcacgctactagacgttttctccgagatctcttacgccgctcccgacccgtaagttggcatcctttgcttgcttggctgcacaagtccatctcgaacgcgccttactattctcaaatgatgtagagtatctcgtgattttttttgactcattctccctcttcatttcaacttcgggacgacccggccgcggcaaacatgatacaccttctctctcttttcgtatgccactggttctctccgatgactcacattgcccttggatattatcgggaaccatgatgtaaatcattcgtctgtgaatctttcaatatggacacgttcctctcggttgtacacacagcatctttgcccttacggccggttacaaggccgacccttcgcccaacaagatcaacttgggagtcggagcctaccgggacgacaccggaaaaccctgggttctgcccgtcgtcaagaaggtctgttccatctcttcttctctcgcctgcgatgaagtggtttcaggctttgtttgatcgtgttcagccgtcctgataccttattgaaaatttgatcttgcaaataggccgcggctttgatcgaggctgatggggagattgatcacgaatatcttccgatcgccggtcttcctgacttcgttgctggcgctgccaaattgatccttggagagaattcgccagctatcgctgagggacgagtcgccaggtttgcagtccttcttcttttcttcaatatacatcctgattcttcttgacttgattgactcatatctttgcttgtttggcgccctcccttcaaaaagtacacagaccatcagtggaactggtgccaaccacttgggagccttgttcttgcacaaattctaccctttccccagctctggaaagaaaatctacgtgtccaaccctacatggggtaagtctcaatcaatcttgttaccaaaatgagatccgacctgtctaacgtgtgtttctcaattcgatggacaccttatcgtagccaaccacaactctatcttcagcctcattggattcgagcccgtgccatacccctactacgatcccaagaccatcggcctcgacttccctggcttcaagggctcgctcgagcaggccgaggagggcagcgtgttcctggtgcatgcgtgtgcgcacaaccctaccggtgtggacccgacggctgagcagtgggaggagctggtggaggtgatccttgccaagaagcacttcatcttcctcgactctgcctaccagggctttgcttctggtgatctcgagaaggatgctacggccgtccgaatgatggtcgaccggggtgtccctttgctgatctgccagagtttcgccaagaacgccggtttgtacggtgagcgagtcggagcacttcacatcgtgcccggctccaaggaatccgcgacgaagattcagtctcaggttgctcttcttcagcgagccgagatctcttcgcctcccgcatggggagctcgagtgatggcgttgatcttgggcagcccacagttgtttgcggagtggaaggtccagatcaagcagatggccgatcgaatcatcgagatgcgacaacagttgagggccgagctcgagaggttgggtaccccaggaaagtggaaccacatcaccgaccagatcggtatgttctccttcaccggtttgaagcccgagcagaccaagatccttctcgaaaagtactctgtctacctcacctgtcagtcgatctcttaaccttttcaaccatgcacgccttgagggatgcttctgtattgacctatcatcgttcccatccttctattgaacaacgttttagctaacggccgaatctcgatggccggtcttaacaagtccaatgtatcgatctttgccaaggctgtcgatgaggtcgtccggggcgaggattccaaactctagatatagaggggaaattgtgggagtcttgttctttcttctttccgttctttcaatgtctgttcaagtctcggtgtaaattccatcgctgtttatatctttaatcgtcgttcagctagctgttctgccagacggatacaatcacgccagaaaaagaaaacgtctagagtatttcacgaacaaatggaatatcaaaagttgtttgctcattcagattgaactttcaattgcaaaccctgagaaacaaaacgagaaatactagggagcgcatttccctactttcaagctgttgattgttgaccatgagaaaacagagatcatatcctgtttcgaggagaaaaagaaaaagaaaaaaactctatgtaggtaacgaggtcggaggacgacattaaacaaatgcgatagagaagaatctggtagaatctgaagaagagattcaatggaaaaaaaatgaaaaaagagaacatagggattgtccatattggcttcgtcaagaataccagagtagaaaagagaagaaaaaggtcgtcactgaagaaaaaggagaaagaaaaaagacaagaggatgcacagatagagacaggacagaaaccaggctgcttacaacacatattaccagtgaccaagaagaaaacagaccagagaagaaaaagaagaaaaagaaagaaacaaagatgaggagagatgtgaagattcaaaaagacagatataaggcagagcagggagctcccccttaccagcctccggctcttccaccatacttatagaacatatcttccaaccctttcaatccatttcctttctcccactccaccaactcgaccttgccttcttggtttccaccatcagtgaaatcttcgaactcaacatcgacgcacatccctcttcgcttcccggtatacacatacatctttgctccgtccagttcatccgatcgagctgaggtttcttgaggagtgagtaggccaccagcaccgaatttgtaggtagacgaagtggaggatgaggaggaaggattgatgtatttgatgtgagtaaaggttgagccttgtcggacaccggctgtgtgtttgaggaggtttgcgtgtaggaaaagtggggtatccgtgtatggtgggaggtcatactgttgaagggttatccgatgtttcgtttttggaatcaatcattgtactcacaaaacgaagaagaaagagaaaaggaagacggaaggaatttacctgaagcatagtgttcccacaaaatcggttgttctctgccgggttcaaatttccagcagagctcaaccatctaggagaagcagcaaagggaatgtcgagcatatggaacgcatatctgaacgtgtccttgtcgcctccgctaagtttgaaccaaaactcgtgatctttctgcatgaggcctgccaagtgtagagctgcgagattgaggccgttgtttcctcgtttgtcaattagaatctggccagagtcaatctgccattctttgtgatcacatgtttctcccaagatcctgaagattgcgttctcggctatggtattgtgaaagaaaagttgggaggacggatgtgatcagtaatttgaaggatgtgtggttagaatcaacatttcctttactcacgatgatcctaacagatgcgattcatgatcatggatacaatctaacatcagcattgctccacttgaccgactcggcacataggcgcgcatgagatgacgaaccttggtgatatcaggccagaacactgctttaccgcctgacaagtacagctcactctcaaacagatgcgccggatctttcaacgggatattgtcctagttcaatatttgtttccatgacgtccgacaaaggtatagtagagaaagaggagaggtgagcaaaagtttgaaagaagagagaagtacagatatccaaacacgcacagagtctaagtagaggacttccgagaatgtagatttcaagatcgatagcgctttgatctctgtacatcagccacccgtgaaaagaatgaaataattagtaagaattgaaacaaaagtcgccctctcaagaatcggattcagataaagaagtaaaagacgaacgaaagttcttccagatgttcaaccgcttaactccttcaaactgaacgagcgtgcctccgagttgctcgatctcgtctcgttcagactgggcggtgatctctcccgggaagtgaaacacttgaacgggaaggtttgaatgaagctcgtttcggaggattcgaagaagagcgagtaaccgagctgtcgtgtcctgattcgtagccgagaagaaaagggagcaagaagatcagcttcttgcagatgacaacgactcgataaacatgagatatagaaagaaagcaagaagacaaagaaaaaccaactctatttccaccagcgacgacaatacctcttccatcccctttaccctcatcctcaacccacgtgaccttctcgccttgactttccagagcgttgagaccgttgaccaactgctctctcctcatcaccacatcatccgttccgatggccttccaatgctttcgttcgcctttcaactgatcagggttcacctgtcgatcatggaccttcaacgggcatgcctttacgttttccttcaatgcctccgcgtacgaacggaccgggcgatccaggaaggcctgaagagatcgagccaacctatcctttgatgatgttgttgtcgtcgtcgtcttggttgacgatgattccgagtcggaggtatcatccgaagacgagctcagacccgagcccgagcttgaactcgaactcgaacccgagctacctgaaggccttgcatcgacctcaacgaccggcaagatatggacctcgccgttcccctctgtgaccttgacgacctcctcgaagtctaccgatggtttcgggtcgaccggcaggccgacacctccttctggctgagaggtacccaagtcaatcgaaggagggatgatcggtggagatgttgacttttcccattctgcttccaactctgccgcgttcgatgtcgccgagcctgcctctgataaagaggacgaggggagcgggagcgacgagagatagtatactgtgagaagactagtgagaacgatagtgagcacgaggacgaacacgtttgtctttctgagcaacatgtcgagaaggaggtccgacgagaagtgagagaacggtcaagaacgtatcgcagctgttgacctaaagatggaagctcaaaagaggctgagcaagggaaaagaaagttgactgcgcacgtcatgattctggggtttcctcctaaaggtttagaaggaaagaacgacctaggcgatgagggtgggtagtagacacagatgacagatggcagacggcagacagaggacattgctcatcattatagtacaatcgattgaatctttgatggacgatctctctttcgagaccctttttttttctctctctcattcgttcttgtcgacttccacctcccttcttttcgatattaaaaaagaaacgacacaaaaggaaactaatcggaggagagataaagagaagaaagcgaagagaagatgaataaacgtaaaacaagatgggaaaatagaggagccaatgtcgcttaagcggaagaagcaggggtggaaggcctggtgttggctcgcttctgaaggacagcttccctcctggctcggataccagcagcaagcgcgtcgagacacggcacggtctgctcccaggacaagcaagctattattttgagggaaggaaagataggggaagaagtgactacgtcaattccaagtacgataaaataaaataaaaaaacgacaagagctggaaggtcaaacagagaagatcttaccatcagtcacagagacaccgtaggccaaaccggcaggaccctcggacgggaccttctgctgaccctcattcaagttggactcgatcatgacacccataatcttggaggatgtttcaccgtgggacaactggtcggcctgtgaggaaggttcgagtccagaacaaacggacaagagatcagccttcttgcaactgatgagacaagattataacggtagaaaagaacgaacgatgtccttgcagacgatgatctggttctcgtgcttcttgttagagtttccgtgcgagcagtcgatctgttttaaacagacgtattgaaaaatccagagcgcgtaccagatgacgttagccaaaagcgacaggagacggaaaagcaagagtctgctcaacgaaccatcagcttctgaatcaaattggccttggcaagcttctcagctacagccttgacatggtcggcagagtagttgggtcccttgttggatcctcggagaatgatgtgtgtcgaggggttaccgaccgtctcgacgatagcactcaaaccctgcttggtgaccgagaggaaggtgtggccagaggcggcagctcggatggcgtcgacggcgatatcgatcgagccgtccgttccgttcttgaaaccaacagccatactgagcgcagaggccaactctcggtggacctgactctcagtggttcgagcaccaatggctcccctgtcaagtgtaaaagatggtggtagggtgagcgggtctgaccggaaggcgcatccgatcatcacggacagcacagaggaacaggaaacgcaccaagagaccaactcggcggtgtactgaggagagatcgtgtcgaggaactcacaggccgagggaagacctagctgagtgatgtcgagcaagagttttcgggcagttcgaagtccctggttgatggcgaagctgaggaagtaagacggaagtgaatggggtgagtcgatagaaaccaaggacaggaaagataacagttaagaaaggacatacgagccgttcatgtccgggtctgagagtcgatacaaacggtaggtaggattaattattcgtgaacttgattggtatgggaaatcgacgactatacacaccgttgataagaccctatgatgtgaagggaaagaaatgataggatcaatctcgacgtaggtattaagaagaagcttcatagagattgaaacataccttccaaccgacggtcgttcgaggcttctcgaagtagactctcactaatatccgtttgtgttcgttgagcgcctagtgtcagaaccactagagccagcgaagaagaacatggagaggaaaaaaaagagcatgtagacgaactcaagatgtggaggtcctccttgtgctcgtcggcgtacgctttgaggagcttggcatactccattgcggctccgacgtcgtgaacggaacagggtccgacgatgacgagtagcctgtcgtcatctcccttgatactataaaggtaaaagtatgagtagaatgggcgagtcagaacgatgataataaacgacagttagaagggaacaaccaggtagaacgataagaaagacgactaacatatcatcggtggcgcttcgtccgtcctgagaagagtgttcgattgaacagacgaaagattccggcgttgatgagtgtgagtgaaaaagagacggagagacgtggtaagcgaatgtttggaagaaggaggtaaacgtttatggttgtgaagaaacccccgatgttctcggagcggataggcaaggcaagggaaaaaggcatctgggatttttcatctcttcttattcagatgctccaagatatgtgagcgctgaacaggcttgcgcacgaagtacgcttggactgctctgtttgcttgatacgagtgaaaagaaggagaagaacgaaagaaaaagaaggagaaaaaaagtgaaaacgacttacgagaacagtctgggcacccttgaggtcgagcggcaactcctcctggaggatctgaggaggaatcaacggccggacgaccttgacgcgcttgtcgtccagctcaagcagagcctgctgaacggtgtgggatctagtaggagccatgatgtgtgattgagcaggtgcaaaatgtaggtgtatgtctgatagaaagagtgtgtgtgtgtgctttggagtgtgcgggaatggacgagtggatgaaaagcgaaaaacacttagataaaggtatatatgaaatatgaaaatcaaatataattcaaatacaattcaaataaaaaaatccaacgactcctattgaaccgcctggaatgactcgaccggtgagactttgggcttccatcgttcttctttcgtgcttccctcacttgcttgcttgtatgagtacccagtctagcgcaattctccatctgctacccactcagagcatcgttcttgctcgcccatcgtatgttggatcgatccctggaagcgcacccctgggcaggccatcatcacctttctcggccgatggggtgacgtcagggaggtgactgcttacataatcaggcctagaactattgaccgccgtagtacttccaaacatttttggtaatgttatcgtttgaactcattcatccatcatcatcatcatcatcatcatcgtcccatccatcatcccacccaatcctatcgtatcctatcccatccagtgcgtacatcacacatctagccatgatcctcaacgttcacatcccgagcaacacctcgttcgctcttccatacagaggtcggtgcattcatgtttctatctctccgttcacctcacataccactcttctttcttctcgcttagacttgtttcttttccgctacgtccatattcatccatccatcgatgtcctgaacctttctcttttcaacactacagagtccgactcgtttccgatcatcaaatccaggatcgctgataaagcagggtaagtctaaacccaatgtgttcccggcttaatatccgtcctatatctcactgtcccgttcaaatcttcttcctccttctgcctccatcccattcagcgtcccttctggcgagacaatcggttcatccaagaacggctaccgtctgcagtatacctacaaatcttcgtcctttgctctcgatgaccaggacgacttcgatatccttcaggctcgattttcctcgtcatcggacgagccagacattcatctagtcccccctccgttggctgcacctactcctgctcccttgtcatccactaccaacaaaaacgcgaacaacaacactgctgccccctctccgtcaaagcctcgacttcagtctcagcccaaacctcagatctacacttcttctccagctcagtcccagcagtcgcaacctcaacagcatgaacagtcatccagtccacaccgacgactgccgtcactctcgatgttgaaacctcatatcaagaaatcgacccacccagcgtcaattccttctgctatccccgccccgctttcgattccgccgtcatccggcccgggagagccgttcggtggccgatcgggcagtccggcagctgctaacggatctccgaaaacaaagtcatcgaaacgactcttgggcggtggcctgctgccgagcgagaaacagtcggacggaggtagactgaagcatcagcttgaattcgaaaacttccacggaaacaacggggtcagaacggttgtcggcagcatcggtcctgttaaggatgtgagaatgttgctaaaagcagggtacagacatgtgtacatttcacgagcgtttgcccagcaaaacggctttatcccgaacgacgctacccctggctggtacggttacggcgggcttgttaagtacgttctctccacctcggttgttgtccgcttgacataagggcctcttcaaatcctgacttgctttctttctctatcctttttctcaatttcacaccgcttcttagccttggtcaatggcccatccaggtaggatccgtcgctcagaaacatactgtcatgctgtccgaagagacacactttgatgtcgtgctcggtcgatcatggatggaaaagatgggtgtcaaaacggatccgttggacgagacgagtgttgtgttgatgaacggactgaaaggagaggacggcgatggcgagaaagtcgcgtgtgacttggtggtcattaaggatggaaggtatgttcttgtctctgcttccttgatcatcttgcccttcctttatccaggtcaagcaacgttgacattgttttcatccttgttcgctttcaatcttgtgtatttcagaggtgaagttgtcaccatcacttaggcaccttcacagaaggggacacaactatatgatacacatcttgattcgtcctctctgctttttcaattctcctttctttctttctttctttctttccttccttacttcattcgtcgtaattctgccttttcctctttgctcttctgtcgatcttgcctgctctgctttataaggatatctaattttataatctgatctcatggttgtacatagctcggctcgactcacgtgattgtacagccacatgatccttaatcacgtgactgtcgacgcgtcttgacgcgtccacactatgttcatcttcccttctcccacgcgtctgttttctcttggcctcctccaagctgagcgctaggtgagcctttgggttttgcctcctcttcagtctccaactctgctgatttgcaaacctccggagctaggttgactcgctcagatacaagacttgtcaaacgtttcgctttccacacacaagacaatagtagaagcgtgagcgaagaacagaaaaataattgaaagaacattcaaatatataattcagatatacttaattaaaaataaaaacattcccccccccccccccc

SEQ ID NO: 185 - DNA, 9114 bp, Xanthophyllomyces dendrorhous
  misc_feature (622)..(631): n is a, c, g, or t
cccacccccctcgcgtcgcctttctttttgtttctcattcctctccttccgacagtcaacctccgacagacatcccacagaaggctacgacgctgctcgtcgattcagagaacaggaatcttccacctgaaggtcttccctcctcgcttacactggagcgattgctccatccaacacttatactcctgcggcaacctaccctccatcccaacccttagctttcacttccaaccgcagatctatttttccctgcgggatctctttcgagtgacaacaaacactttaccttttcacatcttttttccaccgtcctctctgtctctctgttccctctgtcttccttccggttggatcctgctatcttatctcctgtcaaaaggcgttcatctttcgttttaatacctattcatcgaagtattcactcattgatctatcatcaacaaatcaagcaccaatcatgccgtcttctgtatcatcaaccggctctcaccaggcttacccaacagttcatgcctctagagctgctcctcggccaccttcgactgctcatgcgtatgcttacacccaagaacaacatcagcagcagcagcagcagcaacaacaacaacaacaacaacaacannnnnnnnnnacaacaacaacaacaacaacaacaacaacaacaacagccaccaaaacaccgaaacgcacctgcccctcccactcaacatcaacgacctaggtcaacggcttctaaccaacaggctcaggcgcatccaccgggagagactagcaatcagcgagtgctcaaacggacggcagagagggatcgaagaggagacgaagttaagcgaatcggggcgtggaggatcggaaaaactataggaaagggctcgtctggtgagtctccccggatggtttattctcttttctttatgaggtttcgcttttactgatcttttgtcggttcacttttgtcctttcccttcattttgcctccttgtctgtcgcaggtcgagtcaaactcgcccagcattccaaaacgggacagctggcagcgatcaagatcgtgccgaaacatgcgatcttgtcgtcaagattatcgatctccgaggcaggtgccaaggcagataaggtccttcagggaatcgagagggaaatcgtcatcatgaagctgattgatcatccgaatgtcatgaatctttatgacgtctgggagacaaacggagaactgtgagttggctcggtctttccctctctactctcgcgaaagcgactccatttcttcaactaatcatcttctctcatccgcttcagatatatcattatggaatatgtacagggaggcgaactgtttgactacttggtttccaaaggcaagctacctccctcagaggcgctccattactttcaacaaattatccatgccgtagactattgccaccgtttcaacatctgccaccgagatctcaaaccagaaaacttgctgttggacggtcagcgaaatatcaaggtggctgatttcggaatggctgcctggcaggcgggtgaacggctgttggaaacgagttgtggaagtcctcattacgccagtcccgagattgtcgccgttcgtttctcttgtctttttccgtatgtgtctgtaggattctagaaaacttactcctgatttctcctcgtttctcttctctttttttctgactcgttttccaggggaaagcttataatggagcagcctcggacatttggtcgtgcggtgtcatcctctatgctcttctctccggtcgacttccgtttgatgacgataacatccgagtactcctccagaaagttaagttgggacggtttgaaatgccaaatgagattgagggctcagcgagggatttactgttccgaatgatggatagaaatcctgataccagaatcaccgttcgttttctttctttctttctttcttttttttgcgttcttctcttcgtcgtcatctgtttagcagtttacgtggcgtttacttatcatatctgccttgttttcttcctttgatcttacgattgtcctatacccctttccgagagaatagatgccagagatcatccaacatcctttttttatctcgtctccccgtcgacagatcgacggtcaggcatttgtcgttccaccctctatcgaggatatcgacagaccgatcgagagcgaaagcgatatcgatccggacatcttaggaaacctgaggacgttgttccatggagagaaagacagcgtcatcgtcaaggggctactgtctcacgagtttgtcctgcttgtttttcgagacttctcggctccgtcgcgattgagtgttcgctatgctgatcgttttgtatttgacttttaggaaaacatgggaaaagacaatctaccatctcttgcaagattaccgggcgaaacatctcgagaatttcaatatggatgacgacgacgttgttattcctaccagaacccgatctaaagctcatcactctgaccatcactcccaggcccaaggtcaaacccagtccgtgaaccgacaggcctcttctgcatccacctctggcgcaccatcgtcgacgacgacgactgggggagcaagaagacacgtcgtttctcatcggcgaaagacgagtgtgacgatcgcgaaatattctgagaaagggtcgtcccctcagtcgtctccctcaaaggatcgagtgatgagagctcaagcgaccagaccgtctgccccgacgcctaccaaggcttccaatgctaatcccacctcgaatgggaccacacaagtgggatcatcttcagcacaagcagcgccgcctgtgaggatgccttcgattcgaacggcgcctcctcgatctccagtcggacctcgacctccgttgtctcctcgagaatcttcgtaccagtcatccggtgccggaatcagttatcctttgtctccagtgatgacgacgacgacgacagcagtagcagcaccgagttcaactttgatgactaacaagtctgcctatttaccagaaattcatgttcaaaacgcaacacctcaacgaccacctacccttgtacttgcccagaacctggctcttcctccgacgcccacctcacccggattccacaataacggatcgttcttctcagccgacatgtctagagaaaccgtcggttccccaagttcctctatcaacggtggcagtcccgctgggtacaccccgttgtctctaggaggttcactcggaacacccgccagtttggcttcccctctacagatggatcagttcgaagatgcggaagacgacaattccgatctcgcatcgatttattccaatgcaatgacgttcgaggctcaatcgccaggagcaggaagcatccttagcgctcacggaaacggaggcagaccagcttccgtttggacaaactcatccgatcatgggatcaaccctagtaacatcgggttggggatccaatatcgacctggcggaacaggaggaggttctcatcagaatggcggtggtggatcgaaacattcgagtgtgtcttcggccggtggggcttacgtccacgggggagcaggcgagaatggctacagggattcatacggtagtcagggaagtaaaggaagtagaatcggaggggctgaccatcaacatcagcaacgagagagagagagggagagggagagagaaagggactatactcatcctcatgcccaccaccatcaccatcagaatcaaaatcaccaccatcagcaacagagtcatcaacaacagcagcaacaaaggtctcctctgggagaaacaaacgggttcagagctcaaaactcggcggggaaccaacctatgccgctgggaggatcttctgtcaagcctgccggaaagaagggtatgtgtttcttatccgttcatcggtgctatgcatcttctttgccttgccttgccttctcaagtcgaaaaggccctctcttatgatacccatctgactttggtgattgcgctttactcgatcagtctcggctgtagattcttcggccggacatcgtccatcccggtctgcaccttcttcagagcccaacaagcgatcatggttctccaacctgttctccttcaaagccccgtcgtatacactgtactctctctcggatcgccgaaccaccttgatgaccgctaaacatctccttgaatcatatggtgtggtgtgcacccaagagggttcttctctcctccttcgttgcaagcgagatgaaatcagggatccctcgaacgtcatcactgtttccaaagccgtcaagttcagagtggaagtctctgcttgcggagaaaaagtagggaacgcaagtgggtttgtgacaatgttggtgatggttcaagagaagggcgcattgagtacgttgaagggtgtttacggtctggtcaagaaggactggtcgttggacgaaccgaaaacgtcgagtgctgggctggttggagacagagcggcttcacctcctccgttggggggtggattcatctatgtctaagtgcatatcgcgcgttgcgcctctttcttcattctcttttccttttccttttcgttctctcatcatctcagttgttgtttcggttcctattcttcttgttttccccatctcttggctacggcaggacttttcttttcatctcatttctgggtctccatctgttttcctgtctactcattaatctaatcagatcttttgaatgataccttcaatcttatttttgaacctccatctcgtctttttctcaattcatcccaaatgctccctagatcctcactccaatatgccttttttctttcctgccttcgtcttcgtctttttcttgttcttttattgtcttgatccactttctttgcctcgttcagaaccaagactgcctatgttctcgtcgtgcctatgaatttgctgttttccatatcttgggttcaacccagtcgttctcgcggtcttcaaatcgatcttgagtgacctccacatttgcgacagaatcaaccaaagaaacgattagattttgatttatttatttttccttaaagcacacatatatcccgcttcttctcattctgttcactccgcttcgtcatcctctccatccggcccgaaccctaagagatcacacagaccatcctcgacaacagccaaccatttggccagatctgcagtcgtctttcctagctcggcgtagactgcagaatgggtggccaacgaagcgtaatctaacggagggacagaaggtagatcctcagtctgctggagttgatggttgtatacattttggtttggattgctataaatgtgattatgattgtgagtgtgggcatagttcgatgagggatatgtcatcccggatacaccaccgttacctccagctccaccaagggacgaagagatattcatgacggaaggttgaggtgagattactctactagagttaattcctgaaggaccgggtgttataggtcttgattgattcgttccggggaaaccgttggtcgctgaagatgttgatgacccacctcccgttcccccgattccaggtcctcctgcgccgccggcgccattactgctactgttgttgctgttgctaccaccaccaccgagtcctccgttatgactgctactgctgctgttgccgttcaaagcagaagacgtcgcggcgatcaagaatctactcatcgagtttgatgaggtagacggcgaaggtggtagaaggtcaagtgaattcaacagaggtggtggatgaagtttcaacatatccttcagccctcctccactcgctgctgctgctgctgctgctcctcctattccattgccattcccgttggctccagaggaaatggcctgaattccactagacatcatcatcgctccgggcgaccttgaattccaacctccaccgccaccgttgctactgataccaggatgagcctctccccggctgtgacttcgttctctacctgcgctaacaggtacagcgatcgacaagcccggtccgccaccatgagaactcgcgaaagccccggttgcgcttctgaccatgcccggtctgttgaacacgttggaccccagacctccgttggaagaagaggagacggaggcggtctccatgatgggcatggtggcttgtctagctactgatggtcttcgagaaccaacaaccgcacgaggtgtgggtgtcaatccgtgaggtgcattggcagaggagagacctggataatgagggagcgatgaagtgattccatccggcttaggcggtggagaggatgggatttgtaggtttgaagtggccgaatgaagctgaggactagggttgccgaaggaaggtgaggcaggcgagggagaggaagaaggcaaggaggcattagtcggaggtgaagccgttactctaggatggagattagttcttggaccagatggtgaacttcctgctactgccgagggggaggaagaggaagagatatccacattcacaggctgttgctgctgctgctgctgattcgaatgtgaagccattgatttgttcaaatctggcttggctgtaccctcctgatcaggaaaccttggtagatgaacgccaccagagataggcgaagctcctctggcatcaggacctgcctgaaatggatctataggagggggatttgaaggatcttcgaacagtctgcgaagagagctagggggaagagtcgatcctggtccaggcggtggaggcagggtgtcgggtaaagattgaacagaagatgggattggtagagaagacgacgaggcagaaggtctgaaagttgaaaggtcggaggaatgattgtatgttgaacctgaatcgctattttggaatgttggatccgaaagagcataaggcgagtctgaaagtttgtacgtctgtgtttttatggccgcacgcgcatcaaattgaaaagcgtcaacaatgttggaggagagatgaggaaagaaagagaaagcgaagagacaacgggacgcacattgaaaagccaatcatcctgcttgccatcaagtccgaattcattatcatttccgtccccatagatactcattgctagacttgacctgtttgcattgggctcccttccggcttctacccttgtgaggacatctttcaaaggaacgagttgcgctttcgctacagatttgatccatttagtctttatgagttcatctgccgagagacgctgagggaaaggaatcagaagcagataaacagttcagcgccgactcctccaacttgatggcaaaccgaacgagaacaggaacactgacttcctctggaacttcattcagacaatccgcagcgaaatccctcatttcctttgaccaaccttccttttcgctcaacctgggcggcttgttttttgggatcaacatgatgactctcattggatcttccccactcaaaggaggttctccgttctcactggctaattctaacagggtgatcccgagtgaccacacgtcagctttggtatcatatggtgaacctagaaggatctctggtgccatccagtatggagttcctacgaacgtcagacgtttcgtgctgtttgaggaagaaagaaaaagcggggcggagactccaaagtcgcataacgtcacccgagggacagaggtgagaaggatatttgccgctggatggttgatgatgtttgttacatgcgttgcaataaagggaatcaactttattgctctctgagtccaacaaggaaggcagggaggacgaacctttaatatctctatgaattacacctagtcggttgagaaagctgagcgcggtgagaacctcccgaatgacgagtgctatacatctttcatctagcttggtcgcttgtcgctatttcagaagggaagaaagagggatccccattcagccctcagagaacaagaaagtcgtccaacaagtctatttgtccgatagaaacctagaagcaccgaactcaaagctcaagaggcaaagaaagacaaggactaaccaaagctctgagactaccgccttctgcgaaatccatggcaatccagaccttcggtccctcgacccaacaaccgaaatacctcgtcacgttgttcttctctgcctctccacttttagccatggcttgtaacatccctacttctctctgtatttcaagtgtatcatcatctgcctgatcgaggtcaatgcattttagagcgaggataaaggatgtcggtgggtggatcgctttatagaccgatccgtatgctccttggccgactttgtcgagtcgctgatcgacaaatcacaaacagacaaaagacattcagaaccaacgtaccctcgaagcaagaggagagctctcgagtgagggagaatacagactttaaatattcgactaggctgtgaactttttgggagactactcaacgcctccgagaacgtcctctccgctattgccgtcgccgtggccattatctctccttctttgctctattcggtgttttcttcctttctacaatcgaacgatataggacctagcgaccaagatatccaacgacctggctaaagagcgaggtccagttggggacaggatgagtaagacaagaaaacaagaaaggccagcccggtcaggtctgggtgtgggtatagatgtgaaagcgaaggctaaggcgaacagatacggttcacgtaactacggaaacccaagaaactacacgcgtcgcgtcgacgcgttccagacgcgccacgcgttcgggcgtgccaggattcatattgcgcttgactctttatacttttgtcggccgagaggaatcaggaatagaaggaaaactagatggggggggagtttgcaggaaggaccaagagagcatggaggtcttggatcggaccggaagcggtcaccatgatactttgtttgatggatcgagaaatatctgggtctaaatttgtaactgaatctctagctctggtcctgattccggttaaagattttgaattgaagattttgggtgtataatgtatgtgtgtatggatgaatggatataaccgatcgaccgaggagaatgtaaaagagaacagaaggaagagaagagaagagaagagtaaaaaggttggtttcaaggggggaaaggatagaaagagctataaaccc

SEQ ID NO: 186 - DNA, 12497 bp, Xanthophyllomyces dendrorhous
ccccccggcagagacgactcattcgagatcacaggcaaagactgagagaaggacaaatcaaaccagagggacaagcactcctactacatgactacacactcattcttcgcctgttctctagtcggtctagctatctttccaccttttgctcctagtttctttagttctgttgatgaagacccgcgagaagggaggaaacgcacaagaaggaccacgattagaacattggatctgaatataaggagaagagttagagagactgacctgcgagccgctgtgtcgccctatgtagaccagacccgaaatcagcacatgggaagaaagagaagagagtaaacgggtcagatgtcatgaacggtctctccttgcgcggacggatacgagatagaaatatatgaatgaaaccctcgacaaacctcttgttgtgttgaactgagagaaaagcagagaatggaagacatggacatccggttgagattaattttctttgtgcccaagaactgcaagtatgcgtatgataagaaagcattggagaaaagacgaacgagcagcacggttgtaccatcctttggccgcttccagatctgggttggttcctatgccttgttcgctgtaatctatagaggagaagaagaagaagaagattagaaaaatcacaacatcgatcttatctgatgactaaaaattgagagagagagagaaggaagggacatacaaccgacggcatactctgctttggcgagtcccttgttagccgcctttcgtgcccaaaggaaggactccgagtctgactgtttgagtactccttctgtttgaggtggtcgaaaagttagagaggaataaaagaaagagaagagaacaagacgatcgttagcccttgacagaaaggccactaggcgacagggagaagaagaggacaaaggaactgaccactccctgtgagataccatccactgagggcaagctctgcttctgcgttccccttctcagccgcctttgtataccaactgatgctctttctcggatcgacctcgcaagtgaggtttccatattcgaaacaggttcccaactttagttgactgggcggataacctagctgggcagcttgagtgaaaaactctctggcgagtgcatgatcgagatggatgtactgagtgaatctggccggtgggttctcgtgcatcatccctagttcatgtagagcgtgtggattagaggcatccgcctgtgaggccgccaatctcaaccaatggacaccctctctgacgttctgagcttgttggagttttccttcaaggaggatcattcccaatcgatacatcgctgtggtgtcacccaaagaggctgcctttcggaagaacagaatggcccggttaggttctcgtctggtaccggcaccgagttcgttgcagactgccgaacggtaggtcgctcccggatggttttgtttggacgcctggagatagagcgtgtaagccttttctggatctgcctggagacctagttggccggtaccgtacaggtctgcgaggaagaactgggcgtccgccaagggttcttccgactgggtagccaactttttgatcaacttgagagactctccgatcaaagtgtctctgtacttccttcctgcttttgggtcatgcgtcgatatctcggaccccaactttttggcggcctcgatgaggtactttgcgaacgcaaactgggcttccgagtccgggtctcttttcattcgagctcggtactcgtccacgaaagcctttgtgtacggtggctttctggtgtcgaccgtagcggaggaaccttggcgtttcgcattggacgagccaatcacagtacccgaccgaacgagagatgtcccagagagagaagagcctgaagaagccgctcgggatagggatgggccgccgggagaggctatcgagccttgagggatcggtggcatcgagggcatcggcggcatgggaggtctgaacactgggggataaccgaccacgccagtcgccgcggcgtggtaagggttcgaatagtccgcctgtggtgaatagcttgggtacgcagggccggccgagtgttgttgttgttgttgttgctgttggtgatggtagccggtgttggcagcggtattattgatattgttggggttgcccgcctggtaggacgcgtagcccgggccgggtgccctcgaaggaggaccgttgaaagaagttggaagtgggtatccaccgataggagggtcataaccttctgggcccaactccagactccttacgctgggtgttcctcgcccgttgttgggtctcgagtagctctgttgatgaggatatggatgtggatatgggtgagggtgaggatgtggatgcgaagggtgcgagagggactgctgctgttgctgaatgactgaaccttgagggcccatatcgaaacttctaacggactgagctcttgagtttgcactcggtgtccttccgaaattcggcccagagggaaaggcgtttgaacggttggagattgagctctgagatctgttcgacatggacgtctgagaccggttggggattggatccgatagtctgatggctgagaagttcaggccgttgacctggtcggtcgagacagagtcctgaatagttggcgagtttgtttgaggggcaacggagaaagaagcagaggggctggaagaggacgaggcggccagggcagaggcagaggcagaagcggagctagaggacggatcaaagtacgcgcctgaagttgaagcatcgtacgatggaagtggcggtgaggatggactgtgtggtggagactgtgagcgtccatcgagatggccggggttcggccgagctgtagttggtaagaacgagaatgaggagggagaaggcagggagaagggaaagcgaggcgaggaaacatggaaaaggagaaagaacgaaagaagacaacacagaaacaagtagaggccgtcagactcaacacgaacgagacatcaacacggatagagagcagcaacagcagcaccaagaaggacgacacaacaaaggtaagagagcaagaagaaacacggacagtagtttatggtcgacgagttttcagcactccatctttgttgaacaacaggaggcgacgcggtatgtttccccgagagcggtttagcatgaccctgatagctctctggcatgtgggagggcacagcggaagacaaagagggaggagatggcgattgagagtgaatgagagcgagcacccgtgctggtgtccgtgagagtgagtgggtgaacggaacacaacgagagatcgaggagagagacgaaagaagaagcaacacacggtttcggtcgttcgacctgacgaccgatctgttcgttttgctcacactcagttctatcagacactcatatatatatatgctctatgttagggataacatgtacgactgtcgccatagatctgtggataccaaggatcattccattgtagacacggagagctgctcggacgcaagcacatagtgggaatcttatgggctgtgtggaatgcagcaagcgtgcgttccatcttcttgtagctgacggagaggacttgtggccatgtcaagatatcatctggttgctgatacacatgctgtgttctccaaggcacatgtacatgctatccttgatgtataggcacccaacgtctgtcgagctctccaccagacaacatggcataggatggtcctagggaatagggatagcagccttcagcatgtctaccctcgtgtctctctctctttatgaactctctccagcttctccctgtatatctatgttctctcttctacctctttcctgcttctctctgcactctatatcttccctccgttccctccacgctctccatctgctctctgtgtatgttctccatgctgtatgctgtatgctgggcatacaggctgggaacgcccataaccctaaccagaaaattcctcggccggccgggacgaaaacacgcacacgacattcccagcgttcaacttgcaacgttgaccttggacgttgagctcactgttcccgttgttcccttgttcccatccctctcacatgctcatcggttgaggtgtctgggtgttgatctgttgtcctgtcatctttgctgctcgctttatcactttccttcctcctctccttctcctcatagcttcgctcgccctctatgagcttcaacttcaactgggaacatgcgttctctcctgccttccacgagtccgctaaatcggtcctcgagaccgcactcaacaagggaaacactccggcgctcatcgtaggtaagatcgaggttagagagcttcatatggggacaatcgtgagtccttcccgttcagttcttgcctttcttgccgtctgagttcgccgtcattctcgctgagcattcgtttcttcttcctttcccttgctctcgccgtgtttgtatacacactctttctctttctcttaattacgcctcctttctctcttttctcactgtctcggtccctatcaaccacgctcgctctccttcagcctcctacattgaccctgctcgagatcggcgaccttcagaaggatcggttcagaggaatctttagactcggttatgccggtgactctcatatcgtcgttggatgtagagtccaggtgagaaccaactatgactctttttcgttcaagctattgtcgaggctgatcttgcttcctttctgctcttctcttcgttttcgtgctctctctcatgtcttgttttatgctctctcgtgcatcttcctatgaccccttttgtaccttctccctcacttcctctcttcatgctccattctgtactctcacccgatgtccatcctaggccaatccactttcaccttctccatcaccgctgccgacatcgacgacaccgctggcggcacaccggccgttgctagtgccgatggccctccggctgtcatccctcaaattacgagcgatcgttgtgcttgttgtgtctaaacagaagggaatcaccctcgtgttcaagaacgacccgctcgaatctctccaggtcagctctacgttcgactcgatccaagtcctcaaaggattcatccagaaagagatcgaaggcgcgttgagagagatgttcagagaggaccttcccgggatcatccatactctcagtcagaaatggttcgcacccgaggagccctcagccggaggacaaagtaggatgccctttcattccaatcttgaatcgggtagtatccctagagatttctctgcttcctcctcgacatcttccggtgatgtctcctcatgtgcaccagcctcggcctactacccttcctcatcctcctccgtctcctctccaccgacatccccaccgtcaagtcattcggtcttcactgatcgatccctgttctccgatcctcatctacaagcttcctcctctactagtgcctatactccgcctctatcacccacagaatcacacgcgacgttccccgatctggaagaatatgatccgacctacggtttcagatccaaacactctgtcttaccctcctcttctacgtctaccccgacggcagcaaccaactctatccgttcaggagcagaaggagaaccaaaggcaggcctacgaacgatggacgactcgaactcgacacccacctcggccggaccacagggttaccgtccccgatcaagaccccatctcgggccaggtcttggtctcttgggtttcatggaccccgaggctggtataacaggagggccttcaaccagtagcgggagtgggagcgccgagagtgactttgggttttccggccaaaccatcacgacgagcacaagttcactctactcaaactttcatcaggcccgacgtctgccggggagggaacgagccgagtcgaacgcggcaacgttcagaccgaaacacgtccaacggatgtcacttcctgctatattctcacctgtggtctctccttcaaagtcgaccgccactcgttcaggctatcctcaaaagtcaacagcccctcggggggcagagaaccatcagtctcatcacgggaaacaatctggacttcagcctcaaacgggtagatcgagagcgtatcacttctcggagtctaccaatccttcaggctcgtatgataacaggtcgacccctcctttgtctcaatcgactacaccatcgagaacgtcccccttaatatcaactcctctaggttccccacctctatcgacagacggaagtcgaccgtcgtccttgtcctcgtcttcgtcggcttatatgccagcttatcgatcgagaactcacccctcaacaccaagcgcacataccgactctatgtactcccgtccatcggtcgcccggtcgactatcaacacacacagaccatcctcttcgatagcagccacagaactctcctctgatcgttcatcctcctccccaagaggtcttccagaaacattggaccatttgtcgctcctctcgttatcaaatcagacgttgtcaccctacaccagagaactagctcacgtagccgtgagatctcaacctccttctcaaagacttcttgatgatccggctggtgggtacccttcacccgctggctatttccctggagccggaatgggaacaaggaaagcgacgagaaggaaacttcataggttcacgacatcacccgccgtgccgaccgtatctaaaccagatccctcagttcctcttcatgggagggctaccagtccgaaacagccgttcgatccttccccagtagccgcagggcagagaccaggaataggcgtacacagagaaagctatgggtttccatcgatagatcaatccggtctagatgtgtcttccggtccagttttatcagaccggcctacgcctagatcaggagggaaagcaatgggagagggaaggagggattcaggagtgcctgtcccggtcggttggcgcgatgggttcacagggccgttcgcgggtaaggctggatttgtgatgtgatggggaggaggttgctgtttctttagtgttcttctattgttcttgtacacatgcttttttgcccttccttcttctttcgtggtggttcgtcgaggatgattgatgcattcttcctcctccctcctcattcattcatcatctctgtccatgttcacaactctgacgatttctcttgtttctttctctctttcctcaagcaatgtatttacgtatcatacctcatctcttctcgtttcatcttattgccccctctctctctgttctaagcaacctcttgtcttccagtcttatacatagtctcgatcttgatatcttagtcttgatctatgccctggtctcgaaattcaccatgactatatatcgaccggagatcgatgattattctatttcctctatttctgtctttgttgcaaacgagccgaacctgttgagaaaacgaagagtaagaagaagatgcatgcgcgggtatgtactttcaagaggaggaagtgaagatataaatgacgcgacgcgacgcgtcacgtcagctcgaacgccaactgatgctcaccctcaatcttactcattttgttctccgtacgactcattatccttcttctgtcttgcgatctttcactcatattcgaggacatctcattcaacaagatcgcaagcagaagcaccaacaagatcgagatccaggcgcgaaccggcttgttgacaggaaagaatcgagatcagagctgaagcgagcgaatataattaagtggtcagcctcagaaatgaagagtcctaaaacccttcctgccggaacacagtctcatgctctggatcgaggcaaatgcgaaagtaggaagcgtaaagaaccatcgacaccgatgtcgagcggagcagaaccgacgggtaaagaagaacctgtcttgaaatcgatcaaaatccatccgatgtttgctcctaaatctcagtccttgccctcggataaaggaccctcggattgggattcgaatgtcccgttcgtattttcgttcctcaatcttcttcttgtttctttccttgcaggctatctcttgctgattggactgggatcatttgtgcgtgcggacgatcgttaacagaaagtcgctcttgaaatatacccatctggatcctttcacctctgttaccccccctgtcttctcaacagaggaagatgaagacctcaaacttaaacgaaagaggaaagtagcgttctttgatttggacgggacgttgatcaagacaaagtcaggagcgacctttcccaaaggcgatacggattgggtttggtggagtcctatggtgaaggatgaattgacccggttggcccagcttgggtttgtctcttatcctttccctcttgcattgtcatgttctgctcggtcttcgagaaaatgtcttaacgattggtttatttgaagggcagatttcttgtcgttgtgatatcaaaccagaacggattgaaagcgccgagtacaaagatgcacaaagcctggaaactcaaaattgagcatatctccacccaggtttgtcctcttcattttctctctatctctggttttctacatactgatgttcatccttctactctcaaccttaactatgcgcatgggatccgatgtctttctagttgaaggcgaccccatttctcgtcttggcagcacttgagaaagaccagtaccgaaaaccaatgttggggatgtttgatcattatgtcgaaattctatcatcaaatgatatgactttaggtttgtttgccttctgttcttcttctcttgtttggaatgttctgtagttaaacattcgtataccttgcgtcttttcctatggctgtttgagcgcctgcagattcagaagagtcattctatgtaggagacgccgctggtcgaaagaaggatcatggtgatggtgatcgaaagtgggcagagaatgctggtctaaagttctataccccagaggtgagttcctctccatcatctctcgattcgagatgtggattctgaccaccaatgttctctttctggtggggtccctctggggtttgaaaagatgtactttggtaagaaagacgaagctttaccgcctctctctggattcagaccacgagaccttgaaccatgtatgttctctttctcccttattcgaaagactcttactcgttcatactaaaggcttgtaagaaactctcataaaacgcgctaggtccatcgatcacaccgacatcgactccactcttctcatcaccttcgtcgaaccgatcagaagtcatccttctcgtaggctcaccaggttctggtaaatccacgttcttcgaatcgttctgtctaccaaacggatatgttagagtgaatcaagacgaactcggcacgagggtcaagtgcgagagaaaagtagaagaggtattgactgagggaggtcgttgtgtcattggtgagtcgattaggttcatatttcctacacgtgcgcgcgtatgtgtgtgtgcgtacagggattggaagaagagaacattagtttaacaatcattcgaggcgaaatagacaacacgaacagagacaaagcaactcgggcagcatacatcaaaatcgcccgacaacacaacgttcccattcggtgagtccttcttgcatcactctccgttgtatcaatccaaaatctgatcatacatgaacatcatctcttggagaaaagttgcttcttgttcccgtctcagccggcgttagagaaacacaacaacttgttcaggttatatcccacgtcatcaggatctcacgtgcctgagatggctcttgcttcatataggaaagggtttgaagaaccaactgtggatgaagggttcgacgaggatatcaagcgaatatcactcatcggagagctaggaaaagggttgatcgacgagaaacagaaagccaggtgggaaggctggatgaactagatgaagtagatgaactagatgaacgtcatcctgtactttcacgcagtcagatcagctatcgatatgctacatttcatctcattacattctttctaatttgcttcgtttcctctagccacgtttgtttcatgtgcttcaaggaagcccagcacctgaagtaacctcaggcgtgacactagtctcgacggcggcgcttctagcagcggtcaaacgatcgctctcagcttggtttttgtaagcttgagaggcggaagaggcgtcatctataaaagatcattcaaacgacgttcgcaattagcaaattgataaagccggttgacgactgaactcaggctaaagaaaggactgattttcagaagatgaggaatagactaacgggaggctcggacattggaagggacatcgtctctcagctctggatcttctgaagcaagatactcctgtttcatctcaacattctgacgttttatgtcatggaagagagaaaaaaggaaaggagaggagaacaagcaaacataagcaatcttgatgcgcgaggagataagatttcaacgtacattagcttgctgatcgtgttctacaatcttctctttgatcttattgacgattcccatctttgcgctcaaatataagtatgcgaatgaatgtgcgtatggtgaagaaaacagaatgattggaacgaaggtgacgactacttttctctttatgtgttgagttgggatgcttgcgtcatgatatcccacgtgacccaagagattgtggctatgcagttagtaacccaacatcaatcccatttcttcttaaccctttctctttagcaactttcttggatacgacggacgtcgtttgatgctgacctggtcgtctttgttgaatagaataacagccagtatatcgttcagatctcttatgaatccacacggacggtccaatccgtcagaactaccggctatagccatcattgggacaaccggggttgggaaatccaaactggccattcaactcgcccagtacatatcttccgtcggacagaatgaacaaggatcgacaatggagagtacaggaggatgggattcagcagagatcataaatgccgattcaatccaaatctttaaagggttagatgttattaccaacaaagtgacggaggaggagatgcagaatgtgcctcatcgcttgattggtgtggttgatccaaggggagagagaggttggggaatgaagaggtgggttgaggtaacaatggacgaggtgagaagctttctgtttcaatccgtttctttacatgcttgatatagtgcgcgctttccgtcattcgaaggctcaatggactcctccttcgccggtcgtacaacagatatcagaactacacgctcaacgatccatcccgctcatcacgggtggtacaacctattgggtacagcatcttctctttccgctcgggaagccatcaacgccttctcctctgtcatcttcatcaactagtacggtccatgtacctttccgtccaactccctctccttccctatctagctttctctctgtgcttcctgagccactcttgcctgccgagaaggatctcctagagtcgcttccatcgctaccattgaagccggacgaaaagcttgcgctaccgctccatgagctcttgagaaagctagatcctattttggctgataaatggcactggagggatacaaggaaagtgttaagagggttggaatctgtgtggaatgagggtaagagagaaagtgaggtttggatggagcaagcaagaaagaagacggagaatcaggactgggagaagaaaaggtatgtcaatcttgtacgagagcgtacaaggatgaaactgactgatggcattttcctctttgtcggacgggacataggtaccgaacactcattttctggctctacgcaccatccgaaatccttaaccctcgacttgattctcgaatagacaaaatgattgaggtgaattgttatctgttctcactcttgtatcctcagacgattattctgactctcatgagttcctcttcacgatgaatgtctagcttgggctccttcctgaacttcgtgaaatgcgcgaaatagctgacgaacacgcctcgtccttgaaagagagcacaacccaatctgatccgaatgattcgacttcgggtatctttcaggcaattggctacaaagagttttctggaattccgacaaaagacctcacgacagaagctgcagacaccatacctttcaaagatgcggttgaacggatgaagatgacgactcgccagtatgcgaagagccaggtcaagtggatcacaggaaagttgggaccggaagtagaagagagggtggagagggaaagagaagggttgttcctcttagacgcaagtggttcgttcctagcttagatgcccatgcattcctctcgctcctctatctctaaaacggatacgactgattgatcttctttcttacggatggaataatgatcagatctagaaaagtgggatgataaagtgttggcaccagcattatccgtcttgaggggtaagtagcgtgttgttccccc

SEQ ID NO: 187 - DNA, 2852 bp, Xanthophyllomyces dendrorhous
cacacaacctatacacatgacgatcccagcttattccctgcttctacccatagctttcctcaatgaacagcctctcccgtcgccaacttcgattggtggttctcatgccgatacattgctttcatcactttcgaatagttccaagtcgtaagtcgtcatctaccaaagagataccattgatctcctcattgactttaagtgcacaaaacaagcagtacgctaccgaagggcactccgcacagatgcgagctctgctcgaccttgaatgagccatatatggtgatgctcgacccctcgaccgacacaccggaaggtgccagggtgaagcacgagcggggaaagagacatcaatcgtacgtcctttcttctcttccatcaattttaaatgtatagaatcaggcaagttcaagtaaagttgctgacagttcgaatatcgtcgctttgcgttgtggtttccttttcagaatcttgcgaaaaatgaaacgagcggaggaggcgcctcgatacgaagaattgcgcagagaggccagaaagcgagccgatttgaaagctctcgagcaggataagccgaaggaaggagacatagtcagctctgataaagcctagataaatatataataatctttcccttcgttcatgctgcacaacgtgtttgaggagagaagatcaacgccaaacaggagattgcgctatgtttgagtctgaatgatcacaaacatggttacaggcggaagagccctttggcttatcacaacaaacttcgactcttctctctcctcaccttcagtcgttgacctcgaccttctcttcttgagccttctttcgctctctctgctgtctctgtctcttacagcaagtacaagcatacagacgacgtgtctctgcatcccaaaacttcaccggtgtcttagatcccgctgtccgcctgtgacatgatgcagtccggctcggttcaagcgtatcccaaccaaccaactcaacctacgtcgtactttcaacggcctacccaacagcagcaacagcagcaacagcagcaacagcagcaacagcaacagcaacagcaacagaagcagcagcagcagcaacgcataccatcacaatctgctctttcttcatcccaacgttcaaccgagagccaaccgtcgtatgcctatgcccagtcacatggtagacagggtagcttgagcagtagccgaacaggagccggaggcggagcaggagagtttggacagattaatggagctaatgaccaagctggacaacttgcagatgataggaaagacatcacaagggtctactgggaagctctgagaacatcattggctgatctcttgagcaaaggttcgtctgcttcctccctagactctattttcaatcacttctttgagacaggccgcaatggatcacgcatggccccggtcgcgctataagaatttctcataacgctgatcagaaaccttcttgttgtatgctcgatcattcagagccaccaaatgctcgaagtcacgcccgattgaaacttgtccgattaacaaaacagcaatttcacgagctcaccatggatgtttacgatgaactcttacgtcgaaattccatctctgaaggaggaccggacatccctgggttgccctatcgacaagacttccactcgagaagaaacgaggccagacaaaaactggcgacgctgccaaagaaccgatacaaggatttggcttccgacgtgtttttcgaactaaacaagcgaaatcctgagttcacagcgagcattgcagaggagaccttaagccaggtgagcattgtatctttgctgatattcaatcaaggtcatctcatagagacacgtttgggcaagctgattgacgatcgtctctcgtttaaaatggcgcatgttccttcttcgttctcaaaactttccatcatattcgatctgcttacagcgctcctctgaagtccgatcgtctgtagaaccacacacagctccaaatgttcggcaccagcctgcatcctctatcggatctatggcctctagcatgcattcccggaccatgtcatcttcgaatcatccgcaacgtcagccccagcctcagccttcacaggcgcagcatcgaccaactcagtcgagcagcagctctattggaaatcacagcttctaccagaatcatccccagcaacagcaacagcaacagcagccaggaaaaacgcctgcaactaggcaaggatcgatgtcacgcacgatctcgaacagttcttcacttggcgaaattcctttatcttcgtccaacaatccttcttatccaccgaacagaactcgcaaagattcgaccagctcgtactctcctcctttctctaacgccgtaacacctgatgacgccttcacctcaagtcagaacccgaatttgacttcaaaccccaacacaaaatacaatcaaaattcgaatggagcgaacgcaagccttttgaactctgtcaaaacatcccaggttgtacccaacaaatcgacgattgcatccgaagagatcgaggttccttattcgcgcgattccgagtacatcttatcccctcgttcaccggattttcaggattctggcgctttcggaagacggcccggtaaccagagaactgacagtggggacaatgatggacttcaaaggaacgaggaggaaggtctcgtcaacgagttgaggaagacgaacgaacagctccgattggagttacagcaggtcaggagggatcttttggataaacaaggccgaggcacagacaccaaagaggtaggtcttgtcttgtgttttctctgatacttcacgccgtggttgcaacaccggatattaacactatggtttattctatat

SEQ ID NO: 188 - DNA, 50266 bp, Xanthophyllomyces dendrorhous
ctatggtttattctatatgaagtacaccaaggatcttgaaatgtctctgaaaaatatatctacagaactcgaacagagcaagacagcgctttcgaaagagaaagacaagtctcacatgctggaaactcagatgaagaatctagagatcagccacgaggcaaaggtgtcagacatcagaagaaatcgagatgttcaagaactcagcacagtgcgccgtttttcttcttcatgagggcgcgatatttagtcatgccatcgtgcttttggacggttcgattttctcatgctttacatttttgctatcaggtaactccaagcgaagatgattttgcggctctgcgagtgcagatcaaggagcttctccgagaactcgactcgctttctcaaacaaacgatcaccttcacgaacagatggatcgcgaacgggcacttacaaccaaggcagaggttagggcaaaggaaatggaacgaaagtggaggactgtcaagacagaactgagaaacttgaaaggtaaaactttctttatatctcatttcttattctaatattggtaacgtcacatacttgaacaaaacctgatcagtttatctcaattcctctgggcattcatcggatacattcagcaacttcccaaatgttcacctcagctcctcgcacagaagatcactttcctgcttcaaaaggcggagtgatcgcagacgtccatgttacagtattccaagactcgatcaacagcttgctagctaccgccaggtaagaattaactctctttcttgttctctcctcatatatcacgttagatagctgacctggaaggtttctcgttcagatcttcgtcaccgagctcaatcctcggtgccacccaccctgttctctccgcggtttcttccattctacgagacgtagaaacctttgagtctgatacatcagtcgacatgtcctccatcgacctacctacgcttcaaattatcaaagagaaaagctcgaccgcactctccgcgcttatcgagtctgctaaagatttcgccacctcttacggcctcagtccagtcggtctcgttgacgcggcggctcgagaattaagcttaactactgttgagctgtttaagcttttaggaatcaaaagagcggacaaggcagtggaccttcaggaacctcgaatcgaagaagagaatggggaacgaagttccatccaagatgaaaacgatgtgaagagcagtgcctggcttactgttggaggtgctcgatcatctccgtcgttgtttcatcctctcggagaaggaaaaggagcccagagaggagaagaagaagaagaagaagaagaagaaggaggatttagaagtcgacagtcgtctgcttcatcgacgtatgatgaaccctcgatatccattccgacggccaatttacccctaaacgggtcgaatgattacagaggcggagcaaacaatcacctaccttctgggctcaacgcggcctaccgactgacatcgacgtcttcagttgggagttcattcgatttggaacgtaaagcaagcttgatcagagcagatagtactcgagaaaaccctggaagattgaacggggtacacagcatactgacagaaaacgagaatgagcgcgaagaagaactagaggatgatgacgataatgcatgggttgcattgaaagtaagttctcgtgttgtgcagaaaacttgagaatgtgataaccgatcctgaagttgatatctccccctcatcatcatcatctctctctagccttacctagaaactcagtctgatgctttgattcaatccatccaaactctcctcacatcaatccgaacgggtgcgacgggcacgctcctccgggagcacatgtcctctgtgatcgtcgttggatcatccatcgtcggcgtgtctaacgattcgctttcaaagaagtttaggacaacgggcgacgatcgacagaggttgttgaaaattgtggcggagaattgcgagtcgttgagcgagttgagtgagagcgtggatatgggtaaggagacgaggaatttgattgccggagtcacgttcgatttggccaaggtacgttttggattgggattatctcaggaagagacttttttctgatccacgttctttttgcttgctctctcctccttgattgatcactaccaacaacagaacttgaaaatgttgatgagcttctagaagcttttgtatcctttattacctactttttccccctgttcacgcactactccacatcatcgcatgagtatgatggtgtgcttctccttctcgataaaagttggacgacctttccgttcttcactctatgttctatgcttcacacgcaccgttcgttcttcattacatccacttttttatttcttagtcttgtcacgttttattatgtacgatcggtttgtcatccatcccaaccacccagaccgtactttgcatgtatccatgccggtgttctcttcactttgttctactaatcatcaagcttgatcaggaggtgaaagctatcacatatgttcatacaaaaccaccttggagcgagattggccctttagaaaaaaggcatctctaagagagaagcagagaccgataagtgcgcttcaacagagttcatcgagttcatcatctcctgtttgttcaacttttgaaggttcggctttcaaagactccgggtgttggaatagcacgttgacttcctctctgtcgaaaaccaaaacaaagagacgaatagaacgtcaatcggtcaatacgcgcgctatcacgatatgataactatatagaaaagaggctggaactcaccccagctctctaaccaaaacagcctgaagacctttttctaaacttctgctaacactcccaaactcttccttcagttccttcagtttcccctcccattgttttctctcctgaatggcctcccgatgcttggccttggccaacatgaatctccacgtcgctcttgatctacctttccactgagcggatgaggttgtttgtctagagggcataaacggcccggtgaatgagtcgtccgagtctgagtctggtgggggttcacgaggacttgtcttctgcgggttcgtcttctttcttgaccgcttgttcttttcctccgtggtcggaagctctatatcatcaatcagcgccgtgttgataccagaggttccagactttgacgcatccgtagctgaagtcgttgaagctgctacggctgatcgagcaagatcggcctgcatcctttcccattcatcttcatcggcttgccatcgttgggagtccttgcctttcggtcgacctccttcgaactggtcaagctcttctgtcgggacgacagccttcgggacgaacgtccggtttgaggtatctttcgtccggtgggacggagcaggaagaatattgtgttggacgcgcatgtgttttgctagtgcatcagatcgggtgaaggacttatcgcattctgaaagatccccataagcggacggaatgcacggagaaaatatgcgcccgtacgcagacatcaatcaaacaccgtcagcttgtagtctcagttatatcaagctgtgctggatgttccggtaagcagagtgaaaacaacgtacgaggctcggtgcaatcaaatggtttctctcccgtatgacttcgaagatgactcaagagagcaaaccttgatgtttgcggtcttccttttcgaacacagtccgaccattcgcacgtatactgggccttgttagtcccaatatgttctaaagagtgatttccgtcagaaatcaagataatcagaaagaagccaaagagagggacctcagggagaataccaagacagagaaagcgtacacaccttcgtgtatatgattgatgaacgttccctgtagaaatattcgacccaagaatagtcaacatcaccgttcagatcatgcgatcatgaggcttgaacccaatccgtctatgttccctagagagaattttttcctttgaagcaagaaggagaggaagcatgtaaaaatcctggaaaactcactagttctgagaacgtcgctccgcactcgacgttgtttgttgaactgtctaaccaataacaaactgcatgcaacgcgtttgggtctatactatccctcttccgcttcttcccccgttcatccagctgagcacctgcagtgtctacaatgggacctgccacatggtctgaaagattcgaaggggaggaaggagctgatcgaggggaagccggctgagtacctccttcggacggagtaggagatgaagacagggaggagacaggcgagagaacgtcaggctcagagtcgctgtcagaggcataatacctcatgctggaatgggtggtagaggccgaagactggactggagggagcgtgtgtctatgtgtatgagtgctggtatgagagtgagaacgatatggctgatggtcgtttgggaatgagatgatgttgatgatagctaccaacttctctcagacatactggcgcgcttgccttgccttgcttcacttcttctctcgtctttctcttctgtctctctctctctatcacattcttctcagcctttcactctatgttttactctatgtaggaacacatcaatcatatatccagtccttgagtagttattcatgttgataaaccagcttgaaccccagagtctgcacatcgggtcgatctctacttatgattttatagcattggatatccagtcccttcgcctcctccttcctctctcttcagttctttcctactccagctccatgagttgccatcttgaatcaactcataaaccaactgttcaccgagtctgtttgtctctccattcttcaactgacagtcgatcgtctcctgatcctcagagctgcccgcgactaaagcggagagttgagagcccatgaaggcgtcttcttgaagaatcgtccttgctttcgaagggggtaggacagaagagacaatgatcttgggagaaggatttgcagtcggaacgtccaggcggaagtgttgaagcggagggtccagctgaacggtggatgctatggtaggcgagagcaatcgtacatgaatggaggaagaagagaagacttccagagtggacgacagtaaaggggtatggatatcaagagtaaagtttgaactgttgtctggtttaggagatcccgatattcttttgatcgatcagcatcgatgtcgaagggataagctcgcatgatcacgaaaggatgaactgcagaggcaaaacttaccgatgacgactttggcgagagatgtcccaatcaggctgaactgcttgccttgcccgtcaaaatccctgaagaacacggtcgtccgtgatccaaacggagtgggagcaaccgatgtcggtgagaggaccaaaggacttgaagctgtctgttctggtcggcatcaccgtgggtgggaaggccacttgaaaggagctcagtcgctgtcatgtatcaagaacgattatctaagagctggtagcacatacgacttcgtatatctctcttctaggaatggcgaacatgaggtagagagagcgagagaaagaagatggagacttggctgttggcacgaatgcatcatcaacaacactcatcatagagtttgcttacgctctctcttcatcagtcagccttgtcctatgttacacttgcataaggcttgtttggccaaactcggacgaacccagcatgggtgttcattgcgcacgacctcttcttcaagatctatcttgctttatagatatctgggattatgtatattattgccgttgatggcacttgattgtctttacgtatgccgtcgaaagaaggcaaatctactgataacgcgggatgtatcgtgacgattgcttcgagtaaatacatggtatattgctggggtatcagaaagtgtcttgtacatgtgttgatatcacagaaatttgaacgatatgttttgcagattgagtcagtacgaaaggattcaatcctcttcgtcgtcgtcgtcgtcatcgtccccatcctcatcctcagagtacactacacctctgttgatgaagtaaacaggaaggaagagaagagtgacactacgtcagtaaagtcatacggagagacgacattcttgagagactgaccttcctgccctgggtcttccgttctttgtctttatctcttcagttgtcgaactagcggcatcgtcaagaaactgcttttgtcgcttagatgtagcttaaaaaataacgaggagtcagtcagaacggaacaagagtcgaacatggtagagagaaagaagctagggaaaaccgacttacgaggagtgtcgtcctcttcttcagaaccctcctcctcctcttcctcctcctcctcttcatcttcatcttcatctctcgatctcctcttgccgccttgagtttgtgttgccgtctggttacgcgattgagcgtccctcggggtgaaaagttgactttggccttgactctggctaggcctggctctgcgtttcccggcagatgaactctcgggcaccacaacttcgtctcctacctcaagccattccataccgtctttccagacgatctgacattccgaattaggacattttgggttggttttggagatcacccgtcggacgcaatgattgtgaagcgcggatagactatgcgaggtcggagagcaggatggacagatttttccctgaacaattatcaatgcaaccccaaagaactgtgttaattcaatcaccacgacgacgacggatgctctgccaagaggtatgtatgaggctacacaagctacaaacctttgtgacgagttttcgacaaagcttgcagtccaagatgacaagcgcgctatcctcgttttctccatcgtccatagagtatgtgtcccgtaggtaatggtccagctcagtcacggctcgtaaagtcaatgaatatcggttactggtgtctcgcgtatgataagggtttagttacaaacgagatgaatgacagaaactcgttgttttcagatgaaagcgcaaagaaactcacttgaccaactgtaaccaacctccgccgggtgtgcttccacagaacctatcaagaagtttctcgccggccgacttactgatggtcgtcttgagttcggaaagtagccgagaggcggccaagggcgagattgagaatgaatagctaggggcttcgatgatagcttcaatctgtgttgaaagtagtgggaaagtgagacagagctttttaatcgtagtctagaccggaggctgctcacaattaattttagatagacaatctcgccgggagtgtaatttgtcgctatctgggccaatggatcggcctctatattgagctgcaaacgggccatcggagagcacataaacatacacgtaagctcgatgcctatgttgttaataataatgataatcgaaataacacacgaagactgaccaagaagacccacttttcaccagtcgcttggtgcacttgttcatcgagaaggaacctcaatggctccagcagatcgttgatctgacccttgaaggccggccacccgtcatctgctctatcaggcggcggatcgtttctgtccttgtcattttcttgaacaccgaacgagtccgaagtttaaaaacaagtgagatgatgaaaaatcagcgagcgatgagccttgagaatagctagtaaatacaaacgggcgagtccggcttcagactgactgtatgcggcctgggcacatcgttcgtaaagggatactgccttctttagaggcaccgatggctgggagaagacggactgaagaaacaacttgtgagtatgaccgtgagccatggttcaacgattctatccgtccgtcgaaatgtatgctggatggtgaagatgatgatgctgctgatgatgatgatgaagaaagaacaagaagcccgacgggcgtcgtcgcatatttggactacaatctaattaggaaattcttattttttctctaatggtattttctatttttgtttactttggatcgccttctcgccgggttcaatggctttcttgtcaccttgcgcatacatccaaggaacacagcatacatccaacatctcgcatcaacatcatcacccctccagatacaattgcgcttcttttagcttggcccttcgattgttctcgtcagcttggtttgtctgaatagtaaatgaggattctgttggaacatctgacgatccgtcgagctgggcttctcatcgtgctccttacattcgggttcttggccttggaagcactctccgtgggatctctgtcgagcaaaccatgtacggctccagggacgactcagtggggactacttgtgagttctaccttccgtctagttgtagaatctgtggtggaaacgaattgtattctaatgcaccctcagaggcttgatggcatgctcttttcctcttcctcaggccgatgatgtataccacctgggtttaaccgagccatcgctgtattatgggtctcttcgaaactttacaaacgtgttccctagttcgtctcctctgaagacatcgcttctccattcggtcgacacctactcttcacaccccaattcgtccctgtctttcccatcgatggtcgacaatcgactcatctttcagaccgacaaggaatctaaaggtaccgaggcaacccggtcatggacactcaaaaatcaaaagtgggagtacaggtttctggacgatgcagcagcagaaacctgggtgaaggtgtggttcgatggaaccgagattgcacacgcttggaaggtgatgaaggccggagttctcaaagcggattttctaagatatctactgatgctcgtgcatggtggggtgtactctgatagtcagttgaattccttcttgttcaatgccctgcgctgatgatgtactgaacgattgtgaactccaacagccgatacggtagcccttcgtcccatagaacagtggggaaaactacaccctcgattatacaccaatggctcgctgtcctccttcgactatagtccagattctgaacctagtttgatcctaggtatagaggtagacgtctggaaacctggctgtggttggatcaagaaatggcctcggccacttcagatcgcgtacgtgatctagcatttctttatatcataccaccattcccgtccgatgagaagatgctcatgacaatcactatggtcatagccaatggaccctatcatccaccccacatcatcccatttaccttgatgccgctcgaagagtgtcatccaccgctaggaaaatggaagcatgggaaaaatctcgtgatgaggaagtcaaattgttggaaggcctgggcgacgaagcatccctccggaaagcttacgagttgaataaaaagctttggacaaatatggttagcactctggaatggacaggacctgccatgttcaccgatgctgtccttgcgttcgtatttcataatttctacaactgtactgcttacataggtaactctaatgattgatgtctgttcgttgtcctatttgtcttctttttctatatctagataccttgaaactcaatatgatgtcacctggccatcactcaaatctctgaccgagcctcttcgtattggagagatcctcattcttccccttgccggcttttctcccaacgcagattccgacctccgatggtctcgaccttcgagccctcaatccagtgtcctccatctcttcagaggaagctggaagaacatgggcaaatggaaagcgttcaagaggtggctggccaaccgagggggattcatctttgcacttggcatgattatcaccctcttcgggatggccatttggatccggttgaggatgacagaacagcagcggacgagggcatcagtagttggggatgagagtgtgacagatggttatgagctagtttgggatgcgcagaatgatagtttcgaggaggaccaaaacgcgaagaacctatggcgagtaggaaattgaggttaatcgtagcatacatggactatcaaattattcaggacttttatctttcttcttctttttaattgaagccatctctgtgcatacgtatttctcttctttgtctgtgatatatcgtctataccctttgtatctacccttgagttaggccccgtctatatgtaccatacactcgacaactttcatggctcatgcattagtttatgcttttcagtcgctcgcccaaacttggacatcacccatcatgctgagaagcatttcatctggatatctgtcaatccaaccggccttctctgcccttccttctgagtggagcctcctcgattataccacctatcgatccgactctggcatgtgactctccgactccacctcctccgctcaacatccggcctcttgccgcgcctctacttcgtcccaggaaaggaatgacccgatggatcgatatagccctgatgaatcgagacacgacggcagatgttgaacctgcgcctcgacctcgaggtgtggatcggtagcctggtccgtcatagttaaggatctcaattggcggattcagccgaggccaatcgacataacttttttttttggggggtccaaggggcaaaaaggaagaattggtgatgagctacgctcgtacaatagaatagccaggaatcgatggggaagaggaagtctcttactagattccattggcccagatgtaaagaaaagagagcacggtgacgatagaggcagcccagaaaaatgtccagcttatcggaattactgtgttgatttttttagtttaagacagagatacgaagaaacatgaaaagttaggtcacgattcagagatctgggctgtaaaaaagaaaaattgaatattctggaaggaaaggacgcacaccaccaccacgcgtaaaactcaattagacacacacagcctaacgctgttgatagcacagttggcatctgataaattgacattaccaatagggaattgttcagttgggtataccataaaactgaagatgagcaatacccacaatgcgcatcaagatcggtcgagtatcaacaaaaggtgatgtggacccccttcgtaccgaccaagctcctgtcaacaagtctagtgcatcctgtcatcatttagagcatcaagatatgtcgagatcagccgtctgaagtggataacgttgagttgacatacggagaaaatagacggctaaactaacctgtctcgatccgtccaaataattattcttcacgtatcgaactactgaattccaaccgtccatagcagcacccttagaggatcgcttgcctgtccttgtaaagtccgtttttagtgcacctgtaccagaatacgcgatcgagacaacgtccgcatggtccgcccaaactagaaagttcattgtccatcatgaggatgtcatccaaaacagaaaatgagtctaccaaactttggatgatagcaaagctagctgtcgaaagagaaaagacccactgtttcggaaaacatgcatgaattcggggtgatgttcgacagaatctatctcggtcaagaccctcgaacttcgtagctgacggtctaggacatctctcgctaacgcagattgcacaacgttggttcgatcttgaggcgttgatgtgaattgggatggaatgataataaatatgagataagtaaagcgacaatgggcttttaacttgagagcgttatagctctgcgaaatagcgtcgtcgtacctagagaatccatgcctatattgcaaagacccgcaaatgaatggaagagaccgtaaacgttgatattcagggaaactgatctgctcgggaacaaaatgagagaagaacatacagtttgtgcgtatcaccgagatctgaaacttcttgggtggataagaatatgcggctgattctgacggactagaataatggaaataactgccatgtgggaagagacattttctttagtaacagaatgagtttagcaacggcaattgaagcaaaactaaagaaacacacccttctttgtctagatcttctctcaatcgatcgatcaagctctgcacattctcaaacttcattcctttgcactctttgtggaagtcaaagtacatatactttgctcgaggttcgttgacaacgagcatggcgttctcaagtgcctctttgataggccgttcgtatttgacctggttgacaagattgactagatgaacatctccgtagatcacgatttgctcggaaagatgggattgaagagcagccgcctaaaacaatcagatgagtgtcagtatcagtgtcttatggacaacagagatattcgagtggccaggcaagagaaatgcgcacagtttcaggaagagccatcacttgcagatcgggtgtgtacctaagattgtttacctgcgcccaaaagatcggggcggaacctctgacctgaacaaaactaaatcgttccctcccgtgtatcacgtcaggtaaacctggagagcttgagtgtttgtcatcagaaatttgtccgtttggcgtgctaaacgatgacgatggtttgtcgaacagaacgatctgctcggtctctacgtagttggctgtgttgccatcatgatcaattcctctagtgaagaaccgggtgccggatcgatgacgagatcgacgcgagatgagcgcgagtaagataggttggctgccgatttcagtttgacggagctcaaagtctgagacgacccgacgtagcagaacgaaacacggtgaactgatcagattcgctgagaacgtcggcgatgagacttggtgtcaataaacgggttgtatgacttactgccatacatcacaggtaggatgaattgactcatctgaggtcaaaaagatcgataaaacattagcaacaccccaaccacaaactaaacaggcaaaagagacgaaccgcaggatcaacagaaactgctcttcccgagctcgacactctgccgacgtctaggaatttccgcatcaactccaagttccaaaagaaccggtcatctgcccgctcctgaagtccttccagcctgtcttctcctcccgcggccctcacctgtctccactggcgttcgagggtatttgtcaggtcaaatgtatatgagaaaaacaatcgagcggagtctaagccttgctgaacgagatcctgaagctgcgcctcgtacggagaatacagccgggccgggtcgagcggggaaagcggaaggagcagatgcgaggagacttgatagatatcatggtcgaggaatttacacgaatgggttttttgagtgataacaatgagatagtccgctgttaaagtttatacaagtagtttggtcattatgcatgcagagatagtcataaggtttcttagattacgcttggaagttctcaagacctactcatggcgagggagatgatgcccagaatgccatgaactgtaaggatttgttcagtggcaaccggtgctgttttggtcgtagctgtttgaatttaagcaagagaagatccaaggtcgtttggaagagccgtgagaatgtgagcaaactgcttcgatgccgaacatagatggaagtcattcttacgattcaacacgatgctgcccgtcatccgatcgatcacaagtgtatctaatccggccatcttatcattgaggtctcccctaagagctgattgaaagacctatatcattacatcgcgtcatgtttagattgcaggttgcaaaagacggtgataatcaacattggtaagaaagattggtgaaacattcgaaacagcatgagcccaaaaacccaacgcgtcctttgcgttggcaagtcggatgacccgaacaacaacagaagaaacgtacataagcatcattactgatatacagattgagagattggtggatcgatctcgttgttgatttcaaatccatctttaaacgtgtcgagtatcgttcgttgcgtttgctagcctgagttggactgatggacggatcggaggtagagagatgatgtactgtcaagaggggtgtcgacgaaatgaaacaagttcagagatatcgatatagctgaagcctgttggtccagccaggctgtatctcactggctgggctgtattttcgtggatacacttgtgtatctgagtgggtcgaggagtgagagaagagacggaacgggccgatagatggttggtgtactgatggaacgaaatgtcggcaggtaatcctttagactctgtttttcgggatcctcttttgatattgtcatcgtcctctcagtttcaaatcatacatctatcttatcactctttcgtatcaatcttagataagaaacagtgagaccttgtatgcatggaatccatcagccataaaatatgatgctgcacggtcgtagagcgcaacgcgctgtgggtgtttgccattttgtcttgattgtcttgcctgccagctgggccaaatcttaagtgacttagatggaccggtccactatattctttactttcactcgatctcctactcgccacacgccttccggatctagtccattagtttcgttccgggcaattggaatcgcgtagactcccaataaggggcacagtacgcctacgaactgatcaattgtggagtgcatctttgtgtcagttacgcgtctgaactgatttggagaacgaagaagagactttgagaaacaacagacctcgtccacctttttgggtcgttcagatgatatgactttgtggggtagcgtcggatgcctgactccagtatcagggtcgacgtttgggagctgagcaatatatatatatactcgacaagtaagattatgtctaataaacggaaggcaagcattaacagagaaagaaagcgatagatgaatgacatacagtacatctcacacactctcccaccaccaagatatcatctcctcctgattcccctgtcaaatggatcaattctaatcgtccccatttatcctcctcgaatgcgccttggatgtcatcgggctcggatccgtcgtcgagatcaacgacaatgtttggccgcagccgctgaatggcattgtttatcgaaaagtcgaattcattctcagttgagccgggtatgctaggagtgagatcagtgattgatcgagcgatcgaacgaagactttggagagagatcatgtggagtgggtatgtatctgcgaacgccttgtggtggaaagccaagtaagtccagctgtcagagcgggagcaacaaaaacgaattcatatcgaggcatgatcatcagaacgttaggattcaccgtggtactcttcgaatagcctaatcccgagctaggtgcttttttccctggacctctgacgtcccctgatttctgacatattctgacaggtcttccaaagaatttggaaagaatctcgtttgagggatcatctggaggaggtgatacccctgtgagtgtcaacgaccacaagttcagatcttgaaatctgatgacctgacccatgattgatcgtgacgatgtgcgcaaccaaacagaagccgtaacacaagtaaaaagttattagctacctcctcatcgtgcctccttctccacgcaaagcttgaataggtcctacgtttcccagtcccaaagatcatcctcagtaggctcgaggggtaggtcgaaagtttcgtggccagactcgaatgggacgtcgacaaccagtcgatcctgttcaattctacacgtgatgaggaccatctgagtatttgaatcaggttatagtcaaccatctgcctctcagtgatctggtatgataaagttcatgacggacggcggggaagtttctggcagtacaggccttcatcgttttaaagtcgactatcatccattgtctatcatactagttaacgtatcacaattcggttagctatggtaatgaataagaacaaacatatatagaatcttacactgagtccctcgagagtgtatgttgacgattccatagagatccctcggcagctcttcaagaagacggattcataagtattttgaaatccatttatccgagatctgatgcaacatacggaaaacacacttacctttattggataaacccatattgagcacaccctgatgccacttgccgagccagaaccacctgtcattcgactagggaaagagtattgtacgaagaaagagggtatacaactcgaatggtgaaggtatgccgacgacgagctcgtcggtctcaatgaggtgctaccggacagtcgaacaatcttcaatttcattttgccctctaccaccagcatcgtcatcagcggcagcgggctcgtcgttcttcgtttctaaactctctcaaggagtgttccaaaaggctcaatatgcccacaatagttcataccacagcggccaccatatcttcccagcataatcgccatcagcagcagcaacggcagcatcagaaccatcatcaaccacgcgcccggttctctagcccgtccaatacaaatgatctatggaatccccctagatcagatggatcagatgaagacgaatcctccggagtgaccgcccgtcctcaaccgggactctttcagactgtagaggaggagactgctcagtatggagaatctgatgggcaagaccacgcatcgttccgatcagttgatggagtgactgagcgactcaggaagagatcagaggatgaatcgtctaaccaaggctctttcgacgaggaaattcgaggacaaattcccgatgaatacgacgacgacgacgacgacgatgatgttggaggagatggagagaatagagtggaacttgtgcaaagtcagtctttctttcctagtctgctgcttcggccgaaccatgctgccatgagctgacgaaaggacgaaccttcgaacatgcacaaagttccttataggattattttaagaagataccttttggtacccctacttgctctaatttgctttggaggaaccatcgccttactcacatttgcttggttagtgttctttgttctgctctcttcattttggatttgcgaagaaattgtatcagccggctgagatttaaacctgatcctctctccaggccaccgcctcctgatggggagaacccatatcctcatcgtcccaagctcgctcacttcctcgttggtgtagccttctactcattagcgcatgtgtgtatactattctcttgagtgagcattgccttcctctttcgcagctcctaaactaaccttaccatgtcgcgtcattcagtctcttcgaatcccaattgcgaccatcttgtctcctcttcctttgtctgcgtcctctcttcaacggacttccaccgctttgcacactttcgtcctcgagatccttcgtcttgcttcaatctctatattccttcctcctctgcaagtctgggaatccaactctataccggaaaccaattcgttgactgaggtcaatacgtcagtctctgttttatcacataatcatttgctgccttatccgtctgtatgggaccagcggccagtgttcgcctcggccgcgtggttaggcctcggatgggccgcaggagaagtaaccgtcggaatctggcaagcgtttagtcagctgggattctatagaccggtcttgcctgatgtaggcggaggtatcgaattgggtcatggcccgaatgaaggagggtcacttggattggaaggaatagatgtccgacgagacatcatcgaggaggtagatgatgatgacgatgacgatgacgaagaaagtgaacagcagcgggaaagggaaagattggaagagggtgtttgggagcttatagcggttcagaagcgagaaggttcgtttctctcttgtcttttcctaccaccatgttgtctgacgtgaatgcgagactcgtgactttcatagaaatcgagtctcttctgggtgtccctctacccaacatacctgctatcatccttgctctttggaggatcgattcattgcttctcaacataggtatcaccctgtacgcccaaaacttttgattcaaccgtcttttctactctcttgctcttactttaaccctgaaattcaactcatcttcttactttccatctttcttttgatttcgccttggtacaccggcagcatcttctccgcgttgttttcgacccacagggaggacggatctgcgtggcatatcatcaagcacatgcttccccttttcaccgccgttgcaggtggtcatattgttctgagtttagtttgggtatcaggtattcctactctgggcggtgagtgaactccttccaagtcctggcttgcaagaggttttggcaaatacgaagagtatcgatcgttaatgtatttcctttccttctgtgtttcaacgggcttcggatgatcagcaccaacaacgacatatgcttctcttctggtcgccctggctatcttcttctggggtttgggaacctgggaggccttgatctgatacaatctcaaggttcaggaagcgaagaccatgattgcttggtagtcactctcctgaatgatctctgctaaatcatgtttgttttattagattagatattctatgacttttacgactatttccggatgtataaattgagaagcaagcaaacagggttcctagtctaatcctgtagcaaagttgaattgaatgagcaacccaagagttgctggaaagacataatgaaggcatagggtatatcatcattcctgagacctagataatgaagtcgtttcgatctcccaaggtcacacaaccacaacatcaatcgacccgctctccttttctgacaaagcatgtctgatcgtctcgagagcagcatccttctgtctttcggatcctacctcaatcctgacgccttctgcccaaggactcggtatctcaaagactttgaacaacttcaaccaatttatggcctccgtccatgaactgaaccaatctgacccgtctctcggtggttgtgttttgaaatcccagatcaatgatcggcctttgatcgagttgtttgactcttccaaagaatcgatagatgcaaccggaggtagtgtcctgaacagaaactggagttgtccgctcggagcaatcgaatctgggaaaagacctgcaagccgaacggttcgaagtctgttccatctgtcaacccctgctcctgtccggtcatcgacctcgaggtctccttgtgggcagccggcccattcgaaatgaacaggattcacagaaggaaacacatatgagaacagacggaaacgttcgggatgagacgatcttgtggtgtttctcaagtgaaaactggacagttgaaggggaggtaatgacgatagccgggtaggtattgaagacactggtcgatgaggggttcgacgaggggtaaacttgggtggggttgtgatggcgaggtgtcgggtattcgatagggagagaaaggggaatatccggtttgtcgactcgatgaagtctgtctaacaagaaacaaacagacaaagagtggaagtcgaagcagttataaagacatgaacagatggaaaaaaggatatgcgacatgcgtcggatgacgagtcgagaaagatcgataacgtaaacgagaatcaagcgaaccaatcaatcatctgttttaccagaaggctgctagccaaattttcaatatcagatatacagactaacctccacgaacaaagcatcaagggaatcccagtctgtgagctcgatctctccgtacagtagcggaccggccactcggaggacctcgaacgaaaccaagcaaagcgcgaggagtgttgaccgatcggcgaacgaaaagataagacagtacaactcccacggaagggaaaccgacttggtcggccgttgactgtaagtctagaagtttaaatatcgaacaggatttgagctgaatctctgaccagacggtgaacgaaagatcgaagaggatttatagaagctcatgatcaagcttacaactactgaggcttctgatctgccttctgcttcatctaagagcatttttgtcactttttgttcgtgcaatatacgcagttggagcggataatcagaacaagaggttcaacaatctgggtgcatctgttcccaaggaggatgcctagggagaaggtgatgatgttgaggtgagttgagttgaagacgcagatgattaaattggccacgtggtcttgcgatttttctcttctatttttctctacgcgttatttgcaacaattgattgatggtcgcaccaacaagataaacttgggcggagcaggctacagatttcgaggatacgaaaaatacggcgaaacatctcacgagagaaaccttctaatagaaccaaggacttctatgactggagtaagcgaaaggccacatgttgaatatgatatgactatagtgtaaaaagagatgacattggacagaaacaggaatgcatttcggacagagcccagagtttcaattgcgcttgagacccatgggatatcatcactgaacaatgataacgacgattagaaatcagctcaaaaggaaagcaaactctgcacctgttgagatccatttcgaagatttcgcacggcgacttgagtaacatcaggcttgttcatcgatcttcttcatgacgacacttagctaaagctacctgtgtttttgatcacgacgtcgccttttgctgcagttgggaacattcaccgctgctagtgtaaggatatctctcaacggttacttagccattcagggtcttctcccacgcaggggtttctcgcatacagcagtgaagccaaacaagatatgataaggaatgagtagaaatacatagagtcgagtcggagcttaagaagtaggggctgaaacatccgaataccatatatacagtctggaaaccataaaccaagattttcgtctccctctgtgccatacggatctattcttctgtcacatcaagtgccttgtgtccgtacgtatcatccagtcgactccggacgtattcacccgcgctgaatgacgggatgaatgagttgtacaaataagtaagcttcgattcgtctgctggacatattgggacttccgatgtccagcctcttagagcaaactcacaggatgggttcatatctagcaggtcgatcggcagagacacaggtgtggaatggctaacgagcaaaacatggaatatgagtatccggatgatcagatgacaagattaggtatattagggctcacctccagcacaacattgtaactggttgatgaggaacgaatgataatgaatccattgtcaacgcgcagccttggaagaacatctcgagtgagagacaagatagatcaacgtactctgtcccaaagaagaaggggatggagtaccgttctctacctgatcgattgatggctcggtgtcgagttgatacaaagatgtcatctattcaatccacaagaatacatcgcatagttgtatcagcggcaaagaaaaaaaaacataacacgttgagataaaacagaaagatagaacgaactagaccatcgagagagctgatcggcgatgctaagtcgttcacataatacatacgagctcagtctatttccaacctataagttcaacaacatacgtacttgatgacaaaggtgcctttgatgggaggtgcgtcgatccctgtttatcaaacgcgttggttagacaatgtgcagctattgctttctgcatcatcggatagaaagcacagagactcacactctccacttcggttgagtacttgtagcgcgccgacatccgtaccctgcctcaggatagtaaagcactcgtagtcggtatgagccccaattccttgaacttggccattgatatcaacatcgggagcctgagaaggataatgcagcagtcgcatgatcgccgctttttctttggtcttgagatagagccgcgataaggaagcagttaagcaaatatcacagcagtgagagatcagaaacagaaacgaaccttgtcgttaaaaaagtcttcaggaagtccgagagcgagggcgaatagagggaaaagtcggtagcctagatcgaggacttcatggctacgatagaattcaacatccgcttcgcatgaaaatcagcatttcgcccgacatgcttgattctcgagcgcaaaagaggatgcatccgattctcaagtagagacaaggacgctcacgaactagtacttcaagacatcacttctgaatccttcaagcgtttcatcggcaggccagatgttattactatggtggcctttatcgtccagcgtaggtataggtgcaggttcagagagcggctcgtaacctaggttgaatgcctcatgcctgtgtcaaagagccagtttcaaccaggatggcggatagtattagaatcaaactttgatgacttctgaataaatggtccattccacgtacaagtcgcctttattctcaggactgtaattcatccgatgataagttcctcatcagtcctctttttctcttcttctttaatggattgagaacgtactttgtgttctcttcgtagagtccttgataacctctaaagttattgctctgggagatatggagcttcatcttgtcttctttggacagatcttgaaagagacgcttagccgtatcgaaagtctgctgaacagtgctttcggacacagaatgatttttgactgtatggcatgaggtgattgatacgcggggttagtcttaatgtttgaataagttgcctgtgaaataagaccaaccatagaagaatccagcgacgaggcaagcttcacgaatcttctcgacaagctgatcatttgggagcgcaagatcgctgggtgatatcaaggacgatgttgaagagtgaatgtcagcaatcagtcgttccactacgcgatctaagttcaacgcggatgaaggaagacaagagaaaagtgattggtatgaccaacatgatgggaatatgatcaaactcctcggagtgcaacgtctcggcggtggagagcaaatctggagcggacataattgtgtatattctcgagagtgtgttgagaagatggatgaatggtaaggatgtatgtatatatatcaactatgtgatcgaaatggttataagaaaaataagaacagcatcttggttaagcttcctcgtgttcatgctattgacttgaagagagaaacgccgataagcatcaaaaccccggacaaatcggacggcgccgtagccagaagagaaggataagcggctactaaccgagatagacggcttagccggcctagccggccagattctgatccggcgtttttcgtaatcgtcgatatatggcttaagtaatcaggtcacgtggactaatagtttctcatttgccacaaatgcagttcttctcgaattacagatctcaactcaacatcttcatgacaaccacctagagtctgcgaagatcattgaattactgtcaagtcctttgaagaacagcagacatacgtcaggcctaggagcagacaaatttgtcaatggattctttcaagggatcaacagcagctgtggtctcaggtgtgaacgctccgccggaatcgtctgattctcaaccatccctgccacccactcgttttcttgctcatgattctaaccctaacatagtcgacatgtccgctcaatcggttctgcttgtcaacccatcgactgctgatcccactcttccggctagtggctctcctactgttgggacctctgtccaccagccagtcattgaccctatgaacaactctgaacggggtcctgcctctaccacatctaggtcaacgtcttctccccggcctgaagctgtgcaaatcgatgagatgtgtccttcttgtttaagcccgaacatccccctgccaccaggatatcagaagcgatctaaagagtttcgaaagaacgaggatattttgatatggatcagttgttcacattgttcgtttgaattgttatatacttgttctgcctactcagttgagtgcatgtgctgatcacgggcttgctggctacatctttaatttaatttcaaaaccgcatatttatcaatcaggcgaggattggtaccattggccctgtgttcggtctcggaatcagggtattccatcagcgctggaagaagataaaggagattggaaagctcaggtcgaaatgatagacaagtggtactgtccgaacccgatatggtatgttcttttcttcctgtctgtccatactctcctgcgcatcacaaagatttaacccctttttactttcgaccttctctcagctctggcccaacatccggccacattcctacattgaagcctcacccttctcgtcgagcctcaagccgtccgaagcctgtcgtggattataacgcgccttctccaccattgactcaatcctctcccgattggatttcgctctatcgggaattcgaagcccaaggtcggatcatgaccggagattacactgaaatgctcggaccggatgtcaaccttcagtggctcattcgagatggttgtgcgtctgggtggtatgaacggcacaatcaaggtgaagggccgtgggcaaagcctattgttgtcagagaggttcaaggtgctccagcaggagcaggtatcgagagtctcggaggcaagatgccgaacagatcattaaccgtagcagagatcgcagaactaaacggacgagatactaaggtcgaggtgatgaatgtcagcaatcagtcatctagcaagaacccaccgggtaaggagaagtctggatccgaagaacagaaggagagggagaaggggcatggaggttggacattaggggattggtcagactattttcagaaagataaggagacaagagggggcgaagtgttcaacgtaattagctacgaagtgtcagggaccaaggttggagatctgattacgccgcccaagatcgttaggtaggtatcaggtttctaattcgctggcaatctgttgtgtttctaaacatattggttctggtttgattgaacaatcgtcactatcccctttttttcgctttgatgattagggatctcgactggactacacgggtttggccgacatcagacgcaaagcacaagcctaaggttcagctctactgccttatgagccccgctggatccttcactgttcgtctctttcatccaccatcaatcttggacatgctagctcctatcaaatttactaaagcggactcccctctgggatatttctgtgtacattaggattggcatgtcgactttgctgccagtagtgtttattaccacgtgatgtctggccagaagatcttctacttgagtgagttcttgttctcacttcatccacctactttactaatcttgctgaatggagatgaccctatccagcttatgttgctctaatactaactcatctatcgccaaccttcagttcgtcccacgagcaagaatcttgacgcgtacactcgatggtctagttcagagaaccaggcaatcagttatctgggtgaccgagtgaaagagactgtgtggaaagtgactctaagtgcgggcgatacgatgtttatccctagtggatacatccatgcagttgtctgtttttttttcacattctgtacaagaaaaaaaaaggaaaaataactgatatctcctctttcttcctttgaattcatatattgttgttcgatttctgcagtatacacctgttgataccttggtctttggaggcaacttcttacattcatataatattcctatgcgtcagttcttcctctttattcgttcaatgactgttctagttcgtctgatcttgttttgttttgttttgttttgatggatgtagagcttaagctacaggacatcgaaatcgctaccgaagtaccgaagaaattcaggttccctcatttcaataagtacgtatcctctacatatttcatcaaagttatcatgtcgatcaatgccttacaaccccaaaggttatgttggcatgtcgccgagcattacagaagagaacttcaggctcgtcaaaagatcaaaacctcccgaaagacatctcatccgacaccaaatcttgctcctagttcacttaacgatagcgtatcgtatctggtcaccgagccattcactcctcggttactcgacaacctgtgttgcctctcggtgtatctcatgcgtcaggtccgaccaagagaacgagggttgaatgtggacagcgccgaaccagagtttccattcgataagattaaggatccaggagcggtagcgagagaattgaggtggagggttcggaaagcaatggacgacgaaagtgaggatgagaccgaagactacacggctattcctcagaaaagtatgaatagggattcgagcaaagaaaaccgcgactctgaagaggtgtcgtcgacaaaatcaaggaccccggcttctgcgcctacacctgttgagtccattggcggctcaggaaagaggagactctcattggaaacgaggatggatgagaccagtcttaaaaagcagaaggtagaaggagataaaacggtggacgttgtctccaaagagtatgtagatgctcaaaacactttgcttgtctgtcagataaatccaatgctgaccgtatgaggtcttgccgcccttgatttagttcatctccttgggacgcagatgaaatcagtcaacccatcatcagaactcgcacggtgactcttccccggccaggaggatcaaatgctcgaccagaacaagctctcgaattgtaccgatctgaatctcagatccgaacgagaaagcgtgcaatgcctgacggggggattgtagtagaatactcaggaacgacaaaagtagtggtcaagacgacgtgggctcctcctggaggtgaaggtgtaggtggaaaaggaaacgacagagctgtcttcagtcattcaaacccaatttacccgacgcaacaagcaaatccatccggttcttatctttctccccctctgaatgctccaaatccgtatataccacgaccgactcacccaacccaaccacagaggcctcaaccagttcagccggtcagatcacctatgccaagtacttctattgatagcacgccaactagtgggctacaacgtccaccttatcctgtacaagcccaaaccaacgcaatttcccctcttcctccccctttgcaacagcatcaacggttccccttacgacaagaacatcagcaaatacaccaacaacctcaacgacagcggccgatgtatccaaaccagcttcctgatggatatgctgcgccgtctttcaaccatccgatgaactctatacaacggccacctgctgctagttctgggatggtccttggtggcccgcgacctatctctttgaatggaactcaaatttctgttgggcaaactgacgggtcgcgactccaaccaccaccaccactaccagcaccatcgtctactctatctgatcttcactcgataccaaaccaacccttcccacatcctatccctcgttatcacgcaggtcttccgagccaaaaccaactgcagagacaaaccgtacggcctcctacagtaagatcggttcatccaccaaaaccgttcaattctgttcccctctcccagcaaacatctttgtcagaaaatttggtggcgaatccagcaatttcttcgccccttgtacatccagcaccaccggagtcgacactctcatcaagtcagagacgagagcctcctgtacctcctttccctgtactagagacaggggttacagcttctgtacctgtcaaaggggctgggcctgatgttgcgcagagttcgggtcttggtcatccgtcacctgtcgtactcgctgttgaaccagtcgccccgagtgcttcagccaagtctccgtccacccgtgctaaagctgtaaaagttgttcctatatccgattcagtgtcggcacctatgactcgatctgcacacgtgcaggcagctcaggtagcatcgccatctcctaagactcctactacggccaaggcgcctcaaagttcttctccccaagctcaaaaatcttctccggccatgacgatgagccttcggaaccatcctcctcctcctgtcgttccttccgttctcgcgcctacgactgaagctccccaagcgtcaaattcgacgttaaaggcaaagccaacagcgacgccaaagaaggttgtgcctcctctgaccaaatcgacgccgatggcaaccagacaacggtcgtccggaggacaacaaccagttacatccagcacccaatcgaccgaggggaaatccgtattgacttctgaggttgtaaacacatctggttctactacacctgctcctgtcacgacctcatcagagaacaagcgaacgacaagatcgagtggtgcaaagatgacaaatatggcgagttcttctccgatcaagacggggaaagtcgcggcagaggtttccacagctatggaagtagatgcagacgactcgctctctgagctttctgaagaaggaggatgaacaatattctatatgatatgaataactgtactcatcttatcgtgcatattgttaccaatctgactttgatgttcaaataaacgagtgttattcaatccgaaagaacctgcttacaatctctcacacgagcatcaatgaattctgggatctgagagacatagtggtctgtcgacaaggttgagctaactacgtcgattacgtaatcgaccaattataatcgcaatttcacttgattttcttctttctatctcaacagccatcacatttaagacggccatccagcctatcattcctctctcgttcctctcctcctcctctcttctataccctcacccctcaaagtaatggacgatgtctgccggatctgtgttaggtctcccgcaagcctcgagccttgatcggtcatccccgtcgagctcaacaagctcagcccttttgaacagatccttgaaatggaatccgtttcctctgtcggcatcggattcagtgtcgcccggtttgatgtcctcgaccaatgtagtcaagaaacgaggaaaaggtcgaccgccaggtagtaagaacctgccgaagccacttccgggcgcacctccacctcccaaaaagaagcgcgggcggcccaaaaaggtttgtgcgcttgctttattcaatgatttcggtcttctggcttcatagaatttattatctgacgacccttcctatttcgatacaatagtcggtccctttaggtccggacggtcagccgattgcctccccacctagacgagctcgtggccgacctcgtcgtgatccgagttcacttcaatctcctaaacgatcccgagttcgagcgcgaccgagtgtccctgtgctgtcacctgtggtagatgagtctggggcattcggcgtggatatgaatataaatacaaggataatgactgaggagatcgggcaaaaagaagtccggatgacatccgatggttcaaccgctggttggaactcagtcgatattcagatggcggtcaattctacaggaggcatgccaacatatgagcttgattcgcagacggtcaaggtcggtgagagtggaacaacgactggctctctctatcagcttgcaaatcaaccaaactctgaatccataccactcgctcaagtgagtttccttgctcagtatctttttccttttctggctccaaacccaactcatgcaagaccctccgcttgatacatctgtgcgcgcatatttttctgtagcccatcgactcgttcgaagcatttgagtttccagactttccattctcatttgattttccagcgttccttcaagaaatccaacagtaccgtcggattcaagatgatcatgaacggacgggtgacgtggaaggagagccgggtcattcccttgtctctccgcacaatccatcttcacatcccctctgttcttcatcctcttcgtcaacagtaccaccagcttcgctaccatctcctaatcctcttcctgcctcttctcatactcaatctcttccggagaatcagacccaacaagaacaagccgaacctacgataagaacacgacatagactttcacctgaaccgccgatgatgtcagagatcgaacctattcccttggcagattcgtttgcctttgatatgccggctttcttgctggagattcaacagtatcatcgagatcactttcaggtcaaggatgacgatgcaggagatggcgatgagaggtggtgatcgcttcgctacttctttctccgttgctttccttttttctttttcttctcttcttttttcttttgtgttttatacatatatattccctctctcctcctgtcactaggaatataggggaagatgacccatgtctgatttgaccgtttctgttgtatcgatgtctatcacccctgcctatgtctgcctctgcatgatgatctaggaaggtggtttctgtttcccttcttctttcttttctttttattcttcaaatttctcattgagcgactgtagacgactccttctttgtgtatcttttcctctcccttcctcgttttccttagatactttatagtttgctttctcttgcaggaaaggatatgaatgatgaaaacaactgagggagactgagagaaacattcacatgttcacgcaaaccaagggcacaagaatgagagaaagaaacgatatatgtgtagaacgagcagaaaggaagaaaaacagggcccaagacaagacaagtgaagagaggaagaacgagaaacgggggaagcaggaaagtacggtttggaaggcgagtaggagtaaggggatcagaatagaagagtagaatgtagaagacgtatcatgccgctgaggtccgattaacatcagtcgaccggacgacaaatgcagacgatttttagctgaagagatctagatgctgtcagcggaaggggagatgatggggagagagagagataggatataaaacaaaccagaatgtgaagggagggaaaagggtaagagatagagagattaagaaacagaaaagggaaactaccaagtgaaagcctcttcgtggtagacgatctggtgagcagtcaccccaccgcccaaagactgcttgacggcctcccgcgaggcatcgcacagcgccgtcggcccgcaggtcgacacagcgatccgctcgctcgcaaacggaagcagccgctccacatgagccgcaacagacggtcggccggcagtagggatcgtccggatcgcaggacccagatgggagaacgaccggtcgatcgcagccagcgcctcctcggccggcaccatgcccgacgacttctccacatccaccgactcagacgcagccgagccggtgtagtgcacatggaactcgacaaagccggcaggcatcgacccaaacagcggctccagccggttcaagtacgggatcaccgcccggatcgagtccaggtcgcggatcgaccagacgacgacgacccgcttgacggcgagcgtgcccttgccgagacactttgccaggtccgccagatgggccacgttcgccgacacgccagacccgccagacacaagcagcacggagccgtagtgctcgagctggacagagtgtccgtacgggccctcgacaagaagcttgacccgcttggtggacacgccctggaccgttccgtcctcggcagacgggtcgttcgcaagcgacctcgagagcgactgggtgaagccagagtacggcttgacgagcagctcgaacgccgcaggcgagtcaaggtccgagctgtcgaactcgtggtccagtgtggagtgggtcgaggcagacgacttcttctccctgtcagactcctggtcagagcttgaggcggccgacgaccgggcgccagactcgagaggaagcgccatccccatcggccaggtgatcgtgaacggatgggcctgggtcaccttccagtcggccgaccggacaaacacatacgttcccggcccgcccatcccagcaggccaccggacggaaggcacgagccggagccggatgaagctgccttcgccgacgaggtagccttcggcggcaaacgcgcccgtcttgggcttggtcgaccgcgacgtccggaagagggcgggcatgttgaggacgacgatgcggacccatcggaagaggtggtccgaggcccagaagccgacggcggcgtagatccatcgaaggagttcagtctctcggcgcagcaaggcatggtagtaacatccgacgacctgtgggtgtcaatgtgagtaggaaagggaaggtacagggacgaagagagatgtaactgtcagcaaaaggtctataggatttccgagggacgagcacactggagtacacgtgtgcaaagagtgtgaaggggtgcgatagaaagagcgacgaacccagaggagagcaccagtaacgtgtccaattaagaaaagctgaagaagaaatcgaaaaagagtgaaagtgaatgttggacgtcagcagaggcttggttgaagaactgtagagcaagagaaggctccgatgcgagacagaacatacctcgtagcagagctctcggattcgccgctgactgcagaagaacaggaggagacctccaaagatggcctgatatgaaaagacagagaggtcagattggagcgtgtagaaagagggaacagaaagagaaagggggtaagaggaacatacgacaaaaccccaattccagtaagccctcttgaacattgtgggtagctggtttgaccaaccctccatgagcagccagcctatgattggatttgatcaaggaatattggtcagtcacacgggaaagtagagcagccggttcaagtaaaagcaagaaacgtacagactgtatggacaaagccatgcatgaagcacatcctagacacccatcggtggtagatctggatggtcgagtagcttgcgccggtcatggccgtcaggatgttgtttctgcccgcaagcgcaatggcgagcggggtgagtccgaaggcgaggtaggcgcatcgatcggcggcgactcggaagtactggcttcgggagtatccgacggcgatgtagctgtgattgtataagttggaaagtgaaggggagtgataaagccagggtgagagaggtcaaagaaagaacgaagacaagaacgagaaagcgggtgagcaggaaagcgagacagaatgagtcaatcaataagcagagtgaaggaacgaacgtcaagttggggtatacagtgggttgatagaacaccatcaggacattgaaggtgaccaagatggtaataaaaattccgtgaagtctagaaagggtcaaacaaaagtgacgatgagggtgagaaatttatcatttcaggccgaaaagaggaccaaaagcacggaggagaggaatgcagtcaaggtagacataccgggtcgggatctgcacagacgtccaccttccaagcgcacctttcgccccgatgaacgacaccggctgagacgtcttcttgccgaacagagacgacaggtacaggtgcttcacgatcgccgtctggacccgctggacgggggcggggagcttgccggtgacccactgaccgatgaagtgtcggagggtggcgacgatgaagatgatggcaacacagccgaaattggcgtaactggaggtaggggagtaaagggtagagggaaggaaacaaggttcacatcagagacagcaagaggggagagagagatgaaagaataaagcagtagagggaacctacttgatgaacatcggaagcgcaaacgagctccacagtcggatgatcgaggactggacatcacgtcgaggacaagattagtaaaatgcaaagcgcaagaccgggcaagtgaccgagtaaatggttcagacgacccacctgaagataagcgagctgaagctcgggagggtagctcgcctgaagccaatgaaaggaaggaaaaggaaagagaagagcgctgtgtgagcatagtaaacgacgatgaacgagactggaaagatacattggcacgtacaacctgagaggtgactctgctgctaataccatactcggagggcagtttcaatgcctcttctatggtccagtaaccccaagccatgttgaaagagtgtaagaacgaggaggggggaaagcgaggggagaggagaggattcgagaaggtgtagaaaagggtcagtaagaaagagccccgggtgaatcagcggactagactccttgttgggacgatgagaattgagatgatgaacagagaggaagagaggaagggtgaaacgagctaagatggaaagagagaatggtctttaagactcaacgggttagtttcccatcaagatctccgtttggtctctttttttcgtttttttctctcgctctccttctgctttgtccgtgaatcctcgtcgttttgtcagtcttctctctgtccctatctctaccgtctcatcacgcaagcaattaaaatgacaacaaagaagaaacaggaatgggctagaattcaaagcattcacggaaatagatcggtggcgggacagcatcagcagggagaacgacgttggttggttagtccatctagtcagcttgtcaatcgacgaatgagaaaggtcgaggtcgataaaggaaagcaaacaggaaggaacagaacgaaaaggagaaggaagaaaatactagtcggggcaacataacagagcacaccagcggtccggagctcacagaatcgaccgtccagccggagccgctttgcatattatgccgacgtcaacggtgagttcgggctaaaagggcaagatcaacaaagcccggacaaggacatgttgctataaatacgtacggagcctttaaaaccacgatatctgattatcgttcatcatgcccgaccgccctgattaccaaaagaatccgttcaccgacggaaacggtcgatcttgtttatcagattgttcaatctgattcgtccgttgttttttcactctcgttcctctctttattggtttcccttgtgttgtctctacatctgtagtattccttatgggattggtaccgcccgtttgcctccttcacaatctttcagcctaaccgagacacgataggctcgctgaacagacgacagaacaatcaatcaatcaatcaatcaatcaaattttctctttctcttctctctacgcgttcagctggcttgactcgtgcatgcatcatgataaatcttctttgctgatcttcgattgggaatgattatctgattggtcgaaccggcccagtgctgattctttcgacctattggttctcctacacaccaattttcacccgtcgccccacgcaaccacatggctgattcaagccatgtttggcgggtcgtattcaactttctttttagaaatgttctcctagatccatgctcgatcgatatccggacggaagggagaaggaaagaagatgatgaacaaagagaaatgaaaggaaaaaaaatcgtttttttttctctctctcacagcgttgacgcttaccagaatcgcgcacgcttccttcttcctcctgaaccgcccgtgtttgtcatcgtcttctttttcacatcgaaaccgctcctggttggtcgcttagttggataggatagaaaagtaggtggagggagagaacactcgaaagatgatttattattcactcctcctttccacttctctcgaaagtctcttctgtctttcttctttcttttggtcctcttctttccctctcttctcaacaactcttctctttcttttcatacagctcgtcaggcagatcgtcgtgatcttcatcaactctttctcctccttcctgtctcacaactctcgtccaaaaaagaatgcgctctgttcagaccgtttcgtgtgttgccgtgctgtcaagtgtagccaccgcatggaaccctttggagtggcaaaagtagattacccctgcaatcttcagaagcaacttttggttcccaattgactgatggccgctcctgcttgtttcctcttgctatcatttctttctttctcaagatatgccaactcagtgctctcttcagtcgcacaaattgacaccatgtctaccacggcatgggcttactggtccgttgatctcgctcttcatcgtctatttctatcttctgctctgatcacaatcttggctaatcccttcaccttatctccctgaacagggctcagaccgcggatcatgctcttattccgctgttcaaggagatcgaaaaggcaggcgccaactacaccatcgccgttcccaccatcgccggcttccgcacgttcaccacctccaaaggcgtcaacacctccgaccttgccacgctcaactcgaaaggatggaagtctacgtgggcagatgcctacccgtaccactgtgggtgctgtcttcttcttcttcttcctctgctctccctgttctctttctcctctctttctcctcctcttcgctctcgcgtgtcgccgcgctcccttgctgatcaaagcatgcgctcgttcttcgcttgccttcttcccagtcctcaaatcgacagtcaagacaacagccgtcaagtccaaccagaccatcatcctcgactcctacaagacgtcgcctgcgggcgactggccgctgcagatggtgtactacatggacggcaacatcaaagccaaggacgtctctgccgcgtcgacaagctcgtcttcttccaactctaccacctccacttccggccacggttctagttcttctaactctactacatccgcctctggccatggctctagctcctccaactccaccactgtcgtcgcatcctctaccagtacggctaccgattccgctgcctcggctgcaacttccactaccactcgtactcacaaccacaaacgagctcgtggtggtaaaggaacaaccacctcttctgttgacatgagcggtatcttcaacggaaccttcggtgactcgttctgtcagtcgtttactcctttcccttgttgcatcttttgccatatggcgtccgcgtcagtcgcccgctgacactacttctttctcgctctctactcgctctctccttcttcttctccctcctcctcttcctcctcttcctcctcttcctcctccagacggacagtacaacgtcaccatccctgacacgaccgtcgggacgttcgggatcgcccaggccgtgagcggatgggtcgtgagtctgctctttacgctttcctctgctgcgctttcctctttgctctttgttctttgcgctttccttttcctccttgctcgtgagcctgcttctgagcatgtctgtctttcactttttcctttcttctcccttctccacgccttctgtgtgctcctgtgtgctcctgtgtgctcctgtgtgctcctgtgtgctcctgtgtgctcctgtgtgctcctgtgtgctcctgttcttgccccactcagaacgagcccaagtggctgaaggacacactgtcggacctctcgatcaactacacctccctcgtcgccctctacccgtcgttcgccaacctgtcgacctcccggtacaccctgttccttccgccgtcgagctcgatcccgacgtattccggcgcggcgttcgagtcgttcgtcggcaagcacctcgtcaagagcctggcctactcgcccatgtacggctctggcggagcgaacctgaccgcgcaggacggctcgacgatcgcatggacggacggcggcgtgaacggcgcaacggtgctccaccgggatgtcttgacgaacgcgatggtgctccaggttcgttttctctctttccctctcttctcttctcttcttcttgcttctgctgccgccgctgctgctgctgcttctctctatccaaggctgaccccagcgctttccctccttcgttcgctttttttctgcgcctctactctctaccttctacgctctagctcatcgaccagccgttcaccaactagtcgaccgatccgagaacgacaagaagagggacaggagcagggatacggagagagcagggcgagaggtgtgtggaggggggtgtgaacgcgtgtgttgacgggcatgtgatgggcggagaggggtggagaggaaagacgagtcgataaaagaagtccacatgtacatgcgcgagtgagaacgttcttcgaagaagatatcctcccgagagcacacccacactgtctcatccctatccctatccctatccctatgctctatttcgcttctcgcctttcgttctagtcttcatttcatctttcatccttgttttcagtcttccatcttagtctacacgctgcttgtttcttgggctttcttctcactaatatgtatgtttcctcatcctgccttccgtcgtctgctttctctccctgtccctctctctttctcttccatccccctgttctcgagatcaagtacactctcacactcacacatacgacataagagtaacgtagcatcgattagggtcatagaaaatacagtgtacaggccctcccccgtagtatcctcgtccatcgcaagccgtcagcgcgaatcagaccagagaacgtctgacgagaaacctggcttccgactttcagagagaaatggtgatgacatcaggagagggagtttaatatttgaggataatgtacaacgcgtggatgattcctggatttccgttgatcagaagggtgatgatgatttgaagatctcgaggtcagtatttgtgagatggtaggtaagaatgcatggaggaagaggacaaaccagggatgtaaccaaggatggtcaacaagacgttgatccagaagtcggctgtaagaacaagttgtgtgaagaaaaaggtcagtccagacttttcgccaagatggaagggtagggttggatggacgggaaggaaaggtaggaagatgaacgaaccggcacatcctcgctcactagaaccgtttgcatcgtcacaaagaaaaagaatgcatccaaaggttttgttcggtcccaagaacacacaagaagatccgaagggaatgaagggtaaaaatagaacatcaagaaaaagagtggtcagcggataacgtcccttgttcctcagtgcccattctctctcctttcgtcattcttgtgcctctaggcttgacgaaagatggatggatgggttaggtagaacgattgaaaaggtagaaacgcacaggaagacgccaagaggaggaaggaagatggccaagatgatcttgaggatatcggagcaggtgactggcctttttttttcgaacgtgaggaagatgaaggcaagaagcggcagagccgacggcgagaaaccgaggaatcagagatagctcgaagaggaacgagacggctaacaagaacgacgactcacatgttggaaggactgtttgttttctaaaagaagggcgaaggagagattatagttgatgagatgatgttggaagggaaagagaaagaaaagaattcagtagaacgaaaagaaagagaagtttttaaagagtcggtgtgtatgcgtgcgtgtgtgggaatgtatgtgtctctcgcttgcggtgacatcaccgcccagatgtgtctttacgtttcccgcagtcaagttctcagtcatacctcataatcaaacactaacgcttccggctgccgtgtgctcagcagcgagaatagttccgagtcccggaaacagtcatccgggttctctctcttcacatacaaagtaagaagagattaggtagagtgaacacacgcctgcatcccgtcgagatgaccctgcggatataaaggggcatggatcgtcgattacctgtatatccaaaacaactctgctgtgtctgctcatggtgaaagcctaagtggtccaataacggcaaacctagttttcttcggcgcttacttgccggcacgtttgatgacttcatcggtcattttggccgttagtcggaggacagatcgactagagattttggttgatagacagaatgatgtttgctccgtaaatgtctcacactcttggcaatgcttattgttggtcaagagggaaaaaaaaggaaaagatgatatagttgtagcggcaaggaaagatatgatggtttatgcaatctatgtagagaagagatattgaaggaaacaacagattactcgcaagacagatcctaccaacgttcgagacgagcgatagtgatcaaagggtaactaaggatacataaaaaaggggggatggggcggaggtacgaaacaaaaatgggacggttcgtgtgatgatagaaagaaaaacacgaaacgaacgaccactgtttaaagaccttcgaaaagagattcgggctcaagaccctggaacgagatcttgtagaccttttcgaacaaggggtagccatcgagtcggcctctggcctcaaggaattggtagatctcctcggaagtgatggttccctggagcttctgtccgtcgagaagctcctcctcgagctcagggaaagtcttaccagacttgacgaaagcctcggcgcactttcggtttcgtcctccgaacgaggtggtgatctgaaagagatgatcagaagttaacggtttagtatgtgtaaatgttgaaacaaggatccgacaagatatgagtgctcaccagatcagccacaccggcagagtggtgagaaaaggtggaaggtgaagcgtcagggaagaattccaaagtgaaagaggacatctccagaagaccaattcgaaggatagcagctgccaaaagcggacgacggatacagatcaatacaaaaatctacgaattagagaccgacagaggaacttacccttagtgtttccacccatgccaagcccgtcaacgaaaccggcggccatggcgacgatgttcttgagagctccagagagagacactccagagacatcctcgatggcgtgaacacggaacatgggggtatcaaacacggcgtgccaggcggcagcatcctgctgagcgggcgtaccgatggtggtctcacagaactgggagttggcaacctcgagagcgatgttggcccctccgagagctgaacaaggaaggccgagcttctcttcgatcaaccaggggtaggtgaaaatatcgggtccgtggacttcgatacccttaatggcagagatggctcgagccttggggtgaagaactccgggcttgctgagctcagctaagacctggaaagaacgatcagggtgatggatggtggtgagcgttgaatgagatagctaggtcggtgttaagaaacacacttacaggaggcaagaactgatgaggaacgcagaaaatgatgagcgtagcatccttgacgacatcggcgagctcgggaacggcgacgaggttctcgggcaaagagactccgggaaggtatcgtgcgttggtgtgctccttgttcatctgttcggtgagctttcctcctccttcgacctaagaggccgaggagaggagaagaaggggatagagaagggtaaggatcttgattaggatccaaaaaaaggcagatacaggcagaaaagaagcagaaaactgacctccttctctcggacccacatcctgacctccttgtcgaatccctccttctcggccgtgttcatggcggcaattctggccaaagcagttgcccaagaaccagaaccgacacaggcgaccttatcgaacgagccaggctctcgctggggagccggggtggccgctccgctaaggctgagagcttccatcttgggaaggttggcggaggagcctcgtctggagccaggggcggatccagatcgggatccgacggaagatcctcgtctgagcttgacggtcggcgtgctgtcgatctttgtgtcttcagttagggacgagatgccctggagaccggagagcgcgttattgggcagatggctcggcctcgtcatcggcgacggaggtcgggaagaggcctgaggataagtgtatgcgtgtattcagaaacatgtcagtctggcgttctctatggacttgctgatcggatcaagattgtagacaaattgagagaaaagaggaagaagaagaagaagaaagagaaagaaagaagaaagagaccaggaatcaaggttaaaaaaaattcaatctcacaggagtagacatgggcgagggaagggttgacatggtgaaacccttctctgtcttttgctcggttcgatcggacatgatggatgactatgtggaagtgagagtatggatatgggtgtgagtgtgagtgtgatagattaaagcaagtggctgataggaagtaagaaggagacagagatagagatgagggttgaaagaaaagggacaagaagaaaaaagagggagaaaggaaagacagggcgcaaggtacagaaacaagggggcgaataaagagagatggatctccccctcgactagctaaccctagtacgggcgagacggcgagagagggagagagaaaaaattaatgctgagaaaaacgcccacgtcagagaacgtcccaaagggaagtgggaaaagtggccccggtttaattgttttggttttttttcggtttttttttttcagtctcgatgttatcgtcattactctggctgctcaggtccaagaccggagtaacccttggattaaccagcagagacaacgttcaggagaaaagctaacgacagccctcagaggtgaggcgcgaggcgcaaggcggagaaagaaactcgttaggctcattcccatcatgcaggatggacaagacattttccttccatgtgcctggtgcattctatttgccttgcctccggcgcgaaaacatcacctccctcctacccctttgctgtctgatggggctgataagtgggggagaggcagggcgtgtggtgtgaatgtgtgtaccttcttggtttgatgacgtcaagtgatctacttaaatgcggggcaaagtgactgtggagtgaatgatcatgcccctttttttactatcattttgttttattttattccatctcccttcttttccctagttttttcaccctttttttcccctcaagcgtaatgatgaatggtaattgatcgatctgtgtgtctgtctctgtgtgtctgtatggagtgtcattttcccccacagcccggtcattcatcgtctcacccacgcccacacacttccttacttggcctttccccggccgcccggccccctccccttttttttcttctctattcctgccctcgctctatcgcctgtcggatctcttctggctcattccaccaagagtacctttttttttccttcttttttttttcttcccccagcacatacataatttccagccctctcgttctttcctttctcctttcttccaccatcccatctctccttccttccatcaactttctttaagagatagaccaggacttgactcattctttaacatccacacatccagtaatcttttatacacatcgcaatgtccgagaccatcaccatctcccccaaggcctgtcttttcgacatggacggtaccctcatcgattcttcccctgccgtcgtggtggcttgggagaccatgaaggagacctaccctttccttgtgagtccgctcgtctttgtgtcgcccttgacaccgttcctagcttccgtttcctttctaacgaatgaatcccttttcggtcatataggatcttgatcacatcctcaagtctgcccacggataccgaacggtcgacgccttgcgaaagtggtgcctgatcgacgatcaggagctcctcgcgaaggaggtcgtccgattcgaggttgccattcttgaggctgccaaggccagaagtgcctctggagctgacggtatcgtttccttgcccggagtcaaggacctcctccgacagatcggagagggtgccgaagaggctcgagatggtttcgagggttgggccatctgcacttcttgtaagtagacttgtcctcttttcctgggttttctttttctctttgcgtcttgcccggttatctacgagtatgtctgacattctttcaaattctcttcctccttctcttagccactcacttctacgcctcccaggccatccctaccgccggtctccctatgcccaagatcttcatcaccgccgagtctgtgaccaaggtatgtgtgattttctgctctgcgcgcatatagcctttagttttagtcattgaacatcatccctgccctgtcttgttcatcacagggaaagcctgcccctgacccttaccttctcggagccaagcgaaacaacgctgagcccaaccagtgtgtcgtgtttgaggatgccccgaccggtatccgatccggaaaggctgccggttgcgtcgtccttgccacctgcacttcccacaccagggagtccctcgagaaggagcaccccgactttttggttgaggatctctcccacgtccaggctaaatgggttgacggtgagctccacttgaccatcgagcagccgaccgaccgagcctccccggctcccacccccttggctactccttcggtgtcccgaagcggttcccaggagaacctctctgagtttgccaaggccgctaagaccggacggacccccgttggtactcctgctgccgatatcaagggagccctccgaggaatgtctggcttctaatgggagcagtcgaagaacgaaaaaggaactcgaccgttttgtttcctctctcccatcgatcgtgtacccctttgttttattcttgttcaatttttcttcacttctcaatccctctgttgtttgatgaggtagagcatctctttcctgttacgtgaccatgtatctctagatatccattttgcatagactactctcgaggttccgtccctctgcattcaatgttctttttcacctcctctcaacctctcgtgcgcccgactagtgacattcttgcactcaaacgtgtcgactgaaaaaaccgttagggaaaacgctccagcatgaagagacagaaaggagaaacacacggtcactcgggagagcggtaaaggcaacacgcgagatcgagttcctccgacgctgcaaaagtccctgcgtcatctgttctttcctccatcagccacggatcgtttcttttgcctccttataccggtcacttcctcttaccactgttctaactttggcctagccctctccgtttttcatctgtcacctatcgatctcgtattcgattccatcagcacatttggtagagacaaaacgacccttatcgataacgcaaaccatgtcaccttcatcctcggaaaccccatcgttcccaaacagagaggctcgaaagctgtgttgggcagcaagagacgagtattatagctgcctcgattcgaagggggctgtcgctcctggctcggagggcaaggcttgcgggaaggagaaagatgcgttcgaagggagttgtgtaagaagctgggtgagtttctcttttctctcttttcttttcttttctcgttgtctcctttctttcccttgcctttcttctctttgtctttccttctccttcttctcttctctcttcgtctttatcctatattgaaaccatcggagagcaagggaaagttgatcgatcgattgagcaaagcagaaaagatcggtattctcctctctcgatgagaatgatctcccgacggagaatttcacattcccctttctacacacccacaacccatgatatatagtccagaggacagagtggcacgactcgattgactcaaggaccatcacactgacgaacgcatcactttctgttctatcatctttcacttggcttcttacctctcaccggttctgaacccggaacgcaaacgaacccccttcgttctctgaccctccgattcccactcgatatcttcatcctccccttcaccccatccccgtgttccgcaaacgaacattctcagatcgactacttcaacaaaagaagagtactggaagcaggcctccgagctcgtctactcgaggatcaagcaaaagggatcgatgtctctggacttagatacggtcctgacgatccgaaaaagaacttttccagcagaggttaaaattgcctgtcaggcgaaacgccaatgccaacggcgaaagaggacgggaggagaagggtgtatatatgtgtgatcatgaaatgcgatcgggcgggtgtatattgacagacgggccggcaacgagtttgaatgtgttttcacgtgtataacaggtgcacatctttccagccaagtggtaaatgaaaagaaagtagaagaagaacaaggagagaagacaatctgcatttgtgggatcgtacaccatctatgaacgacaggaggaagagaaggaaacaacaagagtataagccgtgttaggaaaatattctatcggtaagccagattttcatctctgcgatacgctaactacagctcctatggcttggcctgcttcgggtttttgcccagtaactctgctacaccggaattagcgagtagaggtgcccatttgggttcgatgtaaatcgcgctgttaaacaacagaaaagttgaatttccatattagtgatacgttccgcatacgtgaataataagaaagaaagagaaaacgaagaaggaaggatagaaagaagaaaagacacctacgtagcatccgccaagagctctccttcaagactcttcatctctgcggacacgaccaccttccggcctttaagttcttgaagcttcgtccggatgacaacgaattggttcgctcgagtgggtgctcggtagttgatattcaggttagccgtgactccgatctttgtcggcaagttcaaaagagcctatatgggacaagaagcaaagaatgaacaataagtgtgagtgaatggactggcaagaaatgcccgcagagagagagagagaggcaaagacatacgtttctcccggttgcctcatccaacacgacaccaaccatacctccgtgtacaatcccgtcgtgtccgcacaagcttcgaccaagatgaagcacaatcaccgcctctgactcgtcctctttggcaaacaccaacgggggaacggccagccgaccaggaccccggagcgtgcctgccgtaagggaatgatgaatcttggcaggatccatggtcgcgtatggtcctgttcatcacagaaagtcgcagcggaagccacaggatcatcagctcatgtctactgagctcaagagagaagtgaaatagcgcaagtgagggacaaacggcaagtgtaccatccttccttgacggcgtactctttgacgataggaagcgactttaaggttacctcgatctcttcagtgtgctcctttccttcttcagaatgcaagtgcggacctgtgatcatccggtagtatgcgtattccactcaatcatcagttgctgtgatctttcattgagcggaagaagaatcaagaagaaaaggaaacttgactgactggcaggagccgaacggggagagataaaggtagctaggtcgggagggtagagtgctcctaaggtgtagacagagatggcgaatgtgccgaatagaagtgtctttgctgcacatacgaagcattcggttagtccttggtgtacaaatccgactcgatggacaaagaccaagcaaacagacagagaaacgaaccaagcgcgtcgaaagccttctttccacccgaaggccgatgatgcgtcctgtgggtttcatgtccatgatgagcgccagatggagtccggtgggtggaagtgaacctgaagctgtgaggactcagcctgggagtaacggatgacctgatcgttctggataaagactgcatgagctcgataggatagagacaacacagaagcgagggagtagatggaatggatggctgaggagaaacgcggatgggcgggaagtcagagtaaccggaagccggcggtaattcggagtcagggcaactggccctgaaccctgaaccttgggcctggcagtgtgcctgagcttaaccctaaccatccgttcggccaactcctaggcttcatcctttcttttttcttgttcttttttttgctctccctgcttgaaatctttcagttcatacaatcctatccttcatcgcaatgtccaagccagtccagtttgtcatcggtcagtctctcagtcggatctcttaccaagactaagcttctgctgacagatccttcttttcgtgatcactgctctgaacagagcaccttgaggaggacgatgcagagtccaagaacgtccctgcttgggtcgaggtaaatgattagcataggatgtagcatatgatgatcacgaagctgatctctttgaaaactcatcgtacatgtcgtcaatgaaaagctcgagtacagggtaaggcagacccggcgctgagtcttgttatctcagctgtagtcagttactgatgtactatgtatctatcgaaacctctcagcacatgctccaactctctcccgccgatgctaccgtccacttcacctctctctcttctacgtcgtccgctcttctcttgtccactctagcctcgccatcatcctcttcttcatccagctctccggcaagacctcaggcgaacgccgaggctcatactcaaggcattctcgagctgatgaaggagcgaaacatcccgttggagagggtctgccttctggaccccaaggccgagaaggtaattggaacgtctgactgggagcatgacggatctggagagtttgattggttcttgtttggaggcatcctcggtaggttccttgagtctctctctctctctttttctatatccgacacggcataccaagttcgagtatctttagatggtcccgaatcgaaagaactgatttaaattccgacgctatacgcgtcaacttttctctccaggggacgacccaccgttggatcgaacttctgttagtttcttctcttcataattcattggtttaggtaaactatgcttactcatccgtactatgcactctgtaatagatccttcgaaagatgggcttcccttcccgacatcttggccctgtgcaaatgaccaccgataccgcgcttggagcgaccaagctcgtggtcgttgataagagtgagtatgctgtgattgagaagacgcgctcagtcctgacaaactttgtttcactacttttggattctttgcgtatcacagttcctttggacaagattgaatataacgagtttcctaccatctcttttagcaagtccgagtctgtggaaatgcccttccgtatgtcccttccgatgtcgagcaacaacccttggtcgagtttcatcgcgtcgttacgagccaagctaacgtgccacatctattctcatctttgtcctgctgtctggccgataacttgctcgtctaggatacatcaaagaccagaacggagatccaatcctgccggaaggaatgaaggagcatcttcgaaaagatctggacagagcgttcgagttttagattcagatgaccatgagaacttttctgatgctaccacatccccgaacaccagtcctcaagacccatgtctggcgagcgcaagcatgtcaaagcaagaacagtctgcccagagagaagagtgttgcaagcgagctgaaaaggaagaaagaactgccacgaaggctgtggttacgatgttacacggccatggttacaaccccccctattctccctgtgcaagatgggttttttttttacttctcgtttcctcctctgcacacgcgctcgcatctctcgcttccatttgttctccatcaactctcctggtaagtctcaagctttgttctttcgtacgaggcgagcaccgggctcggaacgctgggtgtttcgtggtggatgtggcgtgaagaaagaccgatgggaacgaaagggatggcaggtcgaacacgtggatcggatgaaggtcaagagggatcatttttcccttccttctcctctcctcttcatcggagagtgccttcctggtcggagcgtagagcctccgatgtggattgatccatgcttggttccggacgacaagcttgagcaagccgttcttgacttgctgggaaggaaaacgatcgagagaacgaagaacaacacatttcaagagagaaaaaaagccctacgtcttccctttcccctcgttttctctcttctccttctcttccttcgttcgaccttctcgcatcgagtgccgttcgatgagtgattctctctcacaataaaaacatcaacctcattcatcctgttcccttcctgtccccttcccagtctcgttaccacatccttcctgcgccctcccacacgtcggatcaccttcctcttccctacccaagccttcctaagagaatcaagagaacctccgagaacaaaaaaaaaagtctacgacaagtactaaccttggatcccctccctccgtacctcgtcgtcttcaactctacgtccgatctcatcgccttgtcctcctgatcaatctacacaacctcaactc

SEQ ID NO: 189 - DNA, 16352 bp, Xanthophyllomyces dendrorhous
acctcaactccacgccctaccaaatcaataaatatggccgacactaccaaccccgcttcgcctcctgctgctgccgctgctgctaccaacaacaaaaggcctttctctgctgagcctgaggattcgactcataacaagaaagccaacattcagggtgaagaagacgatatcaccgcggacgacgtcaagatcgaacagcccgtagcgtccactcaagccaccgagcccaaagccgaagagacgcctgctcctaaaaagatggaaggagaagattcaaagatgcaaggggtggaggatgtcaagccgtacgtgtcctgtttgcttaccttgtactcttgatcccatagcgtcagggatctcatccagagtcgatgtcgatcgcgtctgacgtacaatgtttggttctacgtccacttttttatctttcaacacgcgcctctacctcatcagtgctggcgaagcctccacttcgacccttcctcctgccgctccctcagcccccccagcgtatgtgtttcaatcatctcggttctgagatcgctttcttcctcatcgtgttcttaattcttatttgtccatcatctcttcctttatccttctctcgaatcgacagtgccgatgctgccagtcagcaaattcagatgaggtgcttgattgttacccaggatgctagtgtcatcatcggtaagggcggtcgacacgtcaacgagatcagggttcgttctttctcaagatcttgtgtgtggtcacatatctgtggatgaaggtagtattgtgtaatcgaacagccgctcatcgtgtccgcaatcatctgttttcgttcgtgtccaatcgtggtgtatgctttcaactggttacctcttcgatcatctttgggttgttgttgccgtcatgaatatgcattgaataggagcgatctggagctcgagtgacagtttccgagtccattcctggtaaccccgagcgaatcctgcacgttagcggtcctctggatgctgttagcaaagtgcgtctgtttgcttaaggtttctcttttttgagtcgtaagtagctgacaaagagccgaacgcgtcgttgttactctttgcaggctttcggattgatcgttcgacgaattaatgatgagcctttcgatgtggcctccgtgcccggatcgagagctgtcaccatcaagttcatcattcctaactctaggatgggtactgtgtgcgtcttgacgagccatcttttatcgttgtgaaatccatcgcctctcggctaacattagcatctcttgtttggtctttggctggtgatcacaatgaactgtatgcaggatcggaaagggtggaagcaagatcaaagagattcaggaggcttctggagccaggctgaacgctagcgaagccatgcttcctggttcaactgaggttcgacctgtctacatattctcgcgacgcaagcagacatcgactgacctgtctcttctaaattttttctttcaaattcttatttccaacagcgagtcctttcggtctcgggagttgctgatgccgtccatattgctacctactacattggaaacattcttatcgagtaccaggatcgacccggatcccaccgagacggttctggcgccggccgatccgagtacagacagcagggttctggacgagactcatacaggcctggatccgagaggggtgataggtccgctcagaacgtggctctcgcccctggagctcagacccagagcatctacatccccaacgacttggtcggacccatcatcggtaaggccggatccaaaatcaacgaaatccggactctttccaacacccagatccgtattatggagccccatcagcagggcagcgagggtaacccgaacgagaggctggtgaccatcaccggtcagccggactctgtcaacaccgcaatgcagctcctttaccagcgactcgaacaggagaaggcccggcaattgcagtagatctgacttacactggtgtccatttctttgaatattctttgttttatttttacattcgtcatttcgtccatcacccttccccccttcccctccctcttccttcctctcgctgttttagtaaaccagtattctcaaaagggtgtcttattcccccttccttcccctctcctcaatctcttctatcctccccctcttctgtggatccctgttattccatcttcttttgattcttttccccttcccttccttctctaaaccctttccactatcatgatttttttactggtccgatacggaaggcaaaccacgtatgatgacgcatatataacacacaaaagtcgatggtttgcttggtacttatttgatacaacacactgacgggcaagattaaacatataatactgaatgaggaaaaagagaagcatatgcattatacatgtgaggtgaagagaagaaaaaatggaaaggtaggagaggaatagtcacaaggcagggttttttttctttcttttgatcttttatgattgccgccgtcatcatacgtatacttatggctggattgagcagacacatccaagagaacatgttcaagcccaagacggactcaaacatcttcgtggtgctcgggttcgctctgagtggccaatctgtaaggaaacagaatatcggattcatcaacgaaacgacacaagaacagttcatcgtactagctcgcccatttactctcgctgatcgaacgaagacgaaccctttcttctcgttggagttgacttccatggcgtctcttcggttagcgtagcctggaggactccaagaggcagatcgccaggcctgaggtttgcgaaagaagacattagctcaacatgtagtattcgatcgagcgcaatatgttcgagaatgaaaaggtaagagaaacaagtcagacgccaacttacaggtgtgtctttgtcctcccatagcacttccagctgttcgagcgacagaccggctccttctttaatgaagaagaagacgatggccataccgacaaagttacagcacgcaaagacgaagccgtatctataactaatagagtcggtgatgaaaggcgtgaagaatgctagcaggaagttccacagcctgtgttatatcatccggcagagattagactcattcctttacttttgttagattcataggaaagaagaacacgaattcagatcatctaaaaagagaacaaaccagttagatgaaacagaaagggactgcatctttgctcgggttcgtgtcggatacctaggtagagggcgcgaaaaaagtatcgtcgtattcaaacaaaacttcgttcacgagacaacgacatgacgcgggaaaaagaaaggcagaaccagatggatagaaacatacatctcgctggtaactagccaaacaccaggaccccaacaagaagcaaatccagctgggcaagtgaagcagagcaaacgtgataagcagacatctcttgaaatgtttcatcacaaaacttacataccgatgaacaggcagctagctacaatctgatgtagaggaatcatatgtaatatgttagagagaccacatggacatgacgataaccagtagggtaaaacttgataacacgattaaacagcagcgcaccatgaagtttccaatgggcttgcttgtcaaggggttcccggcagtgccagcaatggaatacgcgaataaccctaggacgaaagagtgcatgagatgacaaaaaggcagttcttgttagatggatgaactgagtaagttcggatattccttttggcttacagaaagactgccaaatacccccgaagatcagtggcttccttcttccaaagcgctcatagaagtatagcccagggaaagtgcagacaacgttgactgcaccgaggatgatttgagttgcactacagtcaaggcaaacgaagtcaaagtgtgagtaaacacagtgtcagtaaccttcctgcgcttcaatcttcactaaattatatcggatgaggacataaccactaactatccatcgcttaggcctacaccagcgaaaagagttgctccgtagtagaagaagaagttggcacccgttagctgttggaacatctgtaggaggattcccagtaaggtccgcattctcattcgagaagaaaagcattcggctggaattacaagaataggtcagtaatgcatcttctcgattgatcacaatgagacaacaacaacagaagacacatacaccaggttcctttcccgtaggtaagttctatttcgcatgatttttgaatctcatggaagtcgtgctcgacatagggatcaactatgaatatcaaaacaacctcaatacgatgggtaccgaagaacatcgacaccaataacgatcacgctcacgcgcatcgacagtagttcctctaactctagcgagcgattttcttgcttcttctggtttgccgtgcacttaccaatggaataaagtttacatcaggaagcacaggagaggttagtcgaaaagctcctatgtttgagacatatcacgagtcaaagacccacttagaagccatcgaggtgactcaggcatgaacaagatgccaactccgaggataaagcagaagacaatacctgtccaaacgaagtatcatcgcgtttacaatcactgattgagatggtgcaattagaagaagttgacccacagagacctatcaaagttctccaactggcagctgaatcaagtcttctaagaccgattccaaaacattcagcgactaggatgcccctgagtttgatatagagcatttgaatgtcagataactgtgaaataggctaagaaaatctgatatgcagaaggtttaggagatttttttaaatctacagtgtgatagccaattggtaagttccctactagccaccaaactcccaaggatatcagccatcgagtgatcgaatacatatcgagttccaagtactaaccactagagatccccgaatttgctttggagcaagctcagcctggtaggtagggacattggcggacagcgctcctacaccaagccccgcgacgaatcgtcccatagcgaactacaatttaaacgggccaaaatccattgaggattagcctaccgacatcggaacaagatagagaacagtggaagaacgaaacttgttgccagacgtgagtggaagtcatttggatgatgatacctagagttgaacaacgaatggaggaaaggtcatgtgtttttattcttgagtgaccagcatggtcgaacaccatacgaaccgacaacaatcattgaggcagcgcaagtcatggctttccttcgcccaataatatctgccatacggtttgccgtaagagtattagcacatgcccatgagcccgatatctcggaaccaagggggaatctcaagtcaacagttgtctatctacctgagatgtagcctccagtcaccgctccagtcaacgttccgatcgatactgtgaaaccgacggatgcaatcgcgtttagcatacatgctaaatagggacaaagctatctgagtttgagcctgccaaatgaggcagagtatttacaaaggccaacaatcaacccgtttctggcgtttgagaggtactttttaccagacgcatcagtttgtccgaatcgttgtagctgggaagattgaaaggtagctggttatcattaagagtaatccctcccatccagaggaatggtgttgcctaagcatgcgatcgaaagagttgattcactaacaaaatctggaagaggagtgatgcaagcaatttgtcctatatgtattgaaacaggagaagttttcatcagtggtcagcatcacatctgtctgagatcagccgaaaaggaggcaacaagcgaaagaccgacgaacctgtatcgtagccaaacacaaatcctccaattgaagcaaagacctatataacgacataacgacataagaatgtctcacgtcaggaccctcaacacagtccatacatagaaaagacgactgttggcaagcggccgtagccgatcccacgtacggtcaaggcgattgatgtaagccccaccggggcatcgtagattgtgaattgcacaggcatcctaacaagtcaaaacgctgtcaatagccagatgtagagatctcacaagagtgggatagatggagatgatgaggtctgggtttgatgcggttggagtgcaaggtctctctctaccagtagtcaaagaaatgcatgaccttcagtcaagagaaggatcatccagattccttgaagaagaaaagagatctagtttatattagtgcttctttcctgcatgaacaacgaaacccaagtgttagttaggtcatccgatcagccagagggaacgtcgcaggaggactgaaggtcttcaaggagggggagtcggaatgatgaatcctatcagtctttagtcagtttcgtctattcatgaatcaaggccgatgtttatatccgtgttaacgtcagcagccggcttgagatatgtctccagtgtgcttgctcgctcgtcgatcaaagagggagagaaaaaggagatagcttatgattaagagtgggagagaaagacgcggccgttttcaaaacgctcaaacaaaacaaagccgagctccaacgtagatcgttttgtgccgaagcctcggagatatagtcttcggcggtcatagtttacgccttcaagacgtgctgcctctggtctttcttcgaggttgctgaccattgtctgatgatgtacgtcaggtgacgagatggcgaaggcagggcaagcgagccagctagacaacgcgtacggataatcagatagatgcagtaatcatattatgctctacatgggtaaataaagtgggcaaaagaagaggaccatagaggcaggaagcaggaagagcaacccacgggaagaaacagaatgataaaatcaattgatagaaaaaaacaaatacaaagagatagacaaaaatcgaaagtgaaaggtacgaatgaacagaatggactatgatagcagggtagcagcggaaaaccgattagaggaaagatatttacaacgaatactaccacattagaaaagccctacaccgctcattcgcctcgagccagcgctgccgctgttgaagctctgcttgtgtcctgaagatgaatggtagctcgacgggagtgatgaccgctgtatggcataggaactcagatggaacggaatatgatctcgtttcttcgcccactgttatgagagtttatgatacatcataaagcagaaccgttagacaggagttcaaatatatcaacagtcgtagaagatgctttgaaggacatacgcaagagatgaacagaatccgcttttgtttcctgagcaagttgaccatcaagacacaagtagacgtcagcggctacatccaggccgaaattgacagcttatggccatagccgtagagtagatcacgaagaactgaaaaacagagacttactttgaaacaaagaaataattcaccgaccataagcaacctttccttgtcggctcgttaaatgcgttcttgctctccccaaccaaaggaagagagttcaaactaggcggcaagaacccctcatcatcactctcactccctccagaccttcgccaactttctctcctatgacctttcccatgggctgtcgatcctgccctgccgccgccagcctggtcatcctcgaagccttctaagaagtcgtcgtcgtagcttcggtcgtttgcttccgtcatatcgtccttgccttcctcatcctcatcatcatcttcttcgctttcgtcctcgtccgaactcgcggcatgcgggtcagagtccatatcgggagagtatgagtagacttcgcaagagtctaaatcaccgttgaggacttgattaagtactcgaatgaggtgtgggtgagtgaatcctgggcccgcgttgaaagaggtgctttggagagaagtcgaggtaagagaataaggagaggtcgctagaaccggcatggatgtcggataagaaccatacgatcgactgtagaagataaaggatgtacgaggtacgagataagcttggtaagacccactcatttggtatatcaagatcatgctgaacgaaggatgactcacgggccctgagagcttagctctagaacagttgtcgaaagctgtcgcagaacctgattcacactatgctctctacgtgaaccaaaacagcacggttagctcgaaacatcactcttacacgtccagtctttcgtttgttggataatatggatcccgagcagaggtagagagtctgaacgtacttgacaaagtgatcaggcgccactgaggtgaagtcatgatcaggaaacgcgacatttaacaaagcgacgatccagaaccaagtttgtctgtgatgtgcggaagagaatcggaagaaacatgttcagagggtgatctaaacaaatgagcgactagaacggactcaccggctgtccttttggtccaacctcccaaaacagctctctagaccagcatctcggagttctgggctcagcgagagctgctcgtccatctcggcctgttcgagcgagtgaatcgattcaagatgcttgaatagcttgcgttccttcgagacagatttgcaggaatagacctctgtttttaagaagggaaaaagaaagaggacggacaattacgtgtcagttctttgaataaatagtgtttcgagaaggaggactcagacgagataggcagacagaactcgacagagctatgaatgcgattaacatgctcctatcaagaaggtctgttccgtcagatccaaaccaaccgaagaagggttcatgctacaaaacaactacgcatatagttctctttatctctggcctaaagtaagggagaagagggattccagcccatccctctcagttctatgccaagcgatctttgggctccatatcctgctcttacgtcggcacatgtacacacacagagctccgagaagtgttcgttcccagctttctcttttctttgtagaatgaaatgtccggagatgaattagaacataaagtgagggtacgaaccgaaccgggtgtggaccttgcattccgctccttcgtattcgagcctttcagatagatggttcagttcgggagtgtcgagatatttcatttggaatggtagtagatggtgatggagggtttgatttgtatgcagcaaagagagtgctgaacgagttggcaccggattggatacaataacaacaataataagacggatagaattgaatcggatagggttgaagagatagttgcagaaacaagggagatggcagaaggagggcgaatgatgggaaagtacttccggatgcgggaacttgttacgcccacaaaatgacgcatcctttggtcagctcgacctgtcatcgcgaatggatacttccatccgtcctagctcaccttaagtggaacagatggcagagtggctagacaggataagatgcggttgaacgtgaaggagtagcgacgacatttattctcatttcagtcaaacgtttgttttctagtgttgttgtcccatggtatctcatcaacgtgggtcgaaaggtgcagaccattcgctttacgttcgaaacatgggtcatctctcaattcaacaataccttcagtcgactctgcccgatcttccaaacatcatccaccgcacgcttgacttcgctcttccattcttctgatcctgctggtcggactcttttctcgtctggcgtgcctactcttatctgggtttccatctctggaatgatggccgctcgagatcgcccgttgacaaaagtgatgtatcttagaccggggaacagctcttcgtatgaagtgttgagatctctgagtctgaacgatgtgttcgaacacgaatggatactgtctgtcagatatgaggggaacatggctcgagaatacattgatcataaggagagaaaaaaaaacgaaccggtcaagagtggcctgactggtaggggctccggtagctccctgctcctttttgctgagctcactaagaatgtcgccctcaccgatacgggctgtcgagtttcagttcaacatcaaacttatcagccatgtgaaagctttccatgcaagcggatacaagcaagaatcactcacgatgtccgccgataaagacactctgatcttctaacgtccattgttcaaccatgataccctgtcctctgtccaatacatctctgtaagcatgaggaggatcggaagagagggattctgccagacgaggcactagtttctctagtaaaatcggtgtcggctcgaggagtgtcgacaggaagttggccaaggcaggcgacgacggctccgaaagggaggagagcggagggagcgttggggagaccattctgtgttgaagagttcagatgtatctgtataggatttgcacaaaagacaagatggtttcctgggtagatctggctgatgctcgggatacagagtaggtcggatggtatgttgagaagtcgacagattgtctgttgttctctaatctcatctcatctcatctcttcgtctcgaccggagttggtctgacgataagcgcgagatatttggcgaactctcgtctcactatttacatcaacatcgtttcattacgtttttctgtcttcgtcattccatctttcctcattcttttctacagatacatacatacacatactctcttatctgaatggggcctcagtcttcagcccttccgtttggttctaagcctggagcttcgtcgaatcatgctcgaagtccttcaaccgtccagtcgatgctcggcggctccctcccgccctcacttcaggtccctccgcggccgacgtctatctatgataccctgtggatttcttcaaacgaatccggattgtacgttaggagtgtcagatggaaatatgacgcggtcaagggtggcatcaagatcggttggggtctaaagggcaaagtcgaggttctggaagaaggagagctccagagcggtggagaagaggctgaggtcaaaggacttgttgggatcgttcggttgtggaatggtatagtccattctttttcgccggatcttctgcttcagctctcgatgcctgatactatctatcactaccagctggctatctgttagttattgtcgaatccaaacaggctggatcatgtatgtttgttctaaaactattttgatgggccatgtctacgaattgatcagatcttgcgcacgcataacatagttccatcctctgtgcacccgatttacaagatcggtaacgtccaggccattcctttggtacctaccgaggcccaagaagctatcagaaagctctgttcctttgtttctcatgttcgatctcgcgacgcgccagctgactcaagagcatccatagaagagaatgcagcccgatcggattggcttcgatcgggagaagttcaaacgcccggtccggagagagaggagaaccagactgaaagtgaggaagagacaacggccaagtcgaatgcaccgggtcttttcaactggaaccctttcatcaaaggttcgtcggccgtctcgtccgccattcccagtaggacgaccagccctggccccagaagaccggccgatgaaccaacgcaagctccatccgagttttccgccccttccatcagtcaatccggacccagcctgacaccggcatcatcgacctcagcgtcgcgttcgcagctcgagtctaaggtggtactctcgatcgcctctcagtttgcctcagggcagatgtttttcagctatgatgtcgatctaacgaccaacctgaacgccaagcaggctaaacttggtggatttgaagggagagaggaagacctgatcgagccttcgttacatcttcctctatggaggagagttgagagaaggttttggtggaatgagtggttgagtcgggagtttgtggatgctggagtaagtagttcttgagttaagggcttttgaacggaatttatgtgagactcagatgtacaatgactaactagctaccttcttttgtcaacgaactcaagttgcatgcatatgttctaccgatcatgcagggttgggttcaaacggcgacgttacactttcctcgatcaattaacactcttacctctaaatcagaatcgacctcatcttcttcatcctcatcttcatctgaggaagatgagaacgatgatgatactgagtccaagaaaatatctggcaagatgccggtccggttgaccgtcatttcgcgaagaagcagagaccgggccgggctgagatatcagcggcgagggattgatgatgagggtgatgtagccaactttgtggagactgagcagatcgttcaagccgaggtatattcttcattccttctattcggttgttctcagtttgagaaatatgttgaccactcgatcactcacgtctcgtatctacaaatggcggaaaacgaaccattgatggtatacgtaccttaagggccgaacgttctcttttacccagattcgagggtccatcccattattctggtcccagtcgccttattcagcctcggccttggccctaaagccggcacctatgttagatagacctgtagaagactcgaaaggcccgatgaccgtccatttcgatacgctcaacaaacactatgggcctcaggtacgttctggccatgagacacacctgcgtgccttcaatcttgactgattcttcgcaatgatgttttattaggctattgtttctctgagcgaattgaccggaaaagaagctgtggtgactaatggatacagagatttgttagccagtctgggtagggatgacgttcagtgagtgattaattaattaaattcttactgtcgtctacgttcgtctcacactcatacctggatattgctctcttcctgttcattttagatacacacagtaagtcgaaagagttgactaggaattcagatcaacgctctcacacattttctttcttgttgtagatttgatttccaccatgagtacgtgaattctttcgataatacatctctcttacaaaggctacgacagccatatgcaataattatccattctttgggaggttcgcttctagatgccggggaatgaagttcgagaatgtttcaaaactagttcatcaactagacaggacattcgctaatcaagggtacgtagttacaagttccaggaccttatttctgagctctctgctaagcctttggcgttatcatttgtgtgtgcagatactttgagcttggacccctctcaaagactcaaaaggggaccttccgaacaaagtaagcatcggttttctctgatgtgtcatggcgcgattctctgaccatgtttctgctttgatagctgcatcgattgtttggatagaactaacgtagttcaggtgagatttacaatcaatcgagagagtggaacgcgaccactgatttaatttcccctgcttttagtctgcatttgcaaggagtgtcctcacgacccaacttgccagtgttggattgaccaacttatctgctcttccaagatcaactctggagacggttttcaacgacatctgggcgaacaacggagatgcgatttctaaagcgtatgcgggcacttcagcgtgagtttgccctcaattctatatctgatcatgacgtccgttcttaactattcgcttgtttttatcattcaatctttatcagcttgaaaggtgatttcactaggtatgttctccaatcaatatcgaagatgatctcgacacattgagcattgataactgagtggacattctcaaatgcttaggacgggaaagcgagacttccatggtatgatcaacgatggactgaactcccttgcgaggatgtattcatcttcgtttaccgacttcttcgctcaaggtgtgtttcgttattcttgtcttgatttctatcgcatatacactcaatgataacacttatacttcttatcgaaaatcgaagcgataatctcattcatgttggggcaacggagtatatcaatctttaccgagttctcagaaaagcttcaggtctcggagccttcaaatcttcttcgactgagcatcatccgagctgaagccagtcagtcaatttgctcttatgattcttcctccagatatgaccatctaaccaatcggatgaattacaaaaaaacagttgagacctgtacagcacgggttctgaatgaaggagagactcgtcaggctggatggactcttttttctcccgtggagcaaagtcgaaccattagtccctcgtttgaagagaaggttctgcttctggtaagtgcgatgttgattcataactacctgtagaatcagtctttgacaagagctcttttatgttttcgtgaggatagacagagcaagctctctatgtctgctcgtatgaattccaactagaaaagtgagatgattctctatcttatttttgattatggttgtgttcaagattttagcttcgtctctgtttgtcacacagggttgtcagttttactcggattcctcttgcaactgtacttggattacagcgtggagaatatattctatctcctttacaagagtccggaaaagaccccgaagagaattatgggtgagtttctggcttgctactacgatcttctaaaccggcggccttgctaacccgatcatgttatgtattcactttcagcttcaaaatcatctatgaggatacggatgagtcaaccactcgactgacttcatattctcttacgaacaaaatatccagttcctcccactctcaatatgattcgtcttcgccctcagtgtctaatccggccaattcatctacaactcagaaaagaaggagcctccttaagccgttttcgttctcgaaatcttctgccgagaacgcccctgtcccttctacgactactgttcctatcccaccctccaagttctttgcattcaaagccattcccagagatattctgcttcataaaagaaatcgaccagacttgacctacacattacctgttggtggaactgaagacgacgaaggtctgaacgacggtcaaacgtgtagggaattcatcgaaggcgccgtgtcgaagatcaaggtcgcatgcagcgaggcagggagcggttcagacgggctgttgggtcctgggaagaagtttattgaggaagagagtatagtatctcttgcgcaggcagagaagcagacgagttggtcagacagggtcgaatacggaatcagtgagttatcaagctttgatcttctcttgtctcatcaatataagaagttgagatccaaatgctgataatttcgatgtcaacatctcgtagagcgattcctctggttatactaaatacttagtatgggtttagctactagaaagcagtcgcaactgatggtgttcgatacatgacccttttggactagggtgtcctcagaccacagaccacagactcccatgggtcatacgtccagtctgcccccgttcctagggcagcctcactgtccgtgtcggtgtcgactgtaacgaccagagcagcagcggcagtgccacacatcagcagtctcgccccctcattctcctcctggtgcatggccaggtggagtatgttgcgggacgcactgacatctatgttctgccaagtctgagaacaagcacagagaagacagggaagacagggaagacagggaagacagagaagacagagagagcgatcagtactcgagacactatcctgagatagtgaagaacagacacacacacacagatatacgatacacccgactcaccagacagacgcttcgacagtctgtcgacgcccacaccctgcctcttcccgagatctcgctacagcactcggagcacatcctcgacgtccgctactcccaggcttgacggacctggagcagcgcagggacatccagcttggcaaacagtatcttcgccgtgtcagaggcatgcccacaagaaggcgacgagaaggcgccgtcgccgaagaccagaaagatacgtaaatgtccttccaacagacagaccggcagcatgtggtacgcttgctctcggctgaagtgtgcaccctagcgaagacgtctccaccgtcgagcagcgaagaacgtcgcgagcgaagagtagggctgagagtgcaagacgagagcagcgcggagaccatcgagactggcagatctgaacgaaggaaactctgaagatagaagccgaagcaaataattgaagcgagaaaccgaggtgaacaagacagttatcagcgttggcgtaagcgtgagaagcacttaccacggagagttatcaacaagttcgcatgctcttcatacacagtcaccatttccgacggtctctgcccacccccacaaggtgctttcttgagttatgag

SEQ ID NO: 190 - DNA, 19983 bp, Xanthophyllomyces dendrorhous
ctactcgatgacgacctttgccttcggatcctcggtctccattcatagtcatcagcatacgtcggagacgatgtgggtatcagcgctccgacagatacgccgataccgtccgtactaagcgaccgggcgaaccgtcgtcgttgggactctaaaattggcacaggcggtttgatctcattgagtgatcaatccgatggtaggctgagcatctgggattgtcagtcgcaaaagcgagagaaactctgccagggactgagctgttctctcgcgattcagttcgaatggaggaaagtaatactctctgaggcaactgatgagcactctgatgcggaagactgttgtatgatgaaagattgttctagtgtggcagaatgttctcctctcccaactgctttgtgtcccataagctgtcgagatcgatgcctgctagcttgcatgcaagccatcctctctggtcagtttcactggctgtgggacatgatggacattgtcatgatggccattaatgatgcttctacagttgatgatcaaacagagacagttgaaccctcgttgaaagagatcatttatttgatcgagctcctaacacagtgattgcaaacacttacgtcatcatcatctttcacgacacagatcgaacaatactctcgatgatcgttcaacgtttcgttcactggcaatagaaaggtaaaattggagacgatgagaacggtctttcttcattcgatcttttgctctgcaagaccgatcttgagttctcttcttcatcactggagtccagtcaaattcaacaccctccaaccgcatcgttcattctctcgacaacttgctttcctttggcctcatcgcgcaaatcatgtcgcccactacgaagccaaatgttttggttctgttgtttcgaaacgatcttcgaatccatgataaccccatcttgaatcactttccaaagtcaatcactcatgttctgccggtttatatcttcgatgagcgagttatctcactttcagccttgcccggctttaaacccgatcaagacgagaaacttgaagaaccgaagagcagagtgttgggtacatggagatgtggtggaaaccgtgtcaagtgtgtacacgatcttctgctgttttcattgctgggtacacattgtaataatgtttttttgtatgtgtggacaggttcttggccgagagtgtctttgatcttaaatctaatctccgcaaaatcaattctgacctgatgatcggctatggcctacctgagaaggctatccctgaagttgttcgccagcttcaaaacgacggcatggatgtttccggagtatgggtagctcaagaagtcagtccgaaaagtatctttggtctgtctaaaagatgactggtttgctgaaccttggtttaccaatttaggtcaactctgaagagatgcgacaggaaactcgtatacagaaagcattgggaaagctctcgccaccagttcctatcaacatcctagagggatccaagaccttgattcacccggctgatctcccgttcaagccctctaagacgcccgataacttcactgccttcagaggtaaagtcgaagggttggacgagatgatcagacccaacctacctacgcccacatctcttccccctccacctcctcggccaaagtcgcttgatgtctaccaagcccctcagggaaaatcttccttagagcacattctgcctcttcttcttaagcccataacagattcctctttagattcctttcattccttcacagctcacccatatcatggcggtgaaagctctgggcttgaacgaatgaaatactactgtggacgtgaccatcagaaagccccattagcaacctacaagcagacaaggaacgggcttattggtagcgacttttcgaccaaattttcatcctggctcggacttggttgcctcagtccacgaatgagtacgtcgtcaatcagtcttgtttttaagtgatcagttttgaactctatgtgtgtctcttcgccgatagtcgggaatgaaattaaagcgtgggaggaagtttggaccgaccgaggaagaggtaccaaggattcgtgagtcaaaattatgaaagcacatcgagaactttacggaggtgcttacctatgtctaaacaatctgtgcgactcgatgttctcgaggtactggctgatcttcgagttgtacgcataattcctttcactatggtttgtttcgcgaattgcgctcattttgtgatgacatgtgatttcacaggctctggagagactacttctcgttcctctcgatgaagtatggtcctgctctattccatgtggacgggttcaattctgtcacgcgacctcaacacgaaggtccggactggaagtatgcgggcgaggatgaagaaggcagaccgctgttagacaagtggcgagatgggaaaactggtgttccgttcgtttcaccttcatttctgacttgtttggcaatggttttggaccactcacttttctttacacttctggtttggctacatttccagctttattgatgccaacatgattgaattgaaggaaacgggcttcatgagcaaccgcggtcgtcaaaatgttggttgttaccttaccaaggactatctagtggattggagagctggagccgaggtcttcgaggaaggtcagtgtttgctctgttatcttggctttaatcatcaatgctctcgttctgaagacggttctgtactgctctgtcgtttagagttaatcgattatgatacgagctccaactggggaaactggcaatatgtggcaggcgttggtactgaccctagagaagcaagatatttcaaccccatcagtcagtaaacgctctttttaacacattcttttcagattggaactgattcttcattgtctcaactttcagagcaagccaaagattatgatcctcagggagactatgtcaagctctggattccttccctcaaaaacgttccaactgaacacgttcaccatccatggacattgccttcatcccatcctgcgtttgctgaagtcgctaacttgtataaaaccccacctaaagaagagcgtggtagctggcggtcgcaataccaacggaaagttggtgaaaacgaaaagacgtcgggcaataaggccgaaagagtcaaccgagggcctaagggcgggcgaggcggacatagcgttagaggcacaggaggaagaggtggcgcacgaaagggtaacaattgatcatgtaatgtgtctatcattctctttcgttgttcatattggcgatcaggccagagacaggggagtcatagatattcaccgcacacataactgagaagaaacgcgagccatactaaaacatactcttagcatcaaagacaaaaacatatgaacagacttcatgacaagtagtgctacagcttatgaggtaacccgatgagacttgaaaaggcaagatcgcctctagtttttcttagggactattgtgatcggacagaaacatgagctcagagatacagtcaggggcttgtgcaagcatacaaagtgatcatcacaagataatcgtaagatcatcacacaaactgagagcactcactgtcgttgtggaggacgtatcggtatctgacctttccatcgtacaagccctggacggcctctccagcctggctcatgttgagctcctggatccaaggcttgacgcccttggcagcggcaagctccaacatctcgtttgcctccttcttcgatctgcgcacgtcacctcctagttctgtcagtataccaatagatcgaagcgtcagaggaagatcatgagactactgacccaagaagagacgaagagaagaggcatccgttgcccatgaaggatctagcgtggataggaagggtggcatctccagactatatgtgcatcaatcaaggcgtctcgcaatcagtatccagtcatgaccgtcgcaggtcttcgcaaatgggcaactaagaacaactaacaggaagtccgacgctgcatgttcgaaataggcatgactggtcagttttggacacagcttcacaagaaagagataggagctacgtacgtcaccaatcggccgttaacgacgagaatcctggccagcttgtcaagaggaagaccctcagtgttgtcgacagtctgcgtgtttgtccagcgtatggagaggtcagacagagttgcatatacactgattgaataggaaactgtccacatacggagaggatgagatcgagctgatggtagaacttatcctggaagttctcttctccgttggtgacgatctattacaatcagatgtgttaatcggaagtgagcacagccagtcgtagagcctcgaacgagatgaaaaagaactgacaatatgctcctcatcagcaacacccatcttgaggatatcgtccttcttcttgagagagtgggtcagagcgtacacctcagcacctgtaaaaatcgatgtgacggtgtggggtaagtagctttgaatgtggtgtgagacaaactactatgaagcacgaaccgagagcagcagcgaactgaagggcaatgtctggagtagagatatcaacacatgacggattagaaaccgcgttcgatggcaagccatacgattaaattaacgtacgtccaagtcctccgatacctgaaaaaaaaacccatatgaaccattgaatgagaaccagaaactaatatatgattagagaaacgatcagattacttaccaacaattccgaccttcttgccaggtccacatccatttcgaaccagaggtgagtagacggtaagacctatcaaaagacaacaggatgaatacctattccgttccgaacagcgcggagtaaatttaaaaaactaaccggcacacatcaatggggcagcgtgctttccctcaattccctcagggatggcaaagacaaagttctcgtctgtatgaatcgccaaattagttttgcgcgccttgaaacaggatgcgaaacgtgccatgacggatacacttacggactcggatcttatcagcatatcctcccatggtgcgatccccgttagggtacttgtggttgtatgtaaacacactgttccaaatacaattggccgatagtgagctatgaatgaccagtcaagacatgcgaaatgtggactgacccgtgcgaacagtactgcctacagatcaaacaatgaagacatattagtgaagagtcatgtgtggataaagagagtgctgccatggcggttgcgtactcgttgtttgcggtgcctatcgaacagatcatgagcgtatccagtcagtttgatagtacatatcttggcgaaagtgaacagagttgagaatggtatgagattccacagaagaaaacaacatacagtccgggcacttggtgcaagatccaacctgggctccgacaccaacctgttgattgaagatgatagagaggtaggcttgtttgagaagctgatccaggagagcaataattagatagtgtgctgcagacttacgagttgtccgactttgaattcagaagaagccttagggccaactttcgtgacacgaccaatgatctcgtgtctggagtattaaagagaaagaaaatttgatgagcacataggcttagagaaaaaaaccagaataacggatatttacccaacaacagcgggaagcatcacgtcaccccctgaaaaagaaacgctgacaagatcagactggtcccgacaggttagcagtacgaatcccgggactactcacagccaccggtgatggtatgactgtattgcaaacgcggaaaacgcatatgagcatccaccatacattcaagaagcgaaacatattttattaaagcggcaacatacacatcacttccgcaaactgatgatgttgatcaaacattggtcagtcagaaatgccgagcttgtcagatgtaacggaagcaggacaaagctacacacctccacagtctaaggaggcgacaaaagaagtgtgatatgatgagtaaaaagattaattcaacgtgaagaaggacggaaataaacgaactctcgatattaacgtcctaagaaccacgtcaaagattcgagacgcgtcagtaccagaagcacatacacaagaatgaaaaggagaggtcgaacgatatcgtgatcctcagcactgaacaaagtagtatgcagccaacgtcagtatatgtgcctcgagtgattgattggtaagtcattgagaaccaggaagaatcttacgtcttaagagggtactcgataagcttgaaatcggtccagttctgcagaagtccaaagagggtagttagctcaggcctaagatcggtacaatggtatcaacaaacctttgtatcgctgtgtttggagcaatgtagggtgaaaagcgtgagtagtcatgttgatttcatctcgagacccagtcatcgttcgagacgtactgaatagcgctgcatgaattaacaagtaaagtaataccagatcagactccgcctcaatagaaaaccgatgtatgtctaccaaagatatgaagagagaaagaatatggaaagaaatagaaggattctttcctctcgatagcgggaagaggactcactatctgagatatccggagatgaaacccaaaaaaagccagacatcctgttcagtaagtgtattgcaaagcgagaaacgatcgtctgacaattctgagaatcatctcatgtactgacccttgagcagtcatggcaggctgttgtaatcttgtttttgaaaataagggagtgtaaagatgggagaggcaaaaccgatgatgagaggaagaagtgttctagggggggtgtcgaaaaaattcaaagttcggagagaccttcaatattttgtacaagttcagaagcagctagttttggaggctacgtcattctccggttattcatcccagacctccaccttttactcgctgaattaagatcggctatatcccccaagtttgtaagcacttgagaaaatagtccgacaaaaggcgtctaggttacactgcgaccgcaatcttactcaatcccgttcgggcttactcaacgaccttcgtaatacatacgcaaccgcttgtttgtaatgtccggtcaagacggtgaggtataccggcaaaattaaaaacgttcttgtaaagtacaatggcaatttcgagaagatcagaatatcaagcccaaagagtttcaatggcgatcagaacggtgcaaccggcgaggctgttgccgctaatgccgatgctgatgccaagactaatgggatcgcaatggtctatgttctgagggcatccaagtccagacgggtcacctatcgaccacgtttggttagggttactccccatacgtttactggatcaatgtaattcggtcggtctactccgtcggcttttgagctcactttttatacattccttctcctccattcttccatcgctatctctacacgtcctcaaactttcgtttgattcctctgtatcatgccttccgtgtctcatctgccgtctactcaaaaacccgtgaacaaccagctggtcagaatcgccatcggtaagattgtacccttctttgtctgctgtattccttatctttcctgcccatcgcccgaacatacagctttcttccttcgcaaacagatcgaggaggaaccttcaccgacgtttgtacaacgtttctggatggcacacaaaagattttcaagctactctccgtggacccctcaaattatgctgatgctccaacagaagctatccgtagagtactctccgacttgtccggtgaggagattggacgaggagataaacttcgattagacaatgtagaaagtgttcgaatgggaacaaccgtcgccacaaagtaagactatccttctcatataaaggtttgaattcattttatgatttttccctttgcttactcaaattgtatcacaatagcgccttgttggagaggcaaggagaaagatgtgctctcctcgtgactaaaggttggaaagatatccttcggattggtcaacaaactcggccgtgagtttgctttttgatgagcccatcatgagactactacttgagatgctcatatcgtagtttaaactcgttataacagagatatttttgatctgtccattcaaaagctgtcccacctgtacgaaatggtggttgaaattgacgaacgagtgactatcgagacctcggatgaggtaccttctgcttctcctttttcatcttctacttcagaaaaagaccttccagaaggtttcacaaggggtctaacaggagaagtcatcaaaatcatcagaaggcctcaggagtccgagatcagagcatctctcaaaaatctcaaggctcaaggcttcaagtgaggtcgtatcaatcgactctttcgcgagtcttgagaagtgtatcaattaaccgctgtgtacacactcttcttatcacaggtccttagctattgctttgcttcattcgtataccttcagcgagcatgaagacctcgtagcaaaaatctccagagagatgggcttttccatctcagtatcaagagaattacaaccaatgatcaaagtcgtttcacgggctaactcggccactgctgatgcctaccttagtcctgttactcggaggtgaaatcaatcgttttttgtgttcatctcaatcaactaagctgagaaaataaaacccatcggcctttatgtttatagatacatcgaatccttctcggaaggatttgaaggaggtttgaaagcatttggaaacaagcttttattgatgcaatccggtaggtcatcagcatcctgtctttcttttgtaacaaccaaaatgaacttcttctcgattcaacacagatggaggactctgtacctgggacaaatttagcggtctccgagcgattctttccggtccggcaggaggagtcataggtcagtagcccacccatcttctgactcttctccatcaattctcggttaccatatgcacagtatagcttagaagtcttttatttgctttacaaacacgaaggtttctccaaaacctgttacgatccggaggaagggacccctctagtggccgttgatatgggaggcacctcgtttgtccagtcattttaaaaacagcacgaaactgtttactgtgtctcttgatcatttcttacgctttcacgacaggacggatgttgcccggtttgctggccaagttgaggtcgttcatgagactaccacagctgaagttatcatccaagcgcctcagcttgatatcaatactattgctgctggaggtggatccagattgttctttgaaaagggcatgtttgttgtggggccagaggtataagcgcattccttcttctatcaacaggtatcagtcctattatgcgactgattcatttacatcgttcatatagtcctgcggagctcatcctggcccggcgtgctacaaaaaaggaggacccttggccgtgacagacgcaaacctcgttctcggacgactcttgccagaacacttgtatgcattgtttcttttgaactcaacatcgatccgattgtttttgatttgttggctgatcctctatctgatttaactttcaaaaaagtcccaacatttttgggcccaatgaagatcaaccgttagatattgaggcgagcaaaaagctctttcgagacataactgacaagatcaatcaagaaacgagtgcaaatgagccgatgtctatcgaggatgttgctcttgggtttttaaaggttgcgaatgaggcaatggctcgacctatcagaatgtgtggatctttctctgcttttccttttttgatcgagtatgataagacttgaagaaacaattgctaaaatctacttcttctccatataacagtttgacagaagccagaggttttgatgcttcaggtcacaatttggtcatgtgagttctttcgtccgtcttccactgtgtgtgtccattgacctgatgaccaatacatgccatgacagttttggaggtgccggccctcaacatggagccagcatcgccgcttcgctcaacatttcgcgcattcttgtgcccagattttcttctgtcctatccgcctacggaatggctctcgcagatatcatcaccgaatcctcagagccgtcttccttctctctctccgcttcttcagctctgtctactataaagtcaagagtcagtcgactccgtgagaatgccaccgagtcgcttcgtagtcaaggattcaacggcccgtctatcctctttgaaacatttctcaattgccgattcgctagttcatctactgcgctcatgattcaaggcgacccggaaacgtcgaacttcgaaaaacttttcatcgacactcatagacagctgtttggcttcgttttggagggcagagagatcgttgtcgatgacgtcagaatccgggcaactggcagcagtacaggagggatagagtgctcgctgtataaggattggtcgttttataaacgaaaggtgcctgagctggatggctggaaaaagaagaaggttttctttgagcaaaaaggctggtcagacactccagtcattcctctagcagaacttgaatttggtagtcaggtttacgtgcgtagaaaattcaatctatctcagatttattaatttgacctgttgaccgagtacgctctttacacagggacctgcgctcatttgggatgctactcaaacgattctcactcctccagggtacatggctaccgtccttcctaaacacgtcatcattgacgcaacgaaagaaatacagaacgatcaccaggcagagttggacctcgatctatctaccgcaaaagttgacccaatccagctttcggttttttcatataaattcatgagtatagccgaacgaagtgagtcaacctgccttcttcagaatggttgaaaacacttggttcactcgaaactctctactattaatagtgggtcaaactcttcgtcagacagccatttctgttaatatcaaggagcgtcttgacttgtatgtcttttcttagttctatcctgggttggttatatccgtaacgctttaggtgtgtgatcacagacagccctgacgtctgagtcgcctcttatagctcctgcgccctgttctcgcctgacggaggtttggttgggaatgctccaaacatccccgtgcacctcggagcagtctcacatgccgttcggtatcagatcagacactggggtgaggacatcaacccaggagacgtgttcctgtcgaaccatccttctgctggaggatcacatcttccggacctgacagtcatgacaccggcgttcagcgaaagcggagagattgtgttctggacagcctctcgagctcatcacgcagatattggtggcattcgagcaggttcaatgcctccattttcaaaggaaatttggcaagagggtgctcagatcaccgctttcaagctcgtatctgcaggcaaattcgatgaagccggcgtgattcaccacatgtatgatctccctggcaaataccctggatgttctggaacccgaacacttgccaacaacatttctgatctcaaagctcaagtttctgcaaaccatcgaggcgccgtcttgatcagagatttgatcaaagagtgtggtatcaagaccgttcaattttatatgaaggccattcaggacaacgccgaagcctctgtcaaggatcttcttcgattcatgtccgcgaagtttgcgggaaaaccactggaggccgtggatcatatggatgatggctccgctatcgctcttaagattgatatcgaccctgtcagtgggcaggctatcttcgattttaccggtactagccctcaagtgtaagatttattgttggctctatgttctggtcagaatatacatttgctaatttaatctgtgtataacctgtattgggccttttaggtacggaaacctcaacgctccgacggcaatcctttattctgccattttatatgtgttgaggtcgatgctcaactccagtattcctctcaaccaaggatgtttgcttcccattaccctagttctccctgaaggaacgattcttagcccttctatcgatgccgctacagttggagggaacgtagaaacctcgcaacgagttgttgacgttatcctcaaagcattccaagcgtgtggggcttctcagggtggctgtaacaacttgacatttggatctgagccaggagagaaccaaaccggtttcggatattacgaaaccattggtggaggtgctggcgctggacccacttgggatgggcaaagcggaatccagtgccacatgacgaacactcgaattggagatcctgagatcattgagaagagatatccggttatcattcacgagttttctatccgagccggaagcggcggtgatggtcagcgtaagggtggtgacggtgttattcgagacatcgagtttaccgctcctgtcgaggtcgccatcttgtccgaacgacgatccaaggcgccttatggaatgaaaggcgggttgcccggtcaaacaggatcaaacttctggatgagaaaactaccagatgggtcgtttggaaagagacatctgggaggaaagaacgaattcatggctgcagtcggtgacaggatcatcatcagtacgctttttgtttatttcttctttctcctgtttaaattatcgcgatcaagaatgatctgactctgagtgattacgctgtctgactaccctctgcagactctcccggtgggggtggatacggtttgcctgactcatcttacgagggggacaactctatgtacggcagtgaggagtacaagcgaaaagcagccatatccagagccagagcgaatggctctctcgccaactctaaggatacggagaacaccaactagacgtgtgtctcattgttcctttgtctacttactgctttgcttctttacatgtacatgcctttgcctgtgatctgtagagccatcactgatggccatcatgacaatgtccatcatgtcccacagctagtgaaactgaccagagaggatggcttgcatgcaagctagcaggcatcgatctcgacagcttatgggacacaaagcagttgggagaggagaacattctgccataccagaacactcatcagtgatactggcatttaatacggctgctgctgttgaatttgacgctaaggctgcctcaataacaacgacagcaagggatggggttgaatatgtgacacatctgctgctgccgccgccgacgacgacgacgatgctggtgcttagaataatgagatcttggtctgtagtttaagaacatccgagtccaaaaggaccatgtattgaccaccatcggctgaggtctttctcaccatgctgtacgcatataatcttcatgacgtggacgtaacttcgttcaggtatctggcttaagatggtatcctcaggtaaagatggcattcaacatttttgaagtcgagaaaatatcgtgtatgttcattaggtaaatagatcaatcagggccaacagatccgcgaatgatattgactagtagatacagtaacggggaggctaggtagagcgatggtaatcataaaggttattcatgataaaaaaaacggtcaacatatgagcatcgaatagcagagactgtcttcgactaaccaagtcgaggctccagtataccaagctcgctcggctataccgttgttgtcccccctcctcgtcgacgtccaccgcaggcaccacaagctaaacaagataggtcgcatacagatcaacactggtagaacttaacgatagtgtctgattaaacagaagaaaattgactaactgatgaagttcctgtagttcaaagcgaaagaaagaaaccagtcaaacacaccgtcagtttatgattaagagttgcgaagtagggaaagcaaatataatgaaggtatacgaaccaaatggcaagaaggacgttggtgatacccgaaacaatggccatgataactgatccaatggcactaacgacgctgttgattcctcggcctgcaaattcgtacatgagccgagagaagtcagaggtcagaactcagaacccaagagtctcaaagcggtgcgagggcatatgttcgacaagagcgcaggaaccaaccaatggcactgatctgaatcgtggcggtacaagtaggataggccgtcagctgatatgaaatatgagtgctcaagacaagataaaactcggtcacctacaatgtttcccatattgaatccgaaagtttggtggcggtggtggttttggtctttaacaaggtgagttggtggagagaaagagagagaagaaaagatgtttcgccagaagagtcagccttttatgctgttctgtcttgcgcgcctcctgaacaaaattgaaagaatttgtgggcctgataaaaaaggccagaacaaaccttgcggggtcaagagtcaacaagatatccagtggaactttaggtcaggaaattaagcaagccagaaacagcaaggcgttgaggttgatgtacaggactggatgggccggacgggaccggcgatcattctactgcgcatatgcctccaggccacgggggcaggcaccggaggattataacaacgtcatcaattacgcaccggtaaaataggggctgaaacctccacagataaattggcaagtgccggatttgttctgcctcttgcctgccccctagtctatatcaggctttagagctttcagaacgttcctgctcgtttcgtgactattatctacccctcagtttttctccattctcttctcttacattttcgtttctttcgcgcgctcgacaagcaatgacgtaaagaagagagttctggactagacaaggtggtttatctctccctcaatattttgtttcagctcgagaggaaaaaaagaggtgtcattactatctgccgccgccgctgctgatgctgatgcttagactaatgagatcttggtctgtagtttaagaacatccgagtccaaaaggaccatgtattgaccaccatcggctgaggtaactctcaccattctttttgccaacgcttgatcgaccgactgatatctatattattctgcctgtcaattaatgagtggagcgtttttaaacgtctgtttgcaagataacatagtcagcgatttgttttttcgcttcttacaatgatggctagagaggtgtgaaggcttgagcactcgcgacgtacagtactcgactttggttcccaaaatttcctcctcaaccaaaccacttcctggcgggttccgttcgtcgtcatagagctcctttccggttctccggatccgctccttcagccattcttcctgagtcggtgcgcgtccgccttgatcaatccgactttggaacgcatttttgccttctctttgagcaagaggtgattctgcgatagggttcaacatcgtatccggcgcggctcgagcaaaatgaatcaggatgtatcggatgatgtctgcctgatccgacggaggtctgatcacccggtggcgagttgccttaaggactcctccagataagactgtacaagtcatgaaatccctcgtttgtcagtttgtctggaagcatagacaacgtaccacaccatgagatgtgtgatgcttacagtctagtgcgtcggccacattcaccactagcgccccaggcgtatgtttcacccacttccacttattctctccaggcgtcagaacctgaagagctgaaattggctgagaccagagcagactgagcgtgttgtagtcggtgtgacccttcgaccagatcccatctgttttgctttccgcgtcttcatccctaggaaagtatcccatgaaacgctggcaggaagccccgatgggtttctcttggctatggagcttccagagggcatcctcctccagctcgagcacaagagacacgagcgtgaataatctgcgcactatatgattgttggtatagtctgcaaaagcttgaatttcgggcagaaatgggagtaccgaagggtgatgttgtttggttggagactgaaaggaggaggactgcatgaaaaggtgattaaatatatgaacaaaagtgagcgatgatatttcgagagctaggagatgactgagctgacctccagattgtaatgctgtattatgatcaaccaatgtgatatcagacacgaccagatccgaacaagacgatccaagaatgaaaacggtcaacacacctcaatgttgtctggtatatcatctctcttccaaacgcctcttaatttgtatcccttataacttccctcatcgagcttagcggcataaggacctttttccgattgaggaataccggagatgacatgctgagcgatcgcgagctgtctctcgagtgtctcctggggaacccctgtgccgatgacataaagaaacccgtctctatgtaaagggaaactgttagtatgcaaagccaggatgttcgtaacttgcatgaacgatcttggacatacgtgctcagcgctttctttgtcattgcaaccaactctttccgaacttgaggatcctgagaatcaagaagactcaagtcgatagtagccaaagatgcccagttgacttgatgagaattattttatgagaattcagcagaatccaatcgttagcacagggacagcagagccaatactcgacgagttacgtacgatcttgctttgtctctggagatgacacccatttgggtagatgcggaggttcaaccgaagcaggcaatctgggtatatctgcgcgaagagtggagttgcggacggttccgacggttgccatgatgttctgtcaagtcttcttttttgagggcctgtaagtgaagatgggagatggatgagttgcgaatagagatgcacatgcaagcgacggctttatatcaagtcatcctcaacctggagatgagcgaaaggctaacaatcacttcgggtgacgacatgctccgtagaactgattaatcagctgtaggcggataaagcgcggacgccataaggtcgatgcgtggtcggtacgacggatgtcgccttgtgggattaacatagcgtcaatcaagctaaccctaacactatcttgttcaaattcaaaaagaaaaggtgcttgctcactgtgttctatgcttactctgtgctttctctcagacatgttggaacagagatgtgaatgcgtcgcgcaacatgctgcacctaactctgcaccaggaaaagaacgaaggagcaagaatgctggtgtttgacaccactactgctacgctgatcgctgaggctgaggctggcacaaactgaacccataacccatggggatcttggtggttcatgatctgaggacaccctagtccaaaagggccatgtatcgactaccatcggtcgaggtaattttcaccaagcccaaggcttgtaggcatccactgtatgtatagggtttcaaatttcttctggggaatacggaccgcaacatttaactctctcgttgaggggtttcagaccggtttggacgacagagccttaatagcgcaagattgaggtctttacaccagccaggacaatgcggagattatctccttggatgcatcttcatacacgacaggatgtttccgaccttgcttccaacaattacatactgggtgatgccaagtgcagggtacctcggattaatttcaaccgcgaaagtatccaaaagaaacattaagatacccaattcacagaaggtttgatcatggccatctctatataaggcagagttgatgagtgtccaagaacgtcaaaccaacctcaacttctcccgtccacatcaatccaaagctccattgacgactctcaagcaaaatgaacatgtctcgccctgctcactcctgcaaaagtgcgttcaaaccttctatcctgacgtatcagtcacatgttgttttctgcgtttgactcatcctctcctctcttcactaaccactgcaatctaccacgccgagatagtttctatgctttggaactggaccactcttgatgcttgtttcctttcccgctcatggcacgtcaacacaaaagcccagttcgctggttcggtcatcggcgttttccttctcacacttgctatcgaagctgttcggagactcggtcgcgagtatgatcgtcgcttgatcttgagtgctgaaatcggatctgccgcttcggatagcaaacctgcatgttcgaatctcaagaccagcaccctagatggagcgagtgacatctctaactataagtaagccttcagtgtataaggtgatgcagaaagcttctgtttggtttgattttacttatcattcccctcactaatcatgctctggcaagcttcactccctcctggggtcaacacattctccgaagtatgatttacagctctcaattcacagcaagcttcctagtgtatgtcttgttttctgttccgcaaaatcttcagtcatttcaagctgactctactcgcttcgatcggacatcagaatgcttctcggaatgtacttcaacggatatattctcttcgccatttttctaggtcatacattcggatactgtgcatttggaagggacacttgcgcaaagtctggttctttcaggcataccagtggaaactgttgttgaaaggccttatgattgctatgaaatgcacaaacattccatcttccgtcatatcgtggctcgtcagatgcacacataacggtaaactatttggtcacattgcgaagtgtaggagatagttgaaaggtgaattctctatagtgatgacgactgaagttttgagacctcaaaacatccttcgaactattttctatcgattctaaactaggcaaatgtgtttgcttctgtgtcaggcgctgttaaggttcgttgtgtcttttgttgagcattatccatggacttcaagaaatttatctcaaaccctcaactgctagttggtaatgtgcgcagtttccgtgccgacatgtcaatgcgctctagatcttcgaaagtcacaatatcatgatacaacacttttgtgagggatatgggacttgaaacaattgtaaccaccaaataagatgtttggtacaaattcataagaatattgttatcactaccattcatccaagagctcaccttgtattatctgagcatgttgtcctgtagaatttcagccaatatttaattgcgcttatttctttttttttccatgaatgtgagcaactaaaatatcggaatgttttctcgtcaaaatttctctcttttgcagcttgaaagcaaccttgatctaagtttaaccgtgaaaaaagcgtcactccgtttggcgaccattgacctctgacacatcgatccaaatttggtctcatgtcaaaaccttgctacttacgctcgcaccaggtgccactaccgatgataccatcttcattactaccgtcatgaagaagcgacatcgatgaacgataaaaatcttgcgaacgctgtcgcataatgaagctccgttgcttcggtctggtcgatacaatttcgagcaaaccttcgtgtgagagatgctcgacagctagcttagggtgtttcttcggcgagttcaccataattctagccagttttggcctatgaggatgtctttgtgtattaatggcctgaatgaaactgagaagctcgacatttttccaccccggcagctgacaaaggacgggtggggagacccagagaatccctcagaacttggagcaacgatctatacagtgcctcctcatcaggcacgaagacagatctcgcttgttcaccgttgagctcgcagtctgaactaagatctcctgcttcacatagacgtagttcacgtacaggatccgcatttggatgctccgtgcattgtccttatgacttgactgcacctatcaaccacagctcttcgtctgcagtgggtctggaatatgcgcttccgctttcctctcaactgtcaagcagtgcttcgccgatgttatcaatggacgttagggttttagattcatagatagttct

SEQ ID NO: 191 - DNA, 1171 bp, Xanthophyllomyces dendrorhous
aagaagagcctcaacagcaagtctctttcgaggctctgatgagtctcctcctcgcacgaggcgatacggcctcttgcgactcttattcaaagagtcccttgatgtccgatgactttcccaagggctctttgaatccttttctctccaaaccgaaggtaggagagcttacggagaagcaaaaggaggtgtaaccgagtgatgcttcttctatgcgtctctaaagagtcgctcgtgagcggaaacactagtttcctcgagtgagccctttagagacaataagtcgttatgcctagcataacgctcataaaagctcttcttgcgaagaagaagctcttcgacgtaaaaatacttaaccgagagcttcttagagcaagaaagagacgacgattagcctccgaagagttcttcctagaggaggcttttctagtctcccacaggaggtggaagagacgaagtcgatgatacttttacaagcgccgcaggcacaacaagaagcagaaggagcgtagcgggtgatgctgattccaggaggaaggctaaagccacaaaacaagactcagctttagcctaacgactcttacgcagaggcaactgcctctcttataaataagaaaagaagagactcaagcggaagagtgctaaggaagctttgcttctgaggcacgaaagaccttgagtctaatgtaagacaaaagaaacgaggacgacgaggctcagcggagctagagtcgagtggacgagacaaagccttataaaggctcctcctctctctttgctcaagacagagacaaggcttgagcaaagaaagtaagaatacgaggcacctagcagagagctacgagtaaagcagacactgtctgcttacgaagaggagctcgaggctcgagccgagacaaacactcccgtcaagggaagtgaggcagtaatgccgaacctaaaggctactgccaaaggtagtagccaaataagctctcgctcagagcgaaacgagctccattgcccaaagcaatagtggagcgagtataaaatactccctccgagctacagctcaggagaaatgattcttcgtaaacaaataggcgaccagcgtagctcagcacctctcttgcaagagagagagtgctcaaaggagcctatgaagaatcatagtctctctgagcaatagctcact

SEQ ID NO: 192 - DNA, 347 bp, Xanthophyllomyces dendrorhous
cttggccggagcactcctctcgctctgctggcgatcgtcggcctggtgatctcaagcatgccgtcggcagacaggtctcttctggctatctctctcgtgctgccagtctgctttccgaccggtctcctgtccttgctctgagtgaggatgtgatggcgaggttgcatgcaaaacatccatccggtgacccctctccgttttcgtctcgtgctggccctcatcctggcgacagcccggaagagcaagccgttctccctgcgtttgccaagttctccagagagacctctcccggtatctctggctggactcagcctctgctttcccttgccctcgcccggcagcctgtc

SEQ ID NO: 193 - DNA, 379 bp, Xanthophyllomyces dendrorhous
atacggtctgtgaggcggtagtttgtcagcttcctctttggaggagacgtctgcaagctgcatatattttgatggaactgtcgaggacgtgaccgaggtgacaggaatggaagatgaagataaaatataattaagagcagcgtttgtgtttgaggccggtccagatgttagttttgaaacacacttagtctgacagtcagttggcgtttttggatcagaaacgggaatcggaatggaaacagggtggttgggagattgatgacgagggatgatgatgtttttgttataatcaatatcaggattgttttttcgatgccatggaacacccaagatcacttcgaccgaagagatcgcagccagatgtaaggacaccgactca

SEQ ID NO: 194 - DNA, 464 bp, Xanthophyllomyces dendrorhous
ctttggctcaccatggtcaccaggccggacctcgcatactccgtgtccagactggcatcgttctcgtccaacccaggaccaagacactggaaagctctgcagagagtactgacctatgctaagtccaccaaagctctttcgctgacctatggaacagccgtacactcacttgctgtgtattccgatgcagactatgcttcagttgtggatgatagaaggtgtcactcgtcctatgtggcgatggtaaacggaggagcggtcagctgggcgtcaaagaagcaagcgatggtagtgctatcgacatgcgaagcggaatacgtggcacttactatggcagcgaaggaagtcggctggttgcgggaagtgcttgctttcatggccgatccgacaggaacactcgacgtgacgacgatggagccgactcggatctacgaagacaatcagggagcgatcgcgttagccaa

SEQ ID NO: 195 - DNA, 801 bp, Xanthophyllomyces dendrorhous
gaagtgaaataaagatgatatagaaaatagaaatgaaataacatgttgaacgagaaaccgaagagatagaaagtcaaccaacgcgcaatactcgatgattgatgtctagactgctatatccaatactaccactcagtcgaagacatcaaacagaaaaagaaaggaatgaaaagaaatggaaggaaacgaaaaagaaatgaaagagattggaagaaatgcgcaagaaatgtcgagaaataagttcgagaccgggcgcgggaagtcaacgagtgaacgaaagatcaaacaaatcaagcaagaaagagatgaggaaacaaaccaggacgaaaacaagaacaggaagatgagaatttagtagtaaaaagaacagaaggaacagaaagaaccgaatggaatcggaaagagaacaccaaaagatccttgtctggtcgagaaagagcaaagattgaggatgcaaagtggtgagcttttctggactgggctggaaaacaaacaaaaattgacttggagaatatcttcccttttcaccctgtttcctttcttccctcagatcaacacaagtcccccaccgacatcttatctcccaccgtctcccactatcctctgctatctcccactatctctcactatctcccactatctcccactatctcccactatctcccactatctcccgccacctttccagctgcctgcctcatcatcttcttctcccgtctcctttcagccctcagcctcaggatctcctctcggtctctctcggtgtcggtctcggtctctcccatctgatgaggtatgtct

SEQ ID NO: 196 - DNA, 1746 bp, Xanthophyllomyces dendrorhous
attgggagtggaacgactagtccctatgggaaatacctttgtaggggagtcgaggaagatctcctccctgcgctttatggtcaaaatagctggagccattaaacgtgaaacatgaatgacggcgttgccgctgctactagcatcggagtcaccgctagccaatgcatgcttgcagcagcaaaggcaatcggtgcaggtctagccgctatcggcctgacaggtgccggtatcggaattgggtcaatcttcgccgctctaattggcggcgtagctcgacagcctgccgttgcaggtcagctcttcagctacgctgtactagggtttgcactagcagaagccacaggactattcgccctgatggtttctttcctagtgctttactcctagtacaactagaagagagctgccccacaatgggcaggagattctgctggaggagtcggtggactcacggtacctcgcgaggttggggcgagtaccactattcatgtttccgtgtaccccaacctgccagggttggtgagtccttgactcaggtttaagggctgggagatcataaagagaagatagcattggccccgtaatccctgacgggtgagctagtacgtgttatagagtccaaagactctaggggataagctattggtaagcttatcttctaggcgaagagagacagtggacagtctaggctgaaaggcatagactgtaaggctctctctagcaagagtagactgctcgagaggagcaactatggcccgtggaaagggggactgtatcagagacatgctgaaatgcaaggaagcagtaaggttgtattgcgtttctcatacgccggtaacatttggccattaaggcgtatgaggtatatttctttgaaaagcggcgggaggacaccgctataggggatcgataaatctcaatgagctctccccaagcgtggagaggcattgagagtgaaccatagggcacaagccgagaaccgcgagacaaagagatgaagagcgctaaactggagtcgcctggtccgcaaaaacaatggaagaacgtcagggtaaaggcgccaagtaagcggaacagcacgaacagaagggacttctattactgtggagttttatttttcttgatccgaagcccccgtgggtaggtgatcaagaaggaaatgtgttgatgatcacctaaacagagcacgtttgtgtcttcgggttgagtagcgaaaggaagcgggtagaaccgtgggcgttggtgaaaggcgcggggggcacctactctgagttagagagtttgtgccccgtatgagaatttattcttgtatgggggtggggcagtactagagctgtcgccattagtcctgctagaaggaaagccctttggggtatatctttctgttcactacccgcaggtagctcacaaattctgttatctacggatcactaatgcccagagatacccccgttttcaacgggtttacctctattatgggcatttagtagtggtgatccgagctcgcgagataccggaggtatttcttcgacaacgtcttgttaggaagaaatagacacctttcggtatagacgcgagcacccctagaggaccctcaggaagaacagcggacgataccgctgggacaacgggaaagaatgagcgagctcattctgagggttgcgagagacgatactctcgccgaagggcctatggaggcctggtgatcaaggggcgatacccttggggcagcaggctctggaagcc

SEQ ID NO: 197 - DNA, 485 bp, Xanthophyllomyces dendrorhous
atacgcaatctgtgatactgagtgttgtgttttggtatcatttcatacagattgctgtggagattcttaagagctggctcagtagaaagtcctatgctgagccagtcttctgtcagcgtaactaagtcatctatatgcccttttcctgacatcaaggcacattccaatacttctatccgacctctttctttctcttcgcatgtcgtggtcccggaacgtcctcctgctgattcgcgtgaactccaagttgatctcaacagtcattcttctcaaatccataccgtccatcatccgggccctgctgtgtcgtgtgctactaatcatggttgttccgaggttttgccagcagcccttgcaactgctgaacattcctatctcgcttcttctcgtcctaactctgttgatgtcgatttctcccagggtgacatatctcacatagattcatcccttgacgatccttcccatgctgatttttcctacgctga

SEQ ID NO: 198 - DNA, 725 bp, Xanthophyllomyces dendrorhous
cgcgatcgcttgagcgattacagtgcgcttggtactcaaaaaagtcgggtttgtccatccaatcttggatctgtcgcaaagagtcagtcatgagatcgtatcctgaggaaagtcagcaggctcacatcttttcgatggagagattaagtctcaatgtctatagattgctcaagcggggacgaggtttggtaagcatcggaagaagcgttacaatagacaacagatagagccctcactgctccagttagatcaactccaaatcgagcctcggttgaggcgtacctgccccagaacttccgtcgtaaggcgtagacaattcgaaaggataaatgcgaaaatcagatacatattgttgtaggtcaaatccatgaaaatagctgaaccgtcaagagaatagaatttacaaacctcttttgtaatcttttcgaacgtcgcattctttctaatttccaagtcgattttcctgctgtggtcgtcccagatctcttgcacacccttcatacctcctcggaagaactctcgaacttcagtcttgcgctctacgttcagctgatctgagccaagatcgaatttggctgatggatcagatgggtctgggaagtgcgacgacaactcggtgaggagccgttggttcatgagtgctgcagtctctgagctctgagtgaacccggtgatgtgagaaatggaaagttgactatggaaaggagggacaggatcagcgcaaa

SEQ ID NO: 199 - DNA, 515 bp, Xanthophyllomyces dendrorhous
gaacggcttcctcggcttcgtccctcgagctagtggaccctccgttggcactgcacatagaagaccgagaaaaccagccggtcgaggcgtccccttctctcggtctcccgcgtccgtctagcttctctagtttctctagtttccctagtttccccagtttctcctgcctcttgtcctcttctctgagaaactcatcccatgcttttcgcttccgtatctgccaccgggccttcatctcgttcgatacagcatcgttagccagtaagccatgctcgtcgaacgagaaagccgagctcacagacgtactcctgtccgtcagctgaccaggcgaagaaagtgtagaggatgagcacaaagccgagtgatagtatgaagcagaggctggtttcgtcttggtgttcggtgtattttgcgttggcgaagcaacatggatgatggcagcagtactagtggcaactgctgggatagaagtaggagtgggagtggacctgggagtggaactggaactggaactg

SEQ ID NO: 200 - DNA, 1401 bp, Xanthophyllomyces dendrorhous
tggaactggaactggaactggaactggaactggaactggaactggtgaaaggaacaacagaagggacgagagatgtacaggaaccgatagatgtaccgcacaggacagtcagagccgtgactgtggatgtagtcgtttgcaaagagaccgatagacccatgtcgtcgtcgtcctctccattctcttctctgtcgtcaccctcttcgtattcagatggcggctctgcatccgaagatatatagatcggtccctcagctacaccgtcctcggtcctgtccagtgcgttcactctctcctccgtgtctgccttctccaccgtcttcgccttcttcttgctgtcccgacgcctagctaccggatactcggcacagacccaggtaggatggagctcgtccgtcgagtcgtccgactgtggggccaagtcggactggtggctgatgttcggatacacgaccggaggcgacagagaacgtctcgtggctgacttgcgagccacccgagcagacacatagagccctctgaactgtgcttgcgagaggtagacctgtcagtcagacacggatgaccaagaccacaagccggtgggagaaaagggatcgagtaaaggaaggtgcgaaacaaaatgaggcagagaagaagggagagaaaaagatcgcacaaagcagaaaaatggaaatgcacaaacatagagagaaaggcaaacgagtgtgagcacgatgttcctccgatagcaggcaaagaaagagagaaacgaaggaaacaaagaagaaaagaaaaagaaaaaaggtagaaaaaagagaaagaaagagaggaaggaaaggaaggtcgttcgacatgcgcacctctttacacgcgtccagctcgtcctggatcagctttgtgagcgctgccttcgtgggcgttccgttcacgcggatccccatcgcacgggctatctcctgcaatctgaaggggcggtggagagatcgagcaaacagccaacgcagcagccgataggtggacagacaggcaggcagaacgatggaccacaagatcacgagttcgcaagaccacaagaacagaggaacgcgcacggaaccagcagaagaagtaacagagatagcagaaggccagtcgcaacagatcagtgacaagaaaagaaagaagcaacaggacagtcagtcaagagcctgtgcaaagctgcgacgtgctttcgacaaggacatcacgatcaaccatcgctcggtcggccgtccgtttggcaatcagagagaagcatagtccagacatgtgatcaagggtcggccactcactcgtgcttacgcttgttagcgagacatccgccatagatcgtctcaggcattgccagagcagaagaaggctggagacagaaaggagtggaaatagggaaggagagcagag

SEQ ID NO: 201 - DNA, 756 bp, Xanthophyllomyces dendrorhous
aataaaagtgaagaagcagtcgagaacgcagagaacgcaaagagaacaggacaaatgatttaccaatcgctcagtcaaatcaccacgaccagtagatcgatagagcaacaatcagagccgccctgtcctccagtccggccaccaccggaaccatcggctgtggtgtccgacgtgggggctgacacccagaagggtccggcagagagactggtcgaccgagcagactcgaaaggccatgctcggcctgcagctatcagtgtgcactcgtatgggtgtatgtttgtctgtttgtctgcttgtctgttcatctattcatctatttgtctgtccgtgttctcgtcgtcagctggctgccgttgtccgacgaccgtttgtgactagcaggtcaaagagtggcacgtacagatcgacccggcagatcactctcagtatgcatgcaacatagtgtgcttgacacctggcacgtcagctccatctgcgagctggatcgtcagcctcgactggaagtctccctgggcgtgcctacacatagacacagacgtctccagccggatcagatgcgtcagacaatgagtggacgatcagagctagcgagtgagcgagcaggcaggcaggcaggcattcacacaagcaagaaagcagcgatgatgcgatgatgcgattagacgatgaggcgatgagttcagacaaagcttcgttcacacccatcctttcctgaggtcagccagatcagggcaagaaaagaaaagaaaagaa

SEQ ID NO: 202 - DNA, 25988 bp, Xanthophyllomyces dendrorhous
atcactcgacattcttcggagcatggctcaagatgggcttgataacttgaaagacgtctgtcactgtccgcggtgaagacaacgtctctgttgaccacaaggaccgaaagaatcaccgtcccgatgtagctaatataggcctatcattcagtaaagaggttgtcacctagacgagtcatccaagatacggttacctagtaatgctctaagctcttgggtcttgcgcccaacggtgactcaggagaatcagaagttgggaggagtttcgagatgcgatgtcttacagccagttgctcattctcggaaaggttctcatgtgtatctctggcttcttgtacctctgaatttgttgtctcgacccagcatgctttctttcgctctcaccttcgtcttctatgcgttcattgctttctcccattctgtggaagcagatctggtacaggctcctctcatcaatagcacgttttcaagtaataccacgctcggtcctctgttcaacaccacgatgttcgctcccggaacagagccaggcatgtactcgtccaacttttcccgactcgtcatgttcggcgactcgctcagcgacaacggaaatggctcccgagtgctctcgaactgaacgaaaccggatcccagggtaggtccttcgtctggtttctcgtctagcttctcgtctgtttttttgtctagtttctcgtctggtttctcgtctgtctcccttcctgtgggtcacacgatcgctgggtctgatgggtctgcttgtgttccgacctgacgaaacagatctactggaactaccggtggtcgaacggaccgatctgggtggaagacctggcagagcgtatgtcttgactcgtctgtttctctctgcatctgacacgacgtccgacgtgggctatcgcggttgttccttgtcttttcttggctgacgtcgccatggtctctctggtgtttcttcggtgactgtgtgatatctctttgggtcgtcccaggactgaacatcaccttgtttgagtacggtatgtgcatgctcgtctccttgaccagtttacttcttgatctaacgatattgaaacttgctctcattttttgtaccaatcctcttcaccatatgtttagctactgggggagctacggtgaatagcacccgaacgcctgctgtcgtggatgaagtcacctgtcttcatgtcccatcggctctcgagcagatcgaggcgtttgtgaagaaggcgaactcttcgcttgaccacgacaccctggaatatactctgtttgccatttggatcggagcgaacgatatcattactatggtcgacagcaacatttccgtcaccggagctgagatcgttgacgatatctttgtcggtattgagaagctgaaggctgttggtatgttctgagataagctttagccctgatcaactacacacaatgattgaagtcattctactccttcttaagtgccaaacatttccttctcaactctgtacctgacatcggacggactccatttggctcacacgtaggagagaaggcggcatcggtgctgacagacaccacgctagaccttcgtaaagctctcttctctgtcgtcgatgctcagacggctatcgctcgaaacatgtcttcaatgcacgcgatgatagtactgtctaatggtatcgtcgtggtggatatgtttcgggcggcggatgagatttatcagcatcccctagcatatgagctttcaaaaatagagataaatcagagttgtgttcacggccagagcgctttcgagctcaaatacgtgattcctgtgagcttgtgcacagattcggacgtacacttcttttgggactcagttagtctctccctgcccctctctgattgatctcgatggtaggccatggttctgactagttggccggtcttcttgttccatatacttggcctgatgatgtcagatgcatcttacgcgaaaggttcattcgttgttctcaaaagctgcagccgcttctctgcttaaggcgggttggatctctcaaagatgattgatttgtaaaaactcaggtcttggcctaattaggagtgtacataggttaccaaaaaccaatcaacctgtttgtcgtgacctagcatgcattttctcgcttcttccagtgttagcgcatttgtcttttttcttccttgtgcgggaaatattatcaaagactgtgtgtattagacaagaaagaacgttcgattttaagataactccattcaatctgtatgatatgatgacaggaggtgttcatcatatcattgttgttattatcattattattatttgagagttctagttctacactatatggtcgttatctatacaacagaaaggcttgaaagaaaaagattcgaagacaaaggccacaaggtcaaccgatcaaggggaagtgatcaaggaggatgaaggaacgccgatccagccacctactcggaggttcacaccgatggcttggcttgatcttggggacaatggagtaggagtgtctgctctggatagttttggtctggtggacctagacatgggtgaggagcgcgagaaggtggaagggatgaactctgtgggcgaggtcaccagcggtgacgtcggttcaatcggacgtctctctctgggcgtcaggtttgccgggcgagctgaaatggaaagaaagaagagggatgagggtgataagtctatgtagacttagataaggatcaagtgagagacagggcagtatagagacttactgagttcgtcctcgctactagatccggaagccgagctggaagtccggcaggagggccgtgtccaacgcttgagtcgtttgggcaacaaggcggcagtggtagtagtggtagtagaggcaagagtagtaaacattgttgtttatgcttggagtatgatcgagcttgtctagttcaaagcttgaagagtgtttacttggatgcgagatgaggatgaaaccaagattatcccaactgaaaggccatcttataagccaaatctcgagcgaacgtaatgtacattgaaaactgcagaccctcggtcatttcgagcaacgagggaaggcgatggttgataatccgcgcccggtcgttcgttggcaagggtaatcgtcagccgagccgagccgggcagaagcagagggcgtggagagaccgcctgtaagcatcggcttagcaagccgggcaggggtagctgacaaagcctatggggagtgcgcatgtgtgggctgaccgggcagagatgaccgagcgggtccgggggccgaggctcggatgacctgtaagctgtgcagaaaggttggcacgtggtgaccgcgcgtcatgcaactttcttttcaattaagtcgcgaacaatcagatattttatcaggaatactcttgtctaagctttttacgtaggccctgacatatcaccttcttctctccttctctgccgtcactcgttcattcctctgctttcgtgaatctctcatccatttgatcttctgcttcgtcttcgtttgcctgctcttatcccagagcactctccttctgttagctgtgggaagccgggaaggaagaatttttaacatctcaaatagtagggatattcaccgttcggaaatgacgatcaacagaaccaacccgtccacgccttcctcggccgcaacgaccttcagccattcatccttgttggcctcgtctcccaactcgacggccgcagaattctccgcctcctcctcacaacctcctcttccgcctgcatctagaccacctctgtcttcccgggcgacatcgactacgctctatccagattcacagtcgtcctcctcgtttcggccgagtgtatctagaatgcgtagcaggtcagtctctaatttgtgcctctctcggacaagcgtttatcttttcctgcaaagtccatccatctctattggctcgctgagcatcactgggctacgtctttgtctctggctctggttttcctcacctcatcttttcttctttttcttctttctgtcccctctcaatgagtgctaatctgtctactcccattctcttttcccacccaacagaggccgttcgatcaccgcgaccgatccgtccctgttgctctccacgtcgtcgccttcacatccctctttcttaccatcccaatcgtcagcctcgactacccaccatcagtctccctctcaaagagcgtctcccttaccctctgttgggcttaacccaagcatatatcctcgttcgagagcacctaccctctccgttcttccgtcgtctaccaggcagtttgaatcaatagaggacgaaccagacaccccaagtagaccgagagacgcggatacctggatcaaacctaagaaccctaatcagcctacccacggtcgaggcaggagtctctcgcttggcgttcagcctctcaaaaatccgcccagttcgaagcgacagagtccagccaatgggcccaggtcgacgaccacctcgacagcccataaacacggacctcccaagcggtccaagccctggggagaaagtctttttggattctctaatgccagtgtaggtaacctgggcatcggcacgaactccagagatcaactttggagatatccagaagagtccgataccgaacattctccaaccgacagactcgaatcttaccatcatcaagacggttctgactcgagtgatatcgactctgatgaagaaaatgcgtctggctcccaggacggctcggaggctagtctccggatcagggtacagcagcacggatccaatcttcatctcccattgatcccgttcaattcgcttccccgcaggcccacactcacatttacttcctcttccaccaccctactttccaacccacccgagacggatcagaacgcttcgagctcgcatcagacatcctacttctacgacgaccagaacgcattccctccgtccctacccactcccgcgctttcatcctcgtcactctctagctacaacttccgtcctgcccattctcgatctagcatcgatctcgttcgcaacggggattccctgaatgaggtcactaccaccgtcagcacggccaggcgagtcaccaccagagaacttcgccagctcgcaaagggtatgattcctactcttatcgccatcgccatcgcctttctatgtagctttgggatcgttatcggcctcctcagaggattgcctatgtaaatattgcaattttcgtttgttactctcttctgtaaagtctctttttccaaatcactcatcgccctttcgcggtacttctattgtttctttcgaatccagcccaccaagttttgagggaaggattccaaagtcctcagccgacatccaacttgtttcttcagccatcaatcgctacatggaacactcgacctcaggttatctgcacaccatgcttgccttgggcttagctggggtttggactcatgcctggagtgtccctggttcggttgtacttgtaagtctagctcaattgtctattcagatattcttgggaaaacaaattccagaattaacaacatctttcttctttattccttctcaccctgaccttttcccacctctcattcatttagaatgtcctcctcggtgctcttctccctgcagttcctgccgtgttctttctcacttgctcgaccacactcggcggtttttgctcctaccttctctctcgacccctctctccgttgatcactctgctgtttcccacccaactcgccgttgttcgggcctcgatcgcctcacctggcttatccaccaatgctggtggtagtaagcaaaccggctttggatcaggcccctggagaaaactgtttgtcatgcgagcgaccgggcttgtcccctggagcgggatgaacgttgcatgtggggtggtgggcgtccggtgggatgtgttctgtggaacgtttgcagcaggcagtctcagttggaacgtatgttcattttctcttttctctcttttccttctcggcgcatgctctgttctattgctgatatcatccacttcgcctcttgcctctgctctttgttttctggccagtatgtgacgtcccaggtgggcgctttgctcatgcagatttctcaaccaactaatccatcctccgacccacaggacccggccccatcggaatcaattacttcccttttgcgggacccgagcatcatcatcaagctcgttgctctctccctactgtctctcgttcccgttcttctcaagcccaagacgacggtaaccgtacaggacggtcggggaccgccgatcgagacatccgcctctgccgggtggtgggcactaccccttttgacgaggatgggtcgtggtcgaggtgcagccggcatgcttggtatccttcaacgatctattggctccatcggcgccatggctagtaaatggatgggagtcgactggatgcgcggaatggaggagggttccactaactctggtcatattcgagaaggtctgatgtctggaactcgttgagagccagtgaaactgctcatcacttttgtatctatacctgccctgtcccctcactctttcggtgaatgcgcttgggagtctcaggtgtgccttcatgactccacccctttcccccaaatatctttcaaacgcatggtttattatccatattgctagatcaacgcataattgttaaacatatcaaactttctgctcactctacttgcggagttatttctttatcatatcttgggtcattctttacttgcatatcttgacctccaccatttgtctcgtacagtcagctctcaaccttcttctctgccctataattgtatcactactccatatagcctctatacagttctatcgaacgcctatcactagtaagcacttgtggccgttactcaaagtatgaggatgttatttctgccgatcgtagccttgtctcgtggaactcacacgggaacgttggggacagatcaaggcggaaagtgcacgtgactgtcgatccttgctgtgctcaacgtgttagggttgacaccatcatgcccgacggcccccgcccgtccggtctaccgatgacgggaacaaactgatctacacttccaacacgcaaacttgagttctacttccccatcaaacctcatccatttctgtttggacctcgacatccattcgtgtaggagtcatcgaccatgtcttacaatcaccatcttccgaagaaacttgagttcaaagtcaagaagcatcatgggttgaccggagccgttatgatcgccgggtttctcctgcctccccttggtacgcgtctcattctcatcccctttccttcccttctgtctatacctcttttttcccccccccttgttcgatacctgacagaaagaccttgatacaccgactgttcactcactgtcggtatactgattgctctctttcggggttaaattcgaacaaaaagccgtcgctcttcgcttcggaatcggcactgatttcttcatcaatgtcttctgtacgatctgtggctgtgagtttcttgtcagctttgatctgcacacattcgttctcttcccgaaagagtgctcatatactgtaaacaactctattctgacatgctttgctttctgtttgtaaaagactttcctggccacggacacaatttgtaagtctacacgtcgtgaattcccgggaaaggagaagtagtcttggcacgactctatactgaaccatacttacaaccatccattttggggggagggggtttctctttcttttcttcttttcgtataaacactgatactgccagctatgttcaaaacattcgaaacaacactaacaagaagcggacccctaaatgggcgttgaaagccggactggtggatgattccgaacagcagaggagaaaagcgaagaacgcgtggtccggaaggtaagcccactttccagtcctcagaacagtagtctcctttctcttccgatgtcttttgttccgactccatccctttgctactatatatgtaactgaacaaaatctttcattactcgattggaatgacgctcagatacgaagagcgaaacgcccattcaactttggaaggccaggattacgaagaaggccagatcgcggacgttttggccaatccgactgatacttccatggccggcggaggaggtgcgagcagaggtcgagaagacaggttatgggacgagaacgaagtcgagttctacaacgaaggcatgttatcaattctctgaatcttcctttccttgtacatcagctggaatgttttggattgatcaaggttctttttaatgttatcgttctgacgatgtcttctcccttttctttaatcatgtttatcaatatgttttctggctacctcgtctctctttatacactctagccgaagctcccaaccaacggcatcatcattacccgatgaacttcgagggcgccggaggctcttcgcgtagccgaccctctcagtatacgttcgacaacacggtggacgaacctaagaaatctaaaaagtcgagcaaaaaggtatccaaaaagcaggtcaactatgataatgatgacgacgtccccgcatggggcgagacttatggagctgtcagtcattcgttatcttcttttgtgttctcgtgcacgacgttcatccgagaaaatatatgctagatttactcaagttcactgacgtgaaacttacactttctcatctgtgtttttgcttctgttctgttttcagcctcgacgaaaccgagccccgtctggctcatctccttccttgatttccaactcgtctggaggtgatcatagcagaggcaacagcacaaggccccgggacgatttggatcatcagttctgagcgaacgcgacgtcttgtttttatgacttctatacgttaactctcctcctttttgccctctgccacttctgtttgtttcccttttcgttcgttctgcaagcccgaccatgtgggtttgcggaaaaaatcaaacccttttcattgctattcgttttctttatcgatcggtaatacccattgaaatatgcccataaaaattgatagaaaaaaaacggaccataatcaattggaaagcctgacttaaatcgtttgatattgcaaaaagtacaaactgcattggtcatagggcccagatatcaacatttacatcgtctcaatcagtcttcccgtgcaccatcgcccacttcagcagtcctttgatttccctccaatttctctcatctaccgtttttctctcctgttccgatcccgaccgcccagcatgctcacaatccaaaatgaactgtttagccccctccttggcttttgataggtcacctcctgagtcaggatatgcttcgaggaggaacggatgcgacaaaagcggaacccattgggttgcattccagaacccatcggcctcaccctcgggctcctgtgagagcgatcctccttcagatcgatgcaggatcgtatgcaagctggaagtcgagatgagacatgagagacaaagacatgccgattgttgtgattagcaaaagcagaagaagaagtagtaaatgaattagtcggaccatcaggcacgacaaacgaaaataagaagaaacaaactaatcgaatatcccttgctcttctttctcgtggtcctggaggatcatatgtggagcgtcccagtcggaattgagaaggtgaagagcgggtaaggcgcagaccggaacatggtcttcatcttcatttcagcagtagaacaattatagacagaaacgaattgccacgtcagccaagttgagagcttagcaacagctgatcgttttgtgactgactagcatcgattaggctaacaagtgaagggtcccaagatgttcctttcgccggattgacgggacctggaggtcggaggagcaacggatggaagcgagcctatgactcagaagaacgggaagcagtctcagctttacatacaatgtgcatcgagaagctcttctgaatttcgtacggggatcttggctagtaaaaagtcttgaagcttgcggtccgtctgttcttggtctgaacctgaagttgaacaagagactgtggacatgagtggctttttcagtcgagcagtggcagacaagtgtttcaaacgcgtatcaggagggtttacactgagaagagaaggatgatacaacaaggaagaaagcgatatgccgttcgaccaggatggctagcaggagctgatcgagaaaatgaagctgaacggtgacgatcgtcataaagaaaaaaagaaggtgaaaaagaaaggtcgcttatagtgtttttgattttcgatcgattcatctatttaaccgccgtcagctaaggctcaagaccaaggcgctcatagcatgttgggtttgcatggttcatattataatcacataaccacctttgtcttctttcccctcttctctgctcctccaggctcttcgttcgccctcttgacctcggccgcatcctctcggagcttgtccaaattgagatcctcctcggcccattcgagcacaagatgtcgaccaagcaaatgggtatgcttgagagcggccatagcggcctcggcttctcgacgagaaaagaagtcgaggaaagcgaaacctcggccctgagcattgaatttcttgggaagtcgaacagacttgacttgagcgtacgcgctggagagaacatatgaaaatgttcaggtaagcgagtcatcgatctcaacgagcaaaagagagaaaatttaaaggacacgaacgtaaagagctctcggatatctttcttggtggcctcgaacggaatattcttgaccaccatcttggtggtcgtctccctccatcccttcttcccaccctccttcttgtcatccgttccttccatgtcgtcatcatctgttccccgtttcgcgaagccaacctcgagcgcatggccctcaagcttgaaaccatgcatagccgccttggccgcttgagcagcttcggctgaaccaaagccaacgaatccgaaacccatgctctgtttctgaccaggccgtttgggatctggtttggtctggacccgtgcgaacgagaaagaagccaagtgggagaatgtgctggttagaagcgcggaagtggtggtaaagttcaaattcttgatgaataacgttgcgttcggtgcagccgtcctagaaacagccgtctcatcgtcgtctttgacgacagtggcatcggacgtgtcagaggccacagctggaacagtcttggccttaggtactccattgaacagtcctttcgggcccttctcgagatacatgatcgaattgcccattcgcttgtacgcaagcgctttgaatgcggctcgagcaccaactgcgtctacaaactcgactatcgccatcgtccccgccggcggaagaagcagccgaacgatctcgccatgagcggcgaacatctctgtgagcatagcatgggtcgtaccgtaagggatgttcttcaccaaaagaatcgtaggagaacgaggtgttgacggcgagagagagtctaaaaggagtccttcctgaagaaattgataaccatggcgaaaccccatcagtaaaaaaaagagaaacagcatttccctaaattagactgacctcttcaaagtactgcttcgtttcctggatgacatgggtctcggccaaagcaagcttcacagctgcattaccagattcggagttgaggatgtcggctttagaaatgttcatcctgtcggcaatagaagaaaccacagcgtcactctgagagaaaacaattcacagtcggggtagttaataaatgaacatggtggtcacattgtatctaaagagtgtgacgtacgttcatgaacaaaaagccccattcaaactctcttccttcacccatagcgtccgccttcttcttttcctttctcttgtctttcaagctcttatcctcactgtccgtcgtgccacccaacggcgctcgaccgggtaggatatgtaacagccgacccataaagctggatccatcaagtctctcccaggcagcaagcgcagctaggttggaatcaaagagaacgtaagcggtacccagtggcttagggggtacagaattggaatgaggaagatggacagaagccagagagccaaaggggctcagtagttgacggagatctagatcggtgcacgagaatggtaaattacggaggaataatcgagaggtcgagaggatcatatcctgaggctatttcataggaagggcagtgaaaaaaggacgggcagtagaggaatagtcagcaatgaacacctctttaccaaagcggagagagagagagagagacggaggaagacaagagagcgagagaaaaaaccaatgaggaacggagagattcttacagtttgttcttcctgacttccgtcaacagctctcccgtcagcatgcacgacctcgaccttcttgagcttgtcttccgcactaagattatcaccctctgtttccacctcgtctttcacctttccactcatcatcttcttcatccattccgagtcgtccatctcggcgtctccatcattcttctgctcctctacttccggaacaggctcaatcttgttgacgcctgagttagcagcatcggtggccgcggcagcggcttcatcggggggcaggtcttcccacgacctccctccaacagccgtgctagctcgtttagaagttgctaactgtataaactcttctttttggttcttatctttggcagatgaagactttttgagccttttggacgtcccaggttgatccacaggctcacgggtggaagcaggaggagacgaaggtcgtttgagtggtcgagattctggtgtaggcaagtgattcggtcgaagtgacgttgaagccttggactaaagacgtttgtaaaaagaaaaaaagcaaaaaagaagagaatagaaggaacaccctcaaggtgtctcagtcctcaaagtccccgatggtagtcaatcaagttgaaagagagagtacgagaagaactcacgtcgtccactaactcggccttcagcctactgccttctaaccaagctccgttccaccaatgaaccgccctttgggcttcatcagacgacctgtagcccacaaaagcgaatcgtcgtctggacagtagtttgagatcagtgatagaagagccaggtggaggcaacggggtggtggaagaagaaggagctgaagccgaggcggatgataggtgggaccgaagcgactcgggagtagtcgtcggtggaagattgaggaggatgatacgagttgacctgatagcgcgtaacaaagttcatcagcttggagaacatacttccgacacggctactgaggacgacaaaggagccttacatgctgctgctgctgatgatgatgttgaaagcgaggtcgcttgctttcggaaaaaatgcaaaatattgaaagagttgaaactttctcgctcttatgcgacgcgcagcaaaaaatcattttggattttattattgttattatcatgattgccattaatgttttcttagtatactcatcagatagatcctgcgatccaacggccaacacagaagaagagtgtggacaggatgtttcatagaaaatcagtgtagcgcatccattcagtagacagcttgtaattttgtcattagagaacatagagaagaagattcatatgcagcttaaaaaattcatcagataatctgtaaagttttgagagagccttgacttgatatcttctcaagaacaagatgggataattgaaggccactgattctggacatgcagaaagtaagcaaagcgaagcccatctgtttggtccaatttcttttagtctgcttttatgaactcgtctttttgggttcggaaccttcagcctcgacctttcgattagccttgagccgatcgaggaggagggtagttccaagcagaagtgaattgcgctctcccacagtcgaatccccacatcctgcccaccggatcttcaagttctcgtccttgacaagacaaatagaggaacggacgacccaacaagattaggcctgtactctcagaacttgatctgacaaggagatttaaaacgtaccaccagatagacgtaaccagccaagttattcacgatccccatcatctcatcctcaagcgagctcttcaggttttgggtcgagatgatgtaattatcatgctggtctttcgggacgatctcacgaagattcgatatgaagaaggtctgcatccaagcctttaccggcaagttttgaagtgatacctattaccgatacattgttcaagattagcaacaattcgagatcatgggataaaccatgctgacatactgagcaaaatatcaaatccttctcatccttgtattcggtccgaacggccttgacaaacgcctcgcattgtctctggttgtaacgatgagtttgggagaagagttgaaataaaagtcaatcggttttgcaaagatgctcacgctatgggacggagagaatagataaaaatgctcaccgcttgaggaattgtgccgaggatggacagtacagtgatcttgccctggcagatgtctgtggtgtgggtcttggtctctggatgggccaaggtcttgccgtaaaggttagggaggtacaaagctttctgtttgccatttgaacagaggcaggatcaagagaagcgtatcagatccagtcatcgagtatcagagtacaaagtctgaaagtagtgccgaacctcttctttgaacagcgtcttcggtgccaaccagccttttccacctcgactcgaggcagcttctttaatgtttctcaggttcgacctaccgaattccgcaagactatccagcgatgaacagacgagagatccgacgaacagaaacaaaagtatatcaactcatttgcctttgagtatatcatgtacatcacgccgactaacattgcctgaagctttgcttttcgaaagtctgagtccaggcttggtaccaaagcctgtaaccaggtgatctccttggcctctggcctctccggtacacccagcgttctggccagtccgggaagagattctgtactggctttcttttgagttggcgaggagacaggcgtagcatcgggtgaaggcgaatggacgaaaggtttgggaggaagttgaggcgaaagctcttggtgaggagcatgatctggaataaagagcccggaagaagagctgacagatgcaggctcaggagcaacgggcggaggtgtcggagggggcgtcggcattgtcggtggtgctggaggaggaaggatagtagccggaggttggtcatgatgcttgtttgctaacggaacggcggaggcaaaaaacctatagggatttgaaggtatggaatgagccggatacctagagaggatccggagagcgaacagaccgctcatgatggattgatgtaatgtggggtcaaaaatgagatgcaacaatggtttgtaagtggtgaaggatgatgatggtggtgatgatgatgtagcgaaaggtgcaagttgtaattcattaggaaatctttcaacaccaaaccataaagctgcttttcgaattctattcaactgtggatctgtcctttttatccatcatctacattaaatcgcgaccatagaaaacacttcatatgtcataagtaaaagaaataggaacgtagatacaacttcgtacgttcatcagacaacgaacgcagcagaggacagttgaggtttctcaagcgttgacattggtcatgtcatggtatcgatctcctttgatctggatatctttcatcagctttcgaatcgcttcatgttcatccttggagatgttgaccgagacggcttgattgttgtcctccaggtctgtggtgagcaggtttaaggaaggatgatggaaaatatgtcagtgcatcaatctcaatatgtccataggttcaacgatgtggcctgacatttgactcgcttagttccaggaatgggaattgctccttggtccatgacccaagccaatgcaagttgattcgcagtgatgttcttcttcgcggcgatctgaacgttgacaaagttaataatccatggagggaaggtttagttggcacttgaatcactggatggcacatattcacatcggaggagcatcttagcgcacctctttgagaccttcgacaagcttcatgttggcatgaaacgcatctccctgaaaccgaggaagggccttccggactaatcctcgtcaacgaccaatcaagttggtttcatgttgagcaagtaggaagatgaagatgatgagatcaataacgggaaagatgttacatacagtcaccctcaggaatctcctcagaagacttccaggtacatccgatgattcctcgtcccagaggcgagtaagcaaccaacttgacgtctaacctatgaatggaatgtttactcatatcaactaaggatacagttaggcgtacagcggtagacgcaaatctagatacgtactccttgcaggcatcgaggactccattcgtctccacatcaggagtgaacaccgagtactcccactaatcatcgggccgacagcacaaacatcgtcaatcttgctttcgagccagagctgagtgggcacaagctgaatgattggcatacctgaacggcatgaatcttggcgatcttgctggcccgtcgaagagtatcggccgaacactcggataggccgatgtatctgatcttaccagccgtctgaagctccttcaacgctctgacagtatcctcaatgggcgtgtttgggtcgactcgatgctgatctatgttacgaagggccccgtcaagaaagctgatatgttggaaggctgagcgatgcaagcaccaagaatatagtactcacagtatagatcaatgacatccactccaagtcttttgagcgaggcctcacaggcacttttgacatattctggatctcctcttaatccggcgaaggaacctcctgggccacggacaattccaaactttgtgcaaataaagatcctgtcccggtcggatttgaggaagggcgcaaggagcttttcgttctcgccgctaaagtcgaattccgaagatgagagacgtcagatgcatggatcacctaggtatttgtggatgaaggatcttttgaagacgctcacctgccatacatatcggctgtgtcaatgaaggagcaacctctgtttgatgacaatatgaatgcgtacatttagtaggatacccatcttagatttgagaacaagaagcataaatggactcactgttcgatgcaggttcgaaccgtcttctgagattcttcctcgttaccagggccgtagaactcggacagtcctgtagtcgacacccaagaggagaagcagagtgccaggaagcgtttttgtcagctctatctgtctattattgtctctatgaacgtaaggatggacaacatatacacaccctatagtaacagaagataattccgtttgtcatgcgaagggtttggatgtattagtgtgacttgatcagtgttatatgtagaagaaaggaaggtttcgaaccatggctccgaacccaatcttggagacctgatgaccgaagaaatcgacagtgggaataaacgattgggtggacatgttgttagtcaaaagtagtgagtatgtatgggtagatggctattctcgaaggagaacctcctaaatctaaacatattgattcggtttctatcattcagatttctcatctcagagatggaagtggaggtttgaaaaggtggaggttcgatgggtccggcccgccaggataggtgaccgggtgatgacgcgtcctttcctttatgttccggtcacctttctatgccgaacttggacgtggacctctccacctaaagtacacttgccatcaacaatgagtggggagatccttaaagttggttggaagcgcacatttttttcacacacatacacatatgaacttcttttgtaccagagaaggaagagcgttgatatacgacataatcttacaaaatgtattcaaaacaacaccatttcattgggatttcattacaactaagcttcagccaactatattatcattattttttatggagagaacatatcagtatattgaaattcttcaagaacgaaaccaaagatgccacgtaagaatgaggcgtagaaaggaaggggcatacctcacggtatcgaccaccctttcgaaggaattgtgtgtgcgtcccagattcaagaatctgcccacagtccatcacgtaaatcacatcggcattgagctgttatcacatggcgaggaagaagatacattatcttatcaaatcagttgggccgataggaaagaggagaatgacaagaaggaattcacaatagtttataattgatgactgtgtattttcgaaagagtgcaaaagagaggaaagaaatgaatcattaaaacagcatatgcctctcaataaacgagaatcattcgaagaccaacgatacattcacgtaatcgtaattgtagtccggttgatgaatgcgcgatctaaagcttgttgaacaaagcgcctcagacttattatccagcgctctatatcggtagaccaagacaggaatgagcgggttgtcatgacgtcttgaggagtgaacgttggcgcagaaattacgtacgaggtagattcatcaagctatttaagcagaggacccgatcggacttgatcgtcagtgattttttcttctgttttggtcaacaaagcacgatagggacacgtacctggagaatttgagcatctcttaacaacgctcttgctatacaaagcctttgcttctgaccaccgctaagattcgatcctttcgtatcgttgggcggatctaacccgagctcaggcgtcgtcacaaattccatcacctgagcatctcgacagacatcaatgatttcttgatccgaaacttttcggctcaagcccaaaactagattgaaccgaatctatacaagacaattggaaaagtatcatacaaaatccacaaagccatcattcagcctaattctaggttcgtcagatagtaagaacttacagttccttcgcgcaagaccgcatcctgtgagacaagcgcaattttgtccaaatgttcgtcaggagtgacgcttcggacatcctcgccatctataaggatcgctcctctactaaaagggaaaacgaagtgagatacagcaacaaatcacgatatggtattaacagccgcacatatagaccacaaatgaaatgcgatcgaccaaccaaggttcatagaaccgggagagcagagctgtaaatgaacttttcccgcttcccgaagcaaccatcagacaaagattcaatacagcatattggatattaatctttcacaacatcaacccacatagccatcaaaaaaaatgtaaggaggaaaaccgatcaaaaagggttacgcactacagaaagcgaccctctgacctgcaggaattcgaagatttagattctcaatcgccagttgttccttccgattagagtattcaagattcacattcatgaactcgatttctgttcctttcaacgctaatttcatcatttctggcaactgccgctctaccatcgaagatgaatgcggagtattgagagcggccccgagaggctctctcctagtctaacaaaaagctaagagcgcatgcacagcccgactgatatcaccaaggaaaacaaacgtctttgagaagaccattgcgcaaaccatggcggcctcgaatgtagagaagagctcagcgacagcgacagatccgtcggcaagttgatatcctccataccaaaagagcagcccgcatacaaacttatcaaatcgaaaagtcggagaaaaaaatggacgaaacaaagaagaggtgaacatacgtcagcggaagttcaagagataaattaagacactaacttacaaggaccacagtttgtgagagcccaaatataagggaattccatgatacagcctgtcgatgctccttgatatcaggttgctgcttcttgttgaacatctccgctacgtgtgtttctcgcccaaatacagctacagtctgagttgaagagttcaaccaatataaggtggtcagacagagtatgaagagaaaagagaatagcgtacaaaccttcatagagttgacgttattcgacgcgcgtgaaatcgccaagtttataggtttgctcagttcttgttcgagcttattcatatgaataaacttgtcataacctgtgggaacaagcaacagagtgggaagagatccgatcagaagaatatcctaacttaaagggcatcaagaggaagagaatgcaaaagcgatgagaatgagttgtacagggggaagaatgaaaaggtaaaactttgtctcgagtctcccctgaatatacgtccaaggatgtatggaccaacaacactgtgtgatcatgatgaaaagagatgatttcaatctctcagctttgcaaaacacgccaaagttatggtatcacttacttaagaacagatatgataatctaatcatcaaccaaaccgagaggcacagcggcatttgaaaaatatgtcgccagatttgaggtcagacaacccgctccgttctcttcaatatcgaaccaagcgactttctgtgtttacatatttagaaagaattgagttttgaacttaatatctgcgcattcggccgaagtcgagcaacgtatctgcttgagaataacctcagcgccttcacgtcgtatccgtctgatgatcctgttcgatgctccatcaaaaaacctgcccagaaccagattgcatagcgactgtacttcctagcaaccatgcggacaaaggccaattcgtgccactgtccagattgtcattgacagacgagagacacaggcgatgcattccacggtcagatagagccgatgtagcttcgctttgagaaaaactggaaatgtggggaaacagccaagtcattcatcagcttgttcgcgttttcaagctaagatccgaggttgacttcggaacgcgctcaaggatgagaagattcgatcgtcggacaagagccctagccacagcaactaagtaagagagaaatttatcagccacgaagaacatgcgccagaaggattccggagaaaagccgagaataagaagatcactcacgccattgacgttgacgttgaccgcccgagagcagcccagtcttcatcccgtttatcatggtgtctaggccttcgggtagctgaaagataaactcccagacttgtgcccttttcaaagcctcactacatgactgtcttaccctggcttcattttttctatcagcagcatattcatctggcgtgcctgttagacagatggcgacgttgtcgagaatgctaccagcaaatagtgcagggtcctgtagaaccgtagccatctgttgacggagaaaagagggctgatagcttgatacggggacaccgttgatgaacacgttgtttgcaagcgaactaggatcaggcacatcatattgacgaagtagccattcaatatacatagtaaagatggctagagaaaatggtgagcaatattggtataccttccggaaatgcccttccgctgattaggtgaaacagataacttactaaagccactagggtaaactttccagagcctgaagctcctacgaatgcggtcacctttccagcggctgcgtcgagagattattccgtccaaactcttctggttcggcttcgaaggaaatgagaaagtaagacctcgaattcgcatactcaattttttcgaaaccttattgtagtggcctctcttgattccgagattgacagacggtagagtcgtaagtcctgcaggattctgatagtcgatttcagatatcctctcgatctcggctctaacttgggcttgggccgcgaacgcttcatggagcatcgtgaggtgcgacaaaatacttatgaccgctgatcatccattaagtgagaaacgtttagattgataagcctcaggatcagatggaacagaaaatatttctgatgacgaaccgaatatggcgctgtaagttgagaagaatgaggtgaagagattgccgcttgataatccgtggtaagcgactctaactccaccgcgatagactggagggaatgaaccaaccaatgccgaaatagtcaagctctaaaacgtggcctctcaccaagaaataagccagatagaggcgatgcaagatcgaagtttgaaaagcaatagtgaagacgatcaaagaaaatcttacagcaaagagcataggccgcaaaaacactaaaacaagcggtcgaaaaagcaaagcctttggagagtacaacgatgtttccgtccttctcgatctttcttagataactgtcatacacgctcacgagcgtatctgaggcttgaaggaccttgacaattctgacggtggagagaacctgctctaaaaacaaagcggcgtggccttccatccgcgagattttggcgaatggtcgagaggaaaactcggttgacagatatggtctacatgagtgcgggtttagagagacaacagaacaagatgcttgagttgagtcaaaagaggaagagacggaggctgaaacaagcgaaaggccttacagtatgccagcgaaaggaaaaataccaaagaggacaccaccgacttgaggagataccttgaacgccataaccactacaaccgttgcaatggaacgaaatagaagttgagataaggttgtcagtcagttgaccaagagataggagaccaataagaaggtacatgagaaacaacgtacgactggagcagatggttccaatactccataatagaaaccctaaaatttctctaatacctatctgaagacatcttatgcccttggcgagtctcgagccgacttcgccagcaccaacactctcgaagcgggccgagtcctgggcggttacagaggagatataggctatcctaattcgggcgcacatcctcgatgaagccagagcgacttcgagatgtatgcgcagggtattaaaggtcagtgacacacttcgaatgtttgaagatagcacaagatataggaacagacagcaaccgaagaacacagaagagaagacccagaagccaagtcctgttgcaagcatgatcagagcggtgaatctagacaccatacgaatctcttctggcgagccggttctgccgttctggacgactgcgcggaggtatcgatgtagacagtgcacaaagaaaaaaccataagatctccgagaacaatctgggtgacacatataggtaaagatggtgagagaataatcgtacgtacggccagatgtccattgtccgtacatatagtctactaagatagttggaagagcgcctgcgggaggaataacaggatgatgcacaatggagaacaagtatgaatctcagttcaccttcagaagtagagatgaagaaagaatttgctgtcagcgtgagaactcgcttacaacaaagactaccgaccaggccaagagcatatagaataagatctgccctggttgcgtatgagagaaagctacgattggtgatgtaggcaagaaatgggaaaacaactcggtataagcatatatgtctctaagagatacttgatccagctcctgactgataaaaatatgaacgcgcaatctctttgatgtcagaagcaaagacaagagagaagacgaagaggaaaacggactacaatactccaggcaatggctcgaactttttcaattccgggacgtttttgatgattgatgcgtactgtcgctgtttgaccagttcgtctgctgcttgtagcgcgtacctgtcttggctctgcgacgacccgatggctggagctgttaccattggcatcaatgtcgagtttacagtataacgtcaacatcgatgagggaagatgaggatgtgtgtagagtaaggagaaagcaaggtacccgactgatctatggtttatagggaaaattgtatagactactctcgggaacacgacataggcaagagggtgggtaagtaggtcatccggataccattaatcaaacatctatacccagtggccagagcaattaatggaagcaaaacaaggtgtttttatcaatgttcggggcaaatggggcataagtcattattggaagcgacactacatgttgtgaatgtatgttcatcaccagctttgtgtaaataaaaatgaactatctctattcttctcaagagctagcactgtgaccgatccgaagctatcgtttaagaaggctgtagtgatcattttggaaagaccggcttggcgtccagaaaagcaacttccctagaaggctgaatgaacggatctagtgcctcagcctctgatcgcgaataagcattcgcgccgtttggggttctactgtttaatcgtacaagtgaatgcattgatttccgatctgcgtctagaaaaccaacttctccatagggctgagtgaacgaaacaagcgcttcagcctccgatcgcggataagcatctgcgccaatcagggatccatcatcactttatataaataagtgtataggcttgcggtttgaatagttctcagatgttagtatcagttaggtcttcactgttgtgggtggacttacaaaaaataaataatcacgatgatacactacagaattctctattgctctttttctcgacgcgtctttttctgttttgtttttaattcattttattttattttcccgggcggtgatttcttttcctactaacacaacgaccatcaagatacatacacaccgaccagactgacctttctcttcccttctctgtctctcccgtttgccatcagtatggcttctcctaacccctgggcgacttcgttcaggcaacagctacacgatgactcgaaccatttggataacctacaggaagccatcgacaccatcggttacggctggctcaacggctacatggacgccgtattctcccatcggacggaaactgcccgatcgtaggtgcctttcgtttgggtttggtctattgttctgtctcctttactccttgcattcgcaaagagaggacaatctgtctcacacagtcttcttcttttgttattgttgttcttatctacttcacgtgttatccttgacaccgccatcctcgtccatgtttgtctctgattgcagagctatcgcggacctcatcaagacaccttcaggtaaacggaagacaaagactaccactcaggctgaaagaatcgccaaagcagaacggatccgcctggtgaatcttgagatggagaatgaggctcagacgttggccaagaagaaactcaaggttcgtcgatagctttcttatgtcgtgtcatgattgaactcccctactgatacaggatgggcacggctcacctatctatatatctatatcccactcttactccactcgccacatcacacactgttctcttaatagacaaagaagacggataagaaatcgacaaagaagactgtacctgctcctcaacctgaaccagccatgtcagaacgcgaatccacccctgttgccacccctgctccaatctcctcaccaccgcaacctctaaggcggtcgaaacgttcttcagcttcattccaaatctcaatacctgcatccgtcccttcatcacctccgctaccaccttcttccgtccgttccgtagagcctgctcaattaacggaggaagacgtgttgatggtcgaaacagagcaggcttcggttgagacccgctcggtagatgcttctgaggctccgatggccgtccaagagcagaacaaaggagaagccgaagacgagtttgcagatcagggagaagagaaggagaaagcggagatctcggcagaaattgatgagatggaggacgatccacagatcgaagaggccattgaggtagaggatggagaggaagaggaggaagcggaggagggagaacagcttgatgacgaacaagcggaagaggatcatgaagtcatggatgaggagacgcaggataaagagatagagaaggaggaggaggaggag

SEQ ID NO: 203 - DNA, 26978 bp, Xanthophyllomyces dendrorhous
ctcatgaggagatagaagatatcaatgctgctaggacagccgaaaagatggacgaccaggacgaagtggacgatcaggcagaagcggaagatccacagagaggagaggagttggctggagacgctcatccgaatgcaaaggaacaagacggtttgactctggacgccgaacataactcaatagagcagctcaaagacgccgccgagacggctgagagcacagtaacccctaggaccgcctcccatactggccgtcggtccgcggagaggaaggtgtctctttctgattcaaagtccactgccgctgttgtatccccagttcccgttctgggatcagtcttggagtcaacctctatctctgctcctcaagaagtctctcaatccgctgctgcaccatccttaaaatcccaagaacctcccacccccgttgtccgacctgtcgttcagagttcctggttaaataaggtctacaacggacctagcgcttcaagccgactatctcaagccgcctcatcgtctgtgatcgatagacgcgagagcgccttaccctccgccacaagtcttggcctcagccggatctccggcatcgggggcgtcaggggagtcccttcgtcaaaaaggaagtctggggacacgtttgaaaccgagtctttctctttgatgacggcgaccgagcaaccactcaaccaacccgctccgaccgaagagccggtcgtatctcgtccttcaaagatctcaaaaaccgatgaccaatcttcctccacccttcctatgctttcgaccattagggcttccattgcgggttcatcgagcgctcagaacttaacctctcctgtggctgtctctgtcgatggccgaagtcgtctccagcaaatgatggatgagatgaaggctagggaggaggctaacaaagagaacgcgaggaatcgatgggctggagggtcggtggcttctttaggactcggtacagtaggacggatgagttcggtttcgagtacactacttggctcgactagtagagcgacgatgtctggcgcaaacggattttctctcttgacggtcgaacccccggctcaggaatcgtcccctgtgcctgaaccggcgcctgctatcactcaggagagtaagtcagtcttgatcgaagaagctgtgcccgaacaggaggcacctccagggcctcaagaaccatcttcaccgattagggagcgttcctcatctgttcgagagcgttcatcgtctccccgtaaacgatccatctctccactggaagtcgaggaagagatgatttcttctcgtgaagagactgtcctttcaatcgctccttcgcctgcacgaggaactgttccttctgcgaaagaagcttctcctcctccttctcctcctttcgctcctgctgttcaatcgaaagcttctctccctcgctccgtaccaccttcgcccaaatacccgtctactcgaactgtaccgttcaccacaccacccgcgttctttgacgatgatctaatcattgtcgtcgacgaaacaactacacctgctaatagccctcctgcccccgcccctcgatcacatattgttgctgttactgctgttcctgctcctgctcctgctccctcttctgtatctgctcctcccaccgagcaactcaatgcatccgggtctgcaccagcgagcgtgtatgcgcagggtactaactttgctgcaaaggttctaggaaagaaacccaaggtggacccgccaaagagtgtccagctggctgctgaagctgccaaaaaggtgaagacgctcttctgtatttcgtgtgatggagttaatctgagaatactgatatttgtgtaacattgaatactacaggaacaagacctgaaggatcgtaggaccgctatcagtaaagtccatgagcagactagaatgcgagccgccgctcaaaaagcagctgaagagaaggcaagagaagaggaagagaaactcaagaaggctcaagagactgccgaccggaaggctaggatggctgatgtcgagagaaaacggaaggagagagaggagagagacaagaagacaagagagacaaaggtaagaacgcatccacgcctccattagaaagtagtacactaactagttctctttcttttgcgacccttcaggctcgagctgcggaagaggaggtcaagaaacgcaagctggcggctgagaaggcatcgtccgcctcggcgcccaaatggctcgcttcttccactggtcccaaaagctcggcaaccgctaaccttccgaacaagcccgttggcggtttgacttcttctactaacaagactaaagtaaatccgtccttccggcatctccctccgtcctccggtccgtcttcacagcaattcacgacatcaaaccaatctcaacaacaatctcaaccgtctcaatcacaatccaatgctggtccttctacaatccgggtcatcaacggaattgctagtggtccagttcgcctatcggacatggccaagactcagagcaccagaacatcccaagctcagggtgggcagtctgttcttcaggcacaacgacgtgccctcatccttgctcaatctcagtccaagctgccagcgggtgagcaaaacggagagtccgaagctatcgagttgcctgatattgcgagtgaatactcagactcggaggatgaagatcgagcgcagaagcatgcgcagttcccggtttggacaacatcaccatcgatgaaggccgctctgaaagagcaggagactttcaacccggatgatatctttggaccaatgaagcctcttgccatgggtgcgctttgcttccttttctgatttagacgaacgtgtgtccatagatcactgatgtttctgtgcattgatacgctgtttcattttatcaacagaggaggtcttccgggtcaaagcaagcaagttccggccaagaagtagttcggcaaattggtcaaaagatggtattaccgcccgagaagaggccgagtatgccaaaaagatggggttcaagaagcttcaatagtttttttcattgtccttcagtcttgtttctgttatcattctttcttgctttgtgctgctcccttgatttaccgttcctgtcgcatctatcgctgcgagtttcaatcctgcgcgctctaatttctctgcctacgtgttcccactcagaggacttttatactctctaacttttgtcattatcacatataccagtccgtttttccagacaatggccatcattatcatcatgttactcctttatatatgaatcaatcagtgtctgcattatactatggaaaatgtatcatcatttacattctgttgtaatcctgcttgaaatctatcaaagatccaaccgaatcaacgtatactgctcagaagccgtctcagatcgtgtcagtgcgagtgcgttctgcagacggctcgacttcaactgatttgaattagagaagcattcagagtttactacttaatcaaggagaaaggaccatttacgcggcctaacagagtagattcttatgttatcaatatcaaagcaaatgatgagaggtttgagctggcaaagagagatcagtagtgaaggtctttgttagggttagcggagtttgaaccgggctggcagtgacaagaaaatccggcaaaaattggacgggctacatttcctcgcttgctctaacagcgacccagacactctgtaaagagtagtgtgtactcactcatatccttctcctttggtgaagtcttaacctttgttgttgttgagctcccttcggtatcatggttgcatactatgatgaagttgaaattgaggatttcacttgggatgccatcaagcgggtcttccatttcccctgcccttgtggcgatcgattcgagatttctaaactcgatctgagggacggcgaggagattgctacgtgcccttcttgctcgttgattgttcgagtgatatttgatcctgttcgtgaaattttgtctcagttcttcgaaacttagagtatccataactcagtgttccttgggtttctttcgattacacagcttgactgggaagattatgaagattcagaagatgacgaaggcgaggatgttcccggctcgccagcctcctccacggtctctttccactctgccgcatccgagaccgtcaagcctgcttccgctgaggttgatgccgtggccaagggtcttgagcttgtcggattgaaggacggtgactagttcatttttgtatatgtcttctgtcttttcctacgttggactgtttactaccttgtaagtgccttccctttgttcaatccatcacggctgaggaggacttggtccgtatattgtcaaggatgatagtcataaatgcatagttcaatcagactcctctactagggaactgctgaatatcatcatcgaaattagtctttcacccctatctgaacatccatcgcctgtctgaaacctttttttttgccttacacccatgtgaacaagccaatgctgaccctgtcttttcctcgctttggtaaagtagtgataaaagatttctccataaaaccaccgcctaagagctctacggcttcaatgccatcaggttagtcaaccatccgtttgggccactcttccttcccttcccttgccagggtttcaatgatgaaatacttctcagacctgttccgaatttactgaggacaaaaagccgtcatctcaaacttaactcgacacctctgacgaatccctggcatcccatctttcttccaatcttaacttcgataagttttaccaagtagttgatactgaccgaccttgctctggatttcactacattcctgaacttttagtataggttgaaacttgccgtttcgtttggttgagtttgatcaagagtccttatgctccatacattcgatttacctgcgcacatgtctgtacggagttgagactttgacaggaagcgttgtagttctgtacgtcgttgtaaaccgataggatgtatgctatctttatgtgttcaatgtaacatcaggtcaaagaagaggactatgaaacatgaaaccacgtgttagctgactaagcacacgaatcttgtcaagctcaccgctttcgtgtcaggctgagcgaggattccattctgcaacatttttcgatttctcctcaaacagaccatcaatcaacctataacctctaacctcactctttcaccttgtccaattctgtgctgctgctctcctacgatggatccatttaagcttctcacacagggaactcacttctctaaaaagtctaacaaaaataaccaggttcaagcgctcttcaaatccacacaatcagctacctccgcaaacccaactgccacctcggattcctccgttcctccgacctcccacgctttacctgcggcacttgacttctttaacgtaggtgctgatgccggtactggtcaaaatgaatcagcatccgatgggaagaaaaggaagcgagaggagaaaccgatgagagcggttgctcctcgaattctaccgacacctacacaccgagtgaatctgacaggtagagctgcaccaactccgttggcctcacttgaagaatttgtcgaactacactcgccaccgccatatatcatcagaaacttggctgaaatgggaatcactgagatgagcgaagttggacgaggtgcgggaagtgtgatcatggctgtaagtttttctgcgacattgttcacgttaacttttctcacaaacaggggatttggatccgacgtctctttagctgacgtcgtttctgttttgatcattgctttttcatttgtgaaaaaattatagggacgagaccttaccgctttggctcctaccggatcaggaaaaacgatttcttacctgctgcctcttctcactctgcttcgtcaaccggcgtcgtccctcaagtcagagtctaaagcgtctacgtcttcgtcgtccagttcgacatcgaaatctcctcgcgcacttatcgtgtctcccactcgggagttggctttgcagattcagaacgagtgtgccaagttgactaagggacgaaaatggaggacggtggtgctgagcaaagctaaccaagatactgtggtcaacggagatattggttcgttccggctgtatttatccttgagggccgagatagagagggacagacgtgaaggaaacactcgatgactcattggttgattcttcccatgtcgttgtgtttggcagatatcctaatttgtacgcctcaaagattgatgcaaacgattaaggacaaatctttgtctctggaaaggtgaggtttcaaacctatcacgggtgcgcctaatcctccagaacccgtactaactcccatagtcatcctcaactataacttccgtccccatatagcactactcatctgatcatggatgaagccgatcgattactcgactcgacgttcttgcccatcatggatgaaattctctctcatttgacctcggctgagctaaagcgatatctcttcaccgccactcttcctagtacactcgaggagatcgcccgaggactcggcaagggagacggcatcagattggttgttggaataaagtgagcatctctacatatattgatccatcatagttcatgcatgcatctaacgtcactcttgcgttgctcagggatgcggtgacatccaaaatttcccagaagctaatctacacggctaccgagaacggcaaactgcatgctcttcgatcactcctcaaagcaggatcccttccacctccgtgcttaattttcgtccaatccattcaacgagcgaatgatcttttccacgagctcgtctacgacgggttcgcgcttgatgtcatccactcagagcgaacccccgagcagagggacaaggttgttcgagagttcagggaaggaaaagtctgggttttgatctgcacagagttgatgggtcgaggtatggactttagaggtgtcgaagttgtggtcaactacgatttcccagccggtgttcagagctacgttcatcgaattggtatgtgaagcgggtttcatttctttgtcacgagagaggaaaaaaaagtacggaggtgtaataactcttgcttcttgctgttactcttcaggtcgaacgggacgagcaggtcgagatggtcaggcaattacattcttcaacaatgaggacggcgccaatctcaagatgtaagcttcgtttgccatggattcaccagccctacgatccgtgttgggcctcataagacaaggaaaagctgacactgcatcgagtctactctttgaacctttgatcaggatcgctaatgtgatgcgacaatcaggctgtgaggtcccagaatggatgcttgcgctgaagaatccatcaaagaaggaccgcagaaagcttcagaagaaaccgacggatcgaatggaagtccgaacggccgccggaagtggtctcggccgacagaaggctaccaagagacgggagatggtcgagggaagcaagagacggaagacaaagggggatcaagaaagtggggatgacgagtaggaatctgtcgatggcatttagactcgagctccagaatttgaaatggccataagctgatagagagtaaacgacaagacgtcatgaaacaagctacgcatcatccagtaaagtagaggaaatactagaatatacaactacacttgatataaagaagacctgcactcgcaacaaacctctacctacaaccactcttttccctaacaccgactatcacaggcgattaagaggctgagtctgagacatcacgcactcacaagctcgaccacaccctttttcttttttggttgagaattaaacgatcaagtcgaggagaaagaagccaagcattgccttctttccttgctacaattatctcactcccgctgtcactcttctcttgctaattttctttgacttggaatgatgacatttgaccgggtagcaaacattatgacacaatagacgaagcccaagagtttgagaggagcggagttcttcatcgtcaaaccgaagttgctttgggttgacagatagtagagtgacgatcatgtagcgtcaggcgacaaacactaagattgatacaacatcggatcaaaaaaaggatacaccaaagacaaacgataggcaaattgaaaaatagcgcgagtgtacagacaactttattcatacgagcacctccagaccttccatcgcctcagctgcctcgacaactacatcaaacattccactccatgttctcgacaaacctgcaaacgctgacagatcgaccgttttcaatccaagatgttggcctagtgcccgccgctcttttaaatcggttaggaaattagtgattaatttgagctgggaagcagcattttcctggagagtccaaagaaatgtaagcgccacgctctgttatctgcttccggatgacacgcgaaagattaggtgttaagacaggaaagaaggtactaacaccttgccaggatgggtgcgtgagagaatttggacaggggaacggcgtgctgaggagaaaacttaatcgctcaacactcgttggaagtcttctccaaagtgttggcttcatatgatgcacgttcatcgaaccatatggtctttgttcatcctcagacggtcgtagagaggtcgttggaacgggtattgggattgacatgtttggcgggttgatctgaagttgaaaaatggacacggacaagtgttgataggtcattttaattggacttaacaaagtccgtttgagtgattccgaaggggtaccgtcgagtttgagctcagtcagttcgagatgaattccttccaggtttacccctccttcactgccatctgtaggtacgttctcgagcttctcccgagcggccgatgagcaattgaagaggatatgcaagactctgagtcgccgaaatcttccttgagcgagtctattcagaaactggttccagagcccagattcaaggatctgatcggtaatcctaagatcaaactcaaggacgctcgaccaaccaggtcggccgttcttgagaaaccgttgccaggcatcatatccggctaactttatggatgtatataatttcggcaggatagtgtcatggaagagatggttgacggtgagaagaggaagtattgagcggaagcttgctgggtcagacgaatgattggcacagaggtggttcgaaacaagataaagtagttctgggatatccagtggtgagcgctgagcaaaagcattcatgacgatctcagagcagacaagatgaacctggagagagacgaacgaaggtcaaaagaaggtatcgcaagatttatatggagactggcctatgactttgttgtcctcgaagtctccctcgggcaatcaaaggcccgaccgagattcaaagtcacgtgacttcatggcccgtatccggttggcgccatgctacgcacacactcatcactcggaatcgcttagacagattggtttcttcagagatcctatcacacaggattcgtctgaggaatggcccaatagtttacgtttcacgccccgttcggcagagtcaagtgtccgtcgagcttgagtgagatcagcctcggtcagaccgaaagaatggaggacgtccaatcggatatctctaggaagctcgagtaaggtgggcaagtcgagttcgggaggaaaagcgacgggagctatgtgtttgactggttgaattgtcccgttggaagatgcctttaaagaatctgagaatccgaagagggtctggggaagatcaacaacaagcgatgtagctgccacatttattctatacgttgagtaagaagcaaaaagccgtgaacaaacaagcgttgtcagtggacgagctccaggccaggagttcctctccttatgtagacttacacatatagctcaaactctccgttcgggtttgatcccaaaagtcctcttagcaaagctcctatgacgcctccacctccgacgctcttcgagtctgcgttgcctagcatccgatctacccgttcgccgattgacagtttccagtcatacacgaacactggcataagtgtagattgtgagttcttcagacctgaaggtattggcttcccgaacgatcgccgaacggacagacggagggtttcgtagaaccgaacaaatttgatcggaccatgaacgttatctgaatattttgatgatgaggatgtgcaaagtgaagctgactggaccgaatcatcattcatcagttccccttcaagccgaacgaggagagaatgcagcagtcgcctggtctctttcctaactcggacccaatcaaatcggggatccaatgcaaacgaatcctcgacggacgtttgagcagggtaatcgggtgacggtcggataggctccttatctattccatatagaaggtcccacaacgagtcagcctgttgggtaggatacatcgctcggaactgagcgcgcgagagatgttcaatcgtttgagagacggtcagactcagtggatccaagggggggccatcctcttcggaagagagcggaaaagtacgattgagagtagaagcgcaaaggacattctgaatttgtttctcaatcgagcgcccaaatccaggtaaagatctcagttgatatgcgcccgtaaacgctgttattcgagcctgtatctcgtcacttagaggccagtcctcgagcgttagatcaatcgaagtctgctgggctggcttgtgaaccgaggcgatcagcttggccagaagcttgttgtgagagattccggccgagctggttagtccaacgtctgcaaaaattcgggagcggatataggccgcaaggtgagaagcgagctgatagggcacgcagctgtgtcctactatggattcgggtgtaggactggtggaagcggtgggtgagaggatgagatggccttcccatgtataggggatgtaccagaaccctgcgtccggagttgagtcaagctggaaccaccttcggccgtcttgagactctcgtacgtccgatccggcttccagttgaaagagatgaaggtcgatgagtgatgtcacgtcgataaagagctcgtccattcctagtttctctacttgagtgcctactagggacctgacaagtcgaaagacgagccgggagtgtcttcggtagagcgtgagatcttctccattgacaagaatcaactagaaacagaaccaccaattgcgctcagaatgtcagctctagttggccaaggttacaagtttatgatgatgatgggcaaacctctggacctgtgaacgtacgcgtcggaaatcggacaaacgcgtccagaggggatggacgaaagcgatgaaagtcagctctcgtgacgttgtgtgcatcttcaagcagaacgacttgcaatgtttctttgcttccttgactgacatgagctttcctacacctcttgccctggcctcgtaggagcatgtggcaaggatagccttttgctggatcccgatcggcttgcccaagagggacgggtcccggatccgttcactcgagacatcttgtgaggaaacaaaatccttagcaggctgctttatgacaggcatgtttgaaacaacatcgagcgaaccatcttacagaacgagtccagatcgagcgcgataatgatccttctgcctgtagagcgttcggttgtgtccatggtatgatggtatgtgaggcaagatgggtgtgtaggaagaagagaaagtattgaaaatattgggaacttttgtaatgatcggattagaacttttgtaatacatttcctacgttttttcttcttctcttccttccatcaccaactttcgaccatccggcgaacagcaatatgccttctctctcgaaacttcagcggcttcatccaggaaagagtttaattaggactgtggaatcacttggtcttcgtctggtgagtgtcttatcgagcattctggctgtttgcctcgatcggtccgttccgtattggtctcagggttttttttctttttttttttcttcactctcggtcgtttgcctttcgtgaaacattgtttgatcattatccttctcttatctggtgtggttgatgttccgactatcttttctcgacctgaatctccgtcccttcccactcccgaatctcttgccggtcctggctcgctcaacactcatctgaatgactgttctgacgaaacctacagggtcaagataagattcctccgtcgctaaagaagagcggggtggtagtcccgatctggcgaaagaaaaactcggcagaaccccactggcacaaggctaccgttgttctgccccatgtagagcttgttgacaagcctttcaaggagactaggatcggagcattcatgaatagagagtggagaagaaaggagttgagcgacaagtacaagcaccacgaatgtttgttccttttctttccctttctgggtctcatattcttgcaaataaggatgggtagagaagtccgcgtcgaatggtcatctactgacttgcgatccactaacctttctcttcagtcaatcacatccccgaaggtcaaatccgaaatccgtttattccttggttcaacccagttatccgtcggtttgagagtccaatctacaccacgcgcgagcaacggcggttggtagaggaagctcgaaggttgaacatcaccgacgtccttccttccggtccgaaaacgcctccagagtttgcaaacaccttcatggacgtgtggaaggagacagggaaagaacgaacgcggacggagctcgggcgaatcatctgggccggggtgtacaagaagaagctcaatccttggggagaaggcaggttcactgaagacaggttgagtccggaaaagatcaaggagagagaggtcgtcgaggggcttcctaggtggggaccctacaaaggaagacagatcatgttcaagggctctcttccggaacgacaggcgcctgccaagaaggcggccactcaggctaggttggatacaatggatcaggggatcgccgcttggaagaaggtttgtctttctcttcttcttcttcttctccttctctattctttcttccgttctgacttgtctgaccttgataatccgattattcttcttcaccacaggaaaaggcagccgagaaggagaaggcaaaatccagcttgccttattaattatcaaaatacgaatgaaaatctatcctttctttcgtgtttccttctatcctggacttgtctgtccaggatcaaatatgtcacataaagacacaagtgaatggagaggagaaatactgagaacgaaggcatgtatgattgcataagctctttgtttagtttctatcttttttttttcttcagcatttccttctcttctctttcctatatctagttgttcttctgagcctcttcgtggactggtaaaaaaaagaaagaaaagagtataatcagtctgatggtattcgattatctccgaaattcctttccgccaatgatggaaactcaaagatgattgtaactcacatcgatcgttcaaaccaaatctgtttcgagcaatctcgatagcgaagaactaaccaaacaatgtgaacccaaagattcaaaatcattattgtgtcagtgtgaagaaaggaaggagaaatgaggagagaaagggaatcaggttttctcatacctgagctcgcagaacgagagtagtgttctcctgggcgtaatctccagaagcatcggttctgaccagagttccgaagttgtaatccgggaccaagttctcgtactatcaaacacgcaggcggagctactgtcagtgctcgataggaaagaggcgaagaaagaataagcagggtggaatgagcgaaagaagaacggacctccttgacgtagttcctccaggcttcctttcccttgacactcttcatttcatcctcgttgaggactctgagagcggcatagtcgttctctggcgagaccaacgccgggaagtctcggacgaggtgggcgagcatcatgtcgtccactctacacgtagagagcaagaggaaattttaaatgagaacaagataaggtcagaatgagctgctagaaaagaaatgaaagaaggcgacaaactttgtcagtcggatctttgaaggagggatgctggagatcaatttctcataagcctatattgccgttcgagacagacagttgatatatatatcgatttgaaagctttagttcaagtattttcaaggtagaaacagtcaagtttgaggaagacataagacgaacgatcatatgctcgacgacagcgacagcgaactgcttctcgatctactttcccagagtagagaggaataagtatcaccagaggaaggagaaatggacaaggagagagaagagcggtctcagcattcgatcggttgatgagggcgtttcagaagattcatggaagaggaaggaaacacgaacatcctgaaggttatcagctttctcggcgtcaaatggagcggccatgatgagtgtttgttcgagtgtggttgggtgttggtgttggtgttggtatcaagaacgaaagggagaaaaaaatcggtcgtgacgtcggcggagggagacttggaaaaaagactataaaaaagactacgttttgcttataagcttattacgaaaaaaaaagaacattgcacatttaagagccctcgagatcatttgttcttctatatcactcgggaaaaatcacattggattcgattcttttggaaggagatgtatgcgtgcgtgcgtatatatgtatatggatgtgttcgtacggataagctgatattcacaactttgaccaactcgcgctaggtttgacgccctctccgttagtccccaacccatgaggattcgccaactcaaactctgcaaatccagaggcagcttcaacgacttctaacgatgcgtcgggcacgatatgacctcggtcattccttcgagctctgtgtggtttgttcaggagggataacaaacagttagtaagcacgatctagagacgccatttagtgtccataagagaggaaactcacttgaagaaggtgtagttcaagacaacgtcatcaacatcgtccatcttgggatcactatggggtttgagagagagcggaagagaaagtgagatcagaaaagggatcttcccaaaagcgcataaaaacctcaaagtaaacaagaaagaatggcatactcgagcaggtctcggtcgaggaagaagaagacgggaagatcgacttcttcatttgctcggattctttgttcttcgaaacagaagcattcgaccttcgcgaagtagggcgcaatcttgcccggagtgacctatgaatgaagaacgattaggacgccggccaaaggagcaagatgatagcaaagaggaaaggagagttcaagactcacattataagtactgattccgatgacgtcctgatcggtcagattcttggcggtgtagaatgcgagcgcggtctctccaggtcgaacagtcacctcggactgagcaggtttgaattcccagggaagaatgtctgactttgcggcattaaagtgcactttgatccgtcggtcagaagatgtaggcaagagtcgatcggcctgcatcctagaaggctgggtcattggaataccggcaaaaccggtggctccgcagaatgcacggtagatcggtacggccgcatacgaggctccgatcatgacgataaactagaatcgagatttgaggggaaaaatcagagtgaaatttaagcgagtgggcatacagttagctcaggtataacatcgaaagacagcaaaagggagacagaacgcacgacagctgttccatagagagcaagactcttggatcgacgtgtcttttcttcgtaatacttttcctgggtctgtttgaccatccgagaatgagccgcccggagctcttcctgactcatttctggcaacggctttggccgtatcggcgaggatgaggcataccggactgacgaaggcgaggaagacacgaaagatgcacctcgagaactaaaacatcctgcaagtggagagaacgtctttgtgggcacagtcgatcgaaacgaacgactgaccgacggtcggaacggaggaaacacggatctgaaggaagcagccgtcgatctaggaagcgcattctggtggcggaacaagagagcgaacacgaaggtaagtacggcgagtgacctcgacctgagcaacaccaagcacaactcaccaagcaagcccgaggaacactcatcctgtggaagagagtaaaatagttggtcgtcggtgtggtcgttttggtgcaagagggagccgagcaaaggagaatacggaggaagcttgcacctcaaaagtcacgtgttgcctatgattcaaccctggctctttgcgctcatccacaacgctttgttccaagttctatggaacgatagaaagagtgagatgtgttctgtcattctagtccaaccgaccgaccgactcccatcccattgagcttgccatgaacgaagcaggttgaggacgagagccgatgaagagagtgctggtcgtcccggctgtgccgccacagaacatgttctccagcttcagcactcatcttcaacctcactccaactcccaccatactctgcttgctcatcccgcctttgacctcaggaatggcaggatagatggacctgctgcccacaccgatatcgccgctgtttcctgttctgatctttctcgcgctcatactcactggctatctcgctttcaccggcgtgctcgaactcgtcctcgcctgccgatcactcgcccgtcatctccggaccatgtttggttttctttttggatccacagggaagcctgagcttgagaggccacccagaagaaagagaagaccagagaatgatggcgagtctttctgtttttacgttgctcggttatcaaagctaaacccgtgaacaccgtccaaacagctcggttcgtgatccctatgaccgcaccctctccgggatattacctaggaatcgtcaatatgtccggcacgttttgctttctcaattctgttctccaggtgagtatagatctagagtctgatatactgagaggaatctactgtaacgctgttggttcttcttcctttctttctttcctttcctatcaaggccctctcctcgctcacgccttttctcgaacatctgagcgcactctccgacctggccatccgtacagatacgccaaccccgttattatccacctttcttcccgtactctttcagcttctcacaccatcacccacaaaatatcccaggcctcttcggcccaccgagctggtcgaggcgctccgtcagtcagacaccgtcaagcgatccggcatgtttggcagacttcgcgatcagcaggatgcccaggagctgtgggtcttgttgaacggctgtgtcgaggaagaacgcgttgctatcgagaaaaacgacaagagctccaagcttggtatcaagggtctcttggacggtaggggtggcggtgatgataccgagcgagaatcacgggatagaccgtggcagagtccgtttgagggaagaatggcatttaggagaagttgtcagatgtgtggttattcggagggaatcagactcacaaagttcgacagtcttagtctgcccgttcccagagcagtgggtgtttcctttttttttcttttttttttcttcctctggacagactctttttctcttctcctttctctctgacaaaaaaaaacctctcgtccgttttcgatcaaatcctagcggtcaacgacgttggaatccatgctggaagcctacacctcactcgaaatcctgacagactctcagtgtaggaaatgcagagttctccacacgctccgtcgacttcgagcgcgcttgccggagaacgaacgtgaagtctctgagcaagccgggcagatcaagacgaaatcaatgttggcatcgacgaattcatatattccgttggaagacatccttcggtccaacacggtgatgaacgatcaaggagaagaagaggaggagggaaaggaggggaaccggccgatgacaaactcgaaaaagaagcggctaagagaagcgaggaaagagcttgaaagagagagggaactcatcaggcagatcgagatactcgtcagtgaaaacagatgggaagataatctcgatggtgtcgcttgggatctggtcgacggtggaatcagcacaaggtttgtttctacatttgaaacaagaatccttggtgtcgggagcgagactgagcctggctgaaccgtgtttccttgccttgcaaaaacaacacagacaagacatgttatccctcccacctcggatactgacgcttcatctgaatcggtcatcttttgactatcactatgcgtccaagaacgcttgtcaggtcatctatccagcaaaattagacctcaccccattcagtacgaccggtacactatccctctcgcccagttccccgatctcatcctgtgcaccatctgaacctgtcggtctcctctctggtccgctctcgtacgaactatcatctgcggtgtaccactacgggtcccacacatctggacactatgtgacctatcgtcgggttcccttcacagacagatggctccggatcagtgacgacgacgtggcagagctaccgaacggagtcgccgacgtcagacgggccgccggagaggctttcatgttgttttacgagctccgcgaagggaacgccggatcgaaacagcaagcatgtcagcctgagctgagcgggcaaccacaaacaggccggtcatctgtctcttctttcaatatcctctcggacagagatccgtcacctatgacgaacggacacgttgccgtcgacgacgatgcaaaaatagaagtgacctgttcaacaggctatctgtcagagaaaccgaaaaaagaacaagaagaagagaaaagagtcgatgaccgagagcacgaccgcgggtcgactgaacaagaccggtcgagttcaaaaccgacggacgatcggaagaagaagcggaagaaaaaaaaagatcaaggagggactgtaacggagaatttataaacatgtatcttgactatcccgcattctcacgcgttctatgacccagagggaaccggaagaaagagaaaagccgaaatacaaacaagaacaagaaaggagatcaaccggaatgatcaacagcgctcaaacccaatggacccagccgaccggcacgatacgatgtagaatcctcagtcaacagaattgtctcactttcaactttatcatcaatcttttccttcttttaggaaactcaccttctttcgacattcattctttctttcttcttaccgtcgtctttctttctgcctgttggatcgttgtagcccgtgctccattcccctcctgtgcccgcttcgacttcccactcgcattcgctactcgtgttctcctggagagatgtcatcgtcaaaggccatgttttcaagcgcgctggtcgcgcttctcgccgtttccccactcgtgcaggctcacatccaactcgccagtccttatcccatcaactctgccctcaacccgaacacgccagaggccgagaaggactagtgcgtctgtgttttggctttctcgatcgttgatgtgcatctcatgctgattgcttttgattcccataaacaccatcagctccatgacttctccgttgatctcagatggcccgtacccatgcaaagggttcatcggtcaaggctatgaccagggcaccatcccgacctatactgccggtaaatccatggccatcacgcttgccggaactgccgttcatggcggaggttgtgagtagatctcttctttcttcttcttcttcttcttcttgttttctagggtggcgggttctgccgtgttgttctctgggacgcgtcgagtatgagtgcatgagaaactcgtcaaacgtggctggtctttgttctcgtcgatgttgttgccatcgtcgtcgtcgtcgtcgtcgccagctggcctggatgagaagctccctcgctaacatatcaattatgccttgtaacagcttgtcagctctcgctgtcgtatgacaatggaaccaacttccgggtgattgagtctcgtatcggaggttgcccctcagactcattgacattcgacgtgaacctcccatcagccgctcccgcaggtaagaacgtgttgttctcatggtcctggtccaacaaactcggtaaccgagagttctatcagaactgtgcgatcatcaacatcgactcggccgccaccgcacccttgacgggaccgacgatccatgtatctaacgctgacgtcaactcgtgtactacaatcgagggcacccctgtggtatacccgtaccccggagatttcgtcacctacggaggtgaatacgccgggctgtccatcggaaatgggttgacctctggagcaggtatctctgacacagactgttttgctcccggaagtgacggtgctggaacgtcttcgggtggtgccagctccactaccgttgcttccacttcctctgtcgccatcgctacctccacgcctgcagcgtcttctactgccgtcgctcaggcttcttcgaccactacttcggctgccgtgaccgcttcgatcgagccctcaagtgtccaagctgtggcctcctcgaccgtatctgccatttccgagacttctgctcctacttcttcctctgccgtggccgacgttgcctcaagctcggtcgtttcttccgtcccggcggaggcttcatcaacgagcgctgtcgagtcatccgctactcccacttctaacgtgggagctttcgtgtactcgtcctctgacgtctcttcccctacttcaacggtcgtttcttcatcaccatcaagctctgtgatcgcttccacctctgcccccgcatcttcatatgcaccacctacttccacttccgcttctgctgccgcttccaccgccgaaaccgcctgcacttctggtgaatggcgatgccaaggctctgtgctacagacctgttcctggggtgcatttgtcagcatgaaagactgctcaactcaggctggaacggtttgcaatcctgtggatcctgtcggttgtgtttggcccgatcaagtagttgctgccaccgctgccaccactgccgccgtcaccacgacatcaaatgtgctcactacgtctgtttcaagcacgacggcgaccagtgcggtcacggtcaacaacgcggtcgtcaccaacaccaatgctgctcaacccactacaacctcggtgaagtctgtggtttccacgcctgctacgagctctgccaccacctcgacttatcccgcttccaacgccgcgaccacatcgaccacatgtgcggcaggttcttgggcttgcaacggatcagtcctccaacaatgcgtgaacggtcgtctgatgaacctcacggattgtgctctccaggcaggcacagtttgcaactcggccacaccggtgggttgtgtgtggccctggcaggcgacgagcgctcgcaagcgggatgccgtcggccgtgttcccagaggacacggaggcgacagaagagtggttcatggcaagaggagggcaagaactcactaatgttgaagtggtccttgcctttttttccttctgtttcttttctttctcttttctttcgcatgcattcaaattgagggaaagggagaatggacgatataaaggagcagaaagggaacctaacgagcaatgttttcttccttagttactctcaatgtcccctcatcgtttttgctgtccttttcctcaaatctacctttacgtccagtccagcctctgctgatagtcggaatcagaaatcgagcggaacaagagaatactcaccgacttgaagagcaggttctctataaactccagcggttccattctccttcttcctcttcttctcttgttacctttatactttgtctctttggcattttgaatcatatagcattacttttgctcttttattatcgttatttttatcacctcttatccaattcggcctcaggacatatcgcatatcacccctactcactctattcaatgacggaacgtgtttatctctctcatctctctctctctctctctctctttcttctcgtccagctttgaatcgtgttgatgccaatgagggacgatgatacgacatggtacgatctgaatatgaatatgcatttgtgtattgattttactgagcgcgcaaccgagtcaagtcaagcacgattcctccagactattgaaacaaaaaatcaacacgtcagcgagggaaaaggcaaagagagcagaggcacgaaagtaaagaacccacagtgctcgaagtgatatccttgtaattgatcaagggtctggggagacaaccgacccgcaaaccgtcagacgaagagaattcgatcagtctctcatcctcattagaaagtatgtcggccacccatggtgtatccagggttatcagaacactggatgaaccgggaactcacatgctgaacttgatggctgtcgagacgactctttgaatttcttccgtcctgtgaaagccatgaccgatgtagagatccaagatggttgatcagggtcagggtgagtacaaacctgaatgagatgagcaacgaatgtcgaagacgaacctgagagctcggacgacgacagtagggtttttatatcctaacatttcccaaccgccaaagattaagcctctgtgttctctcatccacacaaaagggaagaaccgaggagaaagcaaacgaaccgggtccagcaggctgaacgaccacatcatcctcccttcccagtgtcctgaagaatgatctcagttcttctatcccttttgtcaacccatctggctcgatcaggtgtcctcctgctgcctgctcggctgctcgcttcttcaaagccgcatacggcgaagccggagccgaacttgccgcccctgtggaatagggtgaagaggtcgctccatcatcagcggtaggaggacgaggggccttgcttccgataaggattccggttgagaatccaagaagagtgagtccaaacatgatcgtctttatgctcaacggggtcgcccgaagaatgtccagtcgattttttgtctcgtttgatgatggcagggggacatgaggcacagatcgagatgtcggcggatgggcgtaagatctacgtgcgacagctcccaggcgacttgagtggagaggaagagctcgagagagaacgttcatcgtttggccgagattggtgatggaaggtgatgatgatgatgatgaagagagaagccagacggaagaaggccaggtaaaggaggatgtgtgtagtcacgtgacctcacgatgggatcttgctcacttggctttctcgtcgtgttcagagtcagtggcaaggcatgttcggcctagagttgagccaagcaaaggaggaaggattatagaatggataaaagagacatgttcatcgttcaacggccaaagagaccctttccaactttttccacacaccgcagcgtcagactgatccgtttcatccgcttgaccccgctggagtgatcaccctcggtcgtttccggtttgaacgcttgctgaacgtcccacgagccttcatccggtgcatctagcccgacgagatgtctgatggattgaccaccgaggagatgcttgttggcgaggatcggggcgaccgccttgaaatcatccgtgtatgcatgggagatcgagtgcttccactcagtgtatggcgcgtgttggagaatgagaagtgagcggggttcaagcagaatcgggattgcaggacgcgtcaaggtagctacttctgaagcgagcgagctggccgaagaagagggagtggacggaaccagaggagtggacggaaccagaggagtggagggcgggtgaagccagaggatacacggccagagtagagatatcgtcgtggtagtcgggtagctagatggaaaagtattggtgtgagctcggtgcgatcgaaaagatggagaatcaaacttggcgctcactatgctggtccatcggtgtgaggctgaaaagaaaggaagatgaacagagactcagcactgggcaagtcttctcatcaatgagatcaggaataatgaatcgtacgtcgataccctgtccgggaagatactcgttgacgagtacttggttaggctttccaatctttgcaccttcaaaggcgcctgtagatttgaccttggagatcaaatcggggctacaaagcgaaagagcaaaagggttcagtcggaagatcagacatcgggatgaaagagagcggagagaagcctcacaactgagtgaaaaacggagggagtggctccggaatgagtgtgtttgactttgtgagaatgccgcctagaaagagagttgaaaacagatcagtctgagtggacatgtatctgaggagcgagtgagatctttgatagcatacgaaccccagtgctgtagcctttagatcctgggtgagaagattgatgggggaacgagtaagtccatctgcgcgatcgaacgtaacgggtgtggcagacatgctgaccttcgacctgtgggcaccgtcttccacttcggcaaagcactctgatcgatctgaaggtagcatcgattggaaagactctcactcgtcagcatggagatcgagcgagaactcggatagcgagagacagaccttgttgaccagatgatcttcttcagccggggtgatgaattctggaatatagtacactgcatctgggaacgcatccagcctgtttgcctgtatgtcctccatggtatgtgtatgtgtatgtgtatgtgtgtatgtgcgtacgcgtgctgctgatgatggaggtggtggttggtggtggaagagagtgagtctcgctggatggcatggaaaacccaaagagttcaatctttcttctttcagctgtactctccagcctttctcctcatcgaccgtcacatgtagtagcaacctcagcgaggactctgttgtatacgcttggtctcttgtgttgaatgtctgagcgccgtacgatctgactctcggtgttcatcagaggactcgtgcccacacatgctgctctttcccgcccgatcgtgtagttagccatcgagaaacaaacacccaatgatgatcgcatcctccacatacccactctcctcctcctgctccttctcctaggcgacgagcgatgcacgctgccttgcagtatcagagccatcgtcaaagcgcaggtggtggccaaaaaaattcgccgcttacgcgcttacttctttccgtccgctcagttttcatctttttctaccaacgacgatcatcaacagaacagagagacagagtctttcctcgatcgttcttccttggctctacatcactttccacagaccatgttgatcaccgcgagatcctccttcagatcagtcgtgccgagagctctgcgacagacgaggccagcctctttgctcacgacaaccatccagaatgctcttcccgaaggcctgaaaccgtccggcctgccgaaactggagtcccctctgtccctcctccagacagagctatcgtctctccagtcgaacatctctcatctgctaggctctggtcatccttcgcttgacagcgtcgcaaagtattacttccaggcagagggcaagaacgtccggccaaagatcgttctcctcatggcccaagccacgaatgggctcggctcaaactggcaagaggtcgcttcgaaggatccgaacgaggttgaccgatggctcactcagcgggatgacgtcctgaacgattacaatcctggcatgccagagtccacacggagcttccagaacgttttcatcccttcgtcttcatcgtcaccccgagcgggccttcattcgtcacttaactctccgcttcgtcgctcgccttcgtctcccgcccactccgtccacctgccgtccggcccgttggcttcgttagctctagcagacccgacaatacttcttcccacccagaaacgactggcagagatcacagagatgattcatgtggcttccctcctacacgatgatgtgattgatgtttctcccaccaggcgaggagcaccttcagcacccaatcttttcggcaacaaggtctccatcctaggtggtgatttcttgctcggtagagcctcagccgcgctagccagattgggctcgcccgaggtagtcgagttgctctcgaccgtgatcgcgaatctggtggaaggtgagatgatgcaactcaaggcgacacaagaacctgagaggtcgccgaccgccgagggtttcgacaagtacatgcaaaagacctatctcaaaacggccagtctgatggccaagagcgccagagccagtgtcattcttggtggagccgaatgtgatgaagagcttaaggatgtcgcatatgcctacgggcgaaacctcggaatcgctttccaggtaagcagtcggaaattcgttttttctttcttcttctttgtctcctcacgctctttctatcgtcccaatcgagattagacaaaccaacacaagggcttctctgatccgatcttgcctcttatgcttttgtttattcatttttgtatattcattcgaatgtacatctatcgtcctccacccacagcttgtagacgatctcttggatttcacacccaccccgtcaaccacgatgggaaaaccgtcatccggatttgatctctcgctcggcctagctaccgctcctctcctttatgcctgggagtccaacccgtcgttgacgccgttgatcagacgaggattctccgagccgggtgatgtccctaccgccagagatctcgtcctcgcttcggatggaatggaccgaacgagaaagttggcgcgagagtacgcggaaggagcgagggatttgatcagggatagattgccagagagtgaggccagagccggtctggaggatttgaccgagcaagttttgaagagatgcaaatagatctttagagtttttcttttccttccctcattc

SEQ ID NO: 204 - DNA, 8313 bp, Xanthophyllomyces dendrorhous
aaataaaaggaaatgacgctttcatggaacgagaagaaaaaggaataacacaagagagaaaagaaaagaaaaaccaagaaaagagcatcatatcgttacaaacataggagacggccattgccagtcggaaaatgtatcaatccccagggatcaagaacgctgaatgtcttctgaaggtctgctcgttgatccttcccgcaccaagagcgaatcgtcctctgtctcgccctggtcgttctgaactttctgtccgggtcctgttttcgatacctgttctaccggtggcatagtcacagtccccgaaggattcaccagtgtcccccgcggtagttgaggcgacacaggttgcgaccttggtgacgatacttgagagagcccaccgatcgtgggtgtagtcccaccgcttctaccccgtgttcgcgctcgtggccgcgtaaccatcggtggtggcgctggtggaagcaaatgatatttatactgttttcgtagagcggtgagcggtgcgcttcagtgtcaggagagggttatgtgtgcgttcaaaaaggaaagagcgagatagaaggaacaagacgaacagatttgtatgttgtgtagagaaacgcgatggacgaaatgatctatattgaataaataaaaaacatgacagggcgtccagtcagtcgtctataaagagaacgaggaagagaaaggggagagtgagaaggcgaaaccagatacatagacgaaccgcaaagacaagaccactccaatggataaacatgatgccctcttgattctcaaaaatcgcccataggacatatgtctttttgattcgttcgtccaaatcaacccgttgatcgattgacgtcagtctcatttgtaacagttagaacacacaggcaggtgttgacatatgagaagagaaacgacaacgaacaagaacagcgcaaccggcaaggtcacccgcttcagaggcaaacgcataacctattgaggtgagcgtcaagaataatctaatccccgctcatctgacgatcagtctcactctgttctacatcatttcctcggggacaaagaatgaggaaaagggcaagagaagactcacagagctaaccagacaaatactctggtccatgcacccgcgtgttctttgtgtacatcctttccaaatgcctggaagaacgtgagtaccatgaggactatactccatgcatgctgtcatttcctccccccacaaggcaagcgtgaagcaccatccagaaagcatcagcctcgtccgtcactcgggagttaggacaaagaaaacaaaggggccagagaaaagagagtaaccacaaacatatagagagaacggaagaagtatcgtcacttcgagcagcttgatttcgaactttgtcggttcaggtacgatccgttttctggttcggatgaggtagaatatcgaagacactaggagccagtacagcaaaagaaggcatagagaacgtaacctttcaagtttaaagagcaagtcccagcgtttacctcgaaattcgaatacaggagtatatacataccagtggagagcaaggccaccgagaggaggaatgcaaggatataccactttctgatttgaaagtacagatacgcctgtgacattcgttcaaaacaacatgccaaagagaaacaaaaaggttctcaggtctatctctcatgtccgagcagcatagagcaaatccgagggtcagaaagaacgaaagttcacttacagcactgatcacaccgaccgagacgaatctccatcggatgctatccacaaccaacgactgtgccctcgggaagaactggacgacggtataacctatgagaagtatatggatcactggcctgtatccataacaagttttcagaaaacaagaatattgagaaacttggtttaatcagatctgcagaacggaagaactcagagctcatcgagtccttgtttatctggcggagacctccgaaggtcaagacggcccaacgtctcccaaggaaagcagaaagaaggataaaagagaacgtaccagacccagaacgcgtatttcccaggcgtaagataagtctccttcggtggatattccggtttgtacgaaaactagcaaagtcgagatcagacggccatcagtgacgcgtccgaatcctgccgtgtagatacaagagagaaagagagaaggaaacagagcgggaaggaaaaggaggaagcaaccgacagagttccagatgtgaaatacgacaagcgaccaatatacgatcgagtttgacagcttcaggggaagctgatagcgaagatctgcgagttccatccgctttagatgtatgatcgaacgggatgaggtggttggtgagtggttagatggatggacgatcgttgaaacgagctgatgatgtttgatcttagatcagataaaaatacaaacgtttcttcttgtcgtcaagcctttattttaacttttatttccgtttctctatcgtctttcttctttcgtatctctcttgccatgtttgggtttgctccctgcgtgcatgtccacaaaggaccgtgttttgagtttgaaagtacatgtgtgacatctagaattcattctaataattactggtcagactacatctcttgccactcaaactctcctaccagtgctgttttacttggcagtcgacccatatttgggctcaagatggtaaaccgttttcgagggatatcaatgtttgttctgcaaaagagatcagaaggaagtaaatggagaacaacagacaatgacacatcgaacagacatcagtcaatccatccaacgaaagaattagacgagagaaaagtacatacacgacgacatagccgatgatttcactcttcgcgagctcctctcccatgtcaccttcgacgaccgtttcagctgctaccgtgccctcctcatcctcctccttcacttttgcagattcattgttggcgacagctgtggacgcggatccgttctgcacgatcgacgctggcggcttgatgagcgcgaggacgacattcagcaggtgagactctttagcaggcaatgtggggtcgactttcaccagctgagtctcggagatcgaccgggtcgaaccaataggcaaagccgaagagggagcgatgtattcttcaccgacacgccagatggagaggtcctcaaatttgacggttgtactatgcggacttagaccaagcggattcatcgctgtagcgcctggcagagcaaggagggaaggtgttgagggagggtcgccatagaagtaggattttatttgaagggcttgtgatcggactcgatgggatctatccaggtcaacaacctagaacgaggtaaaagtgagaaagagagagacgggatgaaccatggaaaagaaatagaacatatgaatatatctagctttggctgaaagaagatacgaataaacatacaccggccgattttgaaagtttgacgatcttgatgcgcgagtttgggccaccgaacatgcgttgcatttccatatgtagcttttcatgcccgatgacaaggaggatgttgactgagttagagaagcagaacaagaaagatggtcttaggatgtcaactgaggaggcgtggtttgagagctctaaggaatcttacttttgaacgcgtcaacagcctccctgacgaacgtgtacttttcttttttgtcgccgtcttcggtctttcccaaattggcatcgacaaatttcccgttggtgtcgacgattaaacctgcgctcgccagcggcttgtttccttttcttcgggtctcccatttctcacccatgtcttgaaccagttgttgccacagcctggatctgcctggttgaccgggggtctgatagccgtaccaccaggataaaggcagcagagtagaggaaagagacggtggtggacctgttggtagaggagaaccgaatgtttgagctggggtcgaggttggaagtggatgggctatcggtgtgagagatagtgcgcctggcggagagtgggggccctttttatgttgtttcggatgattgacagaggacggaggagaaaagatggaagaaatcaggatgtaagtagaatgatagaggttgagcaaacacactgattgaacccacctctgagggatccaggttgacaaataacgggctggattctctgcctgcacgaacggtccagttgatcaacgtcttacagaccgtggtcttgccacttccttccggcccgagaaccatcaatctcggactgtcctctagttccggatccatccattcggatgcttctgcctctgctcgttctgcaggtgaggcctgcttgagcgttctcgcccggttggtctgatatctgtgcgctcgaagtcgttggccttcgagagcgaggtgtaggttggagagagcggggaaggttgtctcgtgggagacgtactctgtcgagggagtgcctgctatgtaaaagatccgaatttccatcgatggaacagcatgtcagcctgagatgatacaaaggcctgtttgcgaaaggagagtgactcatctccagttgacaaccttcccaggtgaagacagctgctttgcactcggccatgaaatggtaccatctgtttggtgcgatttccgctccaaatatctccgcctgtccttgagtgagctatttatgagcaaaaaggaggtgagagatcagtacttgtgagtacagacgggtgtgtacacatgggtatatgcgggtgtaagtgtcacagacaggatggacagaacggaggtacaaagcgacggccatcatctgacgaaactctgccaatccggactcacttggatagcgatgaattcggcctgttctaattcaaacctatattctgactggggttctaatgtccatgtctgtgaggacggagcattggccaagatgttcatccagaggtttgactgatggtgatgatgatggtggtggtggtagtcgtggtgacgggtggaggtgacagggaaaactgaatagacaagatttgtagtcgggcattagagaaagcatgtagatttttgtaatgtgctgaaacactacaaacttcgggcggcttcattagggaatttctgtaatcttaatacggaatcgcaaatcgtcattctcactacgaacctttgtaatgctgcactacgaaaggccgcctaatggaacaataggaaatagtctgtagctcctcactacaaacgagccgtgttttttctaatgcgactttccatctgtcttctcatcaacaacggcaaacaagaacatcacgacaacgacgacgacgacgacgatagcaacaacaacgaccaacacaatccacttccgttctcttccatctcttcttcgttctcccaagtcacaggaaagaagaagaggtcactctcagggagcgttccttccgagtcttcagtcttgaatctcccataaaggatagagatagaccatgacacatgcgttactgtaagcccacacgctttctctcagcgatcccagggctgagaacgggttggttgacatatcaaatcgctgatcctgcttccctgtcgtgtctcgggctgtcaaactttaggcttcgactgtttctctctccgttcttcagcgtgcatgttgcaattcaatacctcaagtcctatccgggcaacatcgggatcactcattaccttacttccagactccgccagatgcattcccgagatgtcgagttttattggccccaactctggcaagtgtttatcagcatcttagaaagacattagcatagacagttttcctctgttctggctcccctttgggagatccttcagtgaaccatctgcatcatgtttatcgtttgaaagctaacctcgtcctctccctcttgctcttctctccgtcgcccttcctcctcttgtcttgggaccatctcatcagtcacctgttggtaacacaaccaactgattcagttgccttggaatgtttcattctcgaacgagccgaggaaagtactcattcggccatgctggtaagttgagcttcgtttctccgtctctcttactcctacgcgcttctgacttccggcgcgtcgtcctttcttccccatctatagaccttttggttcatgcaggcagcactgtgtgattttgcattgaccagaacgacaaatcctacctcgttcaacatctgccaacgggtccttctcagatgccatgacattattttcggcgatcctcccttgccaatcctgccatcgacctcgtccgacccctcctcgtcctcttttggcaaacgatcaccttacagcaacgaccgctcatctagagttagcagtaaacattcctctaagccatcgcgttcagaaaccatcctagaaaagtcaacaaacgcgttcaacgtcctgctcggcaagatcggaccgcctaataaactcattcccgggcacatcggagcggccgtcgtcggcatgggtatcattgcggcttcttccccaggtgtgggcacgctaggtcttgtcgagagcgtagggagagttgttatctcccaaggacgagtggactaccagcgtgattctggagtcaaacccaagtttgaagtcctcgatcccaacgccgaccgagacgatagcgagtctgacaatcttgatgcgaaagacaacggaacaggtcaaagctctgagttgcatgcagcgtatataaacaaagagcgagaaagcaactcgagtgatgaagagctctggtctggcggacagacttcaaaaacttctggaccgtccacgccttctgccgcttcggctacgaccccttcgctaccgatcgcgcccttccttctcagacaaaacacggtcgacccgctcgaccaactctctagcccatccccctcgtcttcctcttccaccagcacagtgactccggccattttcgcaaaaggcagatctccctttgctccctcagagtcctcgttgccaacttctatgagaggacagaacagacatcttaacccttctcattcgtctccctcgctatcctcctcaaatagaaatcaatttctctctacatccagtcatccgactggcaggctttccactgatgtccttcattcccactcctccttcgcagcatctcgtctctcattggacccagcattcgtcctaagtactctgccgaaagacgaccaaaccaagcttctcagatctcactactgtcgatccgaagtcaggtttctgttgacactagaagaaatctgcaacaggctgttggtcgttcccaagttggccagagtaagtgcgttgagagcagaactgacgagtttgaaccatctgttgccggccgaggtttgtatcacgacatttttttcctcaattcattcagtcttcatatgccattgaaactgatcccttcgttctttttggctctatctaggtgtgcatgccaacgtggtgcgaggcggaccacgcgcacgaacaaggtggggagacctcgtccggaaacgatcactccgcccgtcaagacagtgctcccaaaccgaaagcgcatcatcgagtcgtccggatatcgccaggcgactcggttgtcctgaactctgcagaaaaagcaccctatcttatccatgtcgaggtccttgtcggtgatcttgatttcgatccagagaaagtcaagaacagagatctgttgaaacggatcgtaggggaaagaatcaagaaccaggagtctgcatgctcctctggacctggcggcatagatatgacgacaaagaagaaagaaggacctcaatcaagtctagggtttggaggcgccaggttggaccctctggtcggaatccattctgggctcgacagaggaaacggtccgatccaatcgctcgcttcctccattcctagttcagaatctcccatcttgaacaccaacttgtacgatgcttcaactgaagccgaagacgaatctgacatcgcaggcggattctcttcacgtcctccacttaacccaaccgagcttgaccggcctatggacgagatggatcttgtcgaacagatctacggaaccgagctttccgcgaaagacatcgatccgtatctagaggaaagaatgccggcggatctaaatccgagaaacaaggcaatcgatttagccgtctggtctggattgcccaccgatccaaaactgatgcgcagaagtggatctgatttgacgcctggaacaaattcgccttctttagcgtcaacgctcgaaacaggggacccattctctactgcctctcatctgcccaccaggcgaaatctcaccttggacgattattcggatagaatgcgcacagcagccatcatgctcgcccagcttaacgctaactc

SEQ ID NO: 205 - DNA, 28156 bp, Xanthophyllomyces dendrorhous
tcactaagcagacagaacacaaactcgagcacaagcacaggaggtagaaactggttgccgggagctagatggattgcttcgaatttccctacaccaaatctttcatctgtcgctccaaccggcacggcgtcttctggatcaggtgtgggaaggcagagctcaccaccacctgcgggtgtaccaatagaacagccaaggaagaggttacctccggccgaggcggaagccatcagagaaagaatcatggcagagatgttggcgctagaggaagaaagggtggacaggatgacagagaaagcagtgggcagtggaggatcgaatggcgttggctcagtcagccagacatctgtaggagggaagatggaggatgaagggatattaaaagccgttttagagaaagctgatccgtccggtgagtatcagcttcttttctcattcggtcgtaggcgggacataacttcaacacgctcatcatatctctcggcttgtctaaacagcggcggtatttagtgaatcctgggcggcgaagaaagcaagaataagagcttcttctccttggggtcatttggcatcatgggatgttagtcttctttcgtatctcattcttgagaagagtctctatgactgaacaatgccttctttttcgactggtctctcaggtattgtctgtgattgtcaaaacaggggcagatcttagacaggaacagttggcgactcagttgatcgaacgattcatgggcatctggaaggaggagaagtcttcgtgttgggttcgttagtaagtcgataatctcttaagttttcaagcccacgttctctcttttttcctttctctctctctcttcttcgctgcttagatgagccttccagacgtcaagccaaatacagatctttggactgatgcatcctttccatcgacggctgattgaatagctttcggatcctcatcactggtgacacgtcaggtctggtagagactataacggactcggtgtctgtacattcgattaagaaagcggagtatggaagacgagttgctagaggaagtactatcaatcatgttagcttgctggatcatttcgtaaacgtcagtccgagcccatttctgtccaaaacactttacatatacttctggatcatgccgtggtttcattgagtttactgactcgtggtaaatcatgtgtatgtttcaggtttatggagacccgtcttcagcgtcgttcgctagagcacaacgcaatttcatcaaatctgttgctggtaaatacttgactctctttgtttctttccttcctgaacaccgttcccgattgacagatgctgagcggtgtttgcatcattccgctgtctatatctgccaacaataggagcatcggtcgtcacgtatctcctccaaattaaagatcgacataacggaaatatcctgatcgatagagacggccactgcatccatatcgacttcggtttcatgttgtctaatagtcctggaaatatgggcttcgaagctgctcctttcaagtttactacggttcgtgttctttgtaatctcacctgttaccttgtcgagggtactttggtcctgatcacatacctcaactcttctcgcattcaggaatacctggacatcatgggaggtatcggaagtcctgggtttgctctcttcaaaaaactcttcaaagaagggttcgaggctgctcggaaacactcagacgagattatcagttcgttctccatctcaacaaaaacgttcactatatgaacacagaatttgtatcctgacgctcactcgcttgtcaattgttttcgaacgataaacagctattgttgagttgatgcaatataagtcgaaacttccttgctttgaagcgttcggcgatcaaactgctcagcatcttcgagaaaggttccagttaggactgactcaacaagcggtggacgatcatctggagaaattgatcgtcagttcgattgggtcgtattatactaggttgtatgattcggtaagcatcttctttctctttcgagacagttttcgagtagcaaagatggtctctaataagggtcttatctgatcgtatattgtgtttgctttgcggtttttagttccaatggctcagtcaatccgtattccaatgattcctctcctgccctctcttgctgctctcaacttccggtagtgctgccaatgtttacatcagctttgattatagattttttgttcacctgtattttcttcaccacaagtttgttttattcaagttttacttttttgcatgataaccatgttctctctcattctcgtatatctcacatcttttcatactattcatttcggatcgccatacggttgaactatcatgacgatgatacaaacggatctgtgttctcccttttctctccactggctcaatcgaagtgaatatcttttcctcagctaggtctaagtttacaaatcatttaaatcaacatgggtatcgtcgaatccattctcgaagatgagaagagaagttcttgatggaaaacagatagaacaaaattagaaacaaagagcgaagtgagatatgcattgagggtagatatagtgcattctggaaacgaaaaaaaagaaacagggaagagatatagcatcatctatctgcctaaaaccgccaactctagcttcttcagtgaagccttcaaactcttcccatccttgttgcatttctccgtcagatactgcgacatctccagtctgatagcagctagttcatcgacaataggtaacgtcgggttgaacgatttgggattgagcagaagatcgaacaaccttgtccagatatccgtttgccagtactacagtagcacgcggagaggaggaaagaggcgataacatggatgagaacaggttatgaaatcagaagagaagatatatagaaggactcactcgtttcagaggagtcgaaatcttgtatcgcttttccaccgtacttgtagagattaaggtggtttctatatatttgcctgtacaacagaaagtccagatacacaagagcgtggatgaaagagcatgaggacaagaaagatcagtcagaatacagcaaaacctatttcagagaagggatgtctctgcaagggaaagggacgactgaccaaagagcatgcagtagaacacgctggccaaaccgtggtaatctgtttggaacgtccacggtctagcctctctcatctccgcacaatctctctgatcaacctgccattcagccatgaacgtttggtctttttggaacaagcgcctgtcaattgctcttccaaagtcaatcaatctgacgcccttggaagaccatccgtcaaccccgtcaggatcgtactgactggaccaagcattcggtccaccgggcacatcgtctaaccgcagcatgcaattatcgattttaagatctccgtgaatgatgtcgactcgatgcagagcttcgacaagcttgagaagctcgacagcaaagaagatcgcaagaagctcatccaacccggcaggaccgcccgatgtagcaggagcgacgccaaaagcagcggcgttgttgacggtgtcgagcaaggtgccttgagaggagtagtcaagcacgaggtaagattcatctcgatagacgtacagacctcgtgtagaaataacagatgggtgcagactagaaggaagtcgagtccgaatgcgatcgaggacgagaccttcccagatcgaggctggtttctcgacctttagcgcaaccatcatctgctctccttcgtcttcgttcaaagaaaagatgtccaatggtttgttggtcaaagccaagaagaccgacccaaacccaccttctccaattttgtctcggacgtcgaaagtctcgtccccaagaacgactgaaccaaacaccgcaccatccttatcagcgccactcttgttgctgccgacactggctcttctgacgcgctgcttggctgtcttttgtagttgatctagtcgatccatcacaattgtcgatagatcgtggaatccgggtagagaactcaacgggggttcaatcgacctcagaaagctagcgataatttcttcgtctagagggttgcatgggttctggaagttttccgagccggggattccaaaaaccggctcagcgggaggcgtatctgattggagggacaatccgaacatatcatcctccataaagtttgtcttgggccttgattcttctagcagcggtggttgaagagataaacccaataaatccccctcgaccccttgaggttcgtcaatcgattgactaccagggattaacgcgtgcgccatcgtttcctcctcttcctcctccgcaatatcgaataagaggccctgagcagggataggcgagaacgattcatagtcaggttcggggaccaacatgatcggaggttcctcgtccgaattatcatcctcgtcatcatctgaatcatcatcctcgtcactgatgttgccggcattgaacatggacatgacatcgtccatggcagctttagtgttgattgtaggtgatggccgattaggacgaatcttggcaggaggcggaggtggaggggtcgatggggccagtgaaaccgataaaggcgatgaggctgatggggcagccaaagtcgtagctgaagtttcaaatataggtggagcagaagtatcaaacacaggagaagcaggagcagctgacttcacaggtagatcggcaggagagttaaattccactgaaggttcagcctcatcttcagatgtagtgtcaaataccgtcctcatctctggttcggcgaccagcatactttcaggtgcggattctgtttcaggttctgggttaagatttggtaccatctctactgaaggctcgacctcttgctcctgtgtttgaatctgaagttcgaacatcggtggggtctcttcatgccgagaatcaaccggagaagtagtgcgcggtggggtaggcgcagaaattacaggggatggagaaacgggaacatcatcgtaagcgttagctggctgaggtgttgtagaagtggaagttgagggagcagaagtaggagtcaaaaccgagccgagttcaatcacaggtagcggcgaggaagatggaagaggagttggtgaagatgggagctgagcctgttctacaaaaaattcgggttctggttctgattttggttctggttctaatcttggctctgtcacagagcttgacttgttaggagtagacggtggtgtctcgtctcggaagatagttaaacgcttggacgacgtctgaggtaccggcgatgacggctgagcagcggtctcaacgatcggctctggagcgggttctgagactggttctggggctggttctggaggacattcgccttgaactgaagagggcacgatatgttgaacaaaatgggagaatatcaatagtgaagacacaacaataatacacccgatgccactacggaccttgcttaacccaatagtccctccccaaacctagaagtcccattcgtctggctcgtatctcctcaaatgtccactcttttccatccctgtaaacttcgtcccaacagaattttctactctctggcttgcctgccttattcaacggggcggtcctgtctgggacttcccacttagtgaatcgagagagatagccagtcgacgaccccaccacggtttttaacgatggctttcgagattgcgttgtagatggcatcgtggatggaattgatactggagcagggaccggagcaggcgcaggcgcagagggaccaacggcgtaacgagagctcgacggtgccggggttgaccgcatgtttcgaagaggatctcttgaaagagccttccattcaggaagagcatctgaccggggatgaagagagaacacatcgtcagaggcttggtgagtgtttgatgtggcgggcgcgctggtatcctgctacccggaaaatttgatgaatgagtacagaaaaatattaggttttgctattctttgacgatcaaaaatttgttcgaactaaaggaaagaggtcgtttgcgcacctcgtctctgaagatttcgatcccaccaaaccctctttccatcttcttccccaagacaggtagcgcacccgctcggttccaaggcacactttctctttcattttcctttctgcctacatccctcgtaccgagctctccgttccatcctgacctgtcatcctcagccggttcatccccaccgtctacaaagattgccattgcatttttcttcccgttttctttagaagaactacccattgcccctccggcagatgctgatagtgtcccgagggcagttcgactcgtagtggacgacgacgatgaagcagaggtcgtggaaggatcgccagtaggcagccgggattgatagtccttgtttcgaactttgaaagcctcgtaccgattttttatgtgtaagagtggtttggctcttctagcgattccaagttgaagagttgactctgcttgggagtatctgtagtcggttgagacacaaagaggaaagcaatggtgagaaaaagcagcgcaattatggatgagagagaggatggactgtgaactttgacagaaacgccattgacaaactgaccttcccatggcctccaagacttctgcgtagatctcgtaaagtctggcccaatcagtcccaatttctctgtcgagcataaattcgaaaacgtcctgctgtctctcgactagagaagcgtagcagatccatagatctagataacgtttttcctgatgaaacatgtcgtcggagagtagggaggatgtgcatcgttcaagaagaggaacaagaatcgacgcgttgtttcgaccggatggatcaagagttcgaagccgagcaatatacctgggagttttttggccgatgggatgcttgtttctcgtcaaactctgcaagatatcagagcgatcttaacagaagataaagtagcacgaaccgttcatagacactcaacggatcagccgacatggaatctaatgggtttcccaaaccatcgacttcctcaccctccgcttccttcctcctcctctcctcgacctctgccaactcagtctcgaaagcctctttggcctctttgagctctgcttctacctgctttctcttggtaccaaactgtgtggccatagcatgtgcggatctaccgatggataatggttgaatgttttctttttgagcttcgatcgctgtaaaatcagtgacgggcgtggcagccggatgatcttgtgcttgggattgcccagatcccctagcaggcgtcacatctacctgcatggtttttagttgatcgttcgggttttagccttaacggattagagtatcgtttgtggttgtgattgcaagagagaggtggaagcgtttcgttcgttcgctcgctcggttgctcctggaatgttttgttttgctctctcggtcaccagaaaatcagtcgcgtcttacgtaatctgacggaaagacatgacttattatacaaacaacatcatagtacacccaaaacttgtacaggagagaagcgaacaacatggttgtacaacatgatggaacaaaatcaagatcgggctatggtataggaagtgaacgacggagggcaagttgtgcagaagatcaagcatctccggcttgtgcaccgatcgggtttccctcgacgtcgaccttccggcgcttctgaagataaatgttgataaccacggctatagccgccgtggtgatgactataaaagttaagcaagatgtcaatcagtcatctcaagctattttgtaagagaagaattcagtgtggaagatgggaagaaacaaagaactaacaagcggtggtgcatccaaacccgatgggatactgaggcccattagtactaggccaaatgtacgatccgtaaattgacgcgctattacccagcccattaatcaatgcaattgagatctagtacatccacggacgcaaaaatttgagaggacaaagaggagtcaagtcagattagcacatgtgtcttgaagagaacaaactgagaagaattgaacgaacagctcgactctctctatcggggaagttctgcagagcgtaggataggaacaatgggcaagcactccacactccactggctccaaggataactgttttgccaaaaccccagtcagctggttagttttgtacttcaatcttcctttgccaatgttcgatagaggaaaccagatgagaactgactgaaagcgtatcggactgcagacgtcttgaccacggccaccacgatgaaacacatcgctgcccacatgcagcaccccatgatactgttcacattcaagacaaaccgggaaatagtttagcaaagccatattttcgcatgtatttatattttgtaagaggatagaaagatagaacacactggaaaggcttctcgttgaacttgtctgcgctgaatccgacagtgatagaacaaaccaagacgacggagtaaatagggactgtgtaataattcgcctaatcatcatgatcgagaaattgagagagagagaggtgagtaatgttcttgctaatgagcgagaaaggggcccaaagatcataccatgactccggtatgtccaagagtcgtcatcagcgtggggactttaatgtccaaacgaacacaggtcaacttcagtctcaaaggaacttggacgcatggtatggaagacaactcacagaagtaactgattgttccagcgcccataatgcccctgtattgatcgattacaagaacaaaaaaacgggttagttaatatttaaagaggttcgacgagattgggtgatgatttccaattgatgagacttgcatgtatccctgttgatatacgcgcaaacttcagctgagaatacaatagggattgccaagcaggcccagaacgtaaaaacttgaacgtaccaaggcgagcaaccaagttttgtaactcttgactgccttaaggaaagcttgcatgtgggatagcgacggggcatcggattcttctgtcttgagtctctccacggcgagttgtctttcttcctcgttaaggaacggtgtgttgtgtgggaagtcgggtaaaacgaagaacgcaatcaaggatacaacaactgtaaagttgacaaattcgaagggttgaggaacggaccaaatttggtgagagaaagagaaagaagaagaggtatacatggacgaaccagtagctaagccttcaactccaaagagccatttccaaccggcaattccggcggtgccgtccatatttccggtaatagcacccgcaaggagacctccgaacgctccggacatcatggcggctgatccattgagaaccaagagatgagaattgtgtgtgatatctgggtcacaaatgagaaagagaaccgaccagagtaaaaaagagctagacgcttcgagatctcgtatggcttgtaccagcctggatcgtgttgtcaagacagaagaaggaaagggtcagcagggagtactagcccagaagaggtagagggcggacagactgacaagacatcaagaaaattactcccggactggtaatccagatgaaaacaaccaagttgatatgataagaattccgttttccgcacatgaaatgaacggagtcgaacagaagaagatatagaagaacgaacaagaaaccagcctcgatgataccgaggcagaatcggagagcgaccaaacctgagtatgagttgatacccatggctgagacagtcatccctccccagataaacatgattcctggtaagaagatcgatggccttgaccgggaaaggatcatgttggatgggacctctgatttgaagtgaggaactatcaggattatgatctgtgagaagaggcgaaagatgactgaggatacataccagcgacgagataaccaacaaactgcgacacaaaaggatccaggataatagtcaacactcataccggtagcagacaaacagaaagacagaaataagattcacaaagatactgagcgctgtggcatacatcgttgtagacaatttcaggtccgttgacattccggcaacctttgcgttcccgatatttgttcgactgagagacaatcccgcatattaaaaaagacatttgaacagtcaggtgaagatgatctaaaaacatctcaagggaagagaaaaagaggaagagggactcactcgatataattcaaaacatacatcacccagaacatcggcatcaaccgtttatcgatctggcagactcgcgcaaacgaacaccatttattcagctctatcggaccagggcgcaaattgaaaagatggacagagaaaatcgaaagcacaactcaccttcctgaccagtctcttctcctcctccgacctttcgaggagaaccgactgtcgatcgacagaggcgatatcagaatctgcataatctctctccggatccttctttggatcgctttctagatgctcgatatggaatgtctcttgtttggttttctcgtccatctgtatggtatggatacgggtgtactgtattctgagtgtgtgagagaggggggaacgagtgagtgtgtgcgctgtgtgtatgtgaaaaaggatgagaggggaaaatggaccggatgaagggaaccaaatgaaccagatataagcaagagatgtggacgattaatgattgagcagaacccgatagacgggttgtttccggaggtccaatcagccgatatggaactctcacgagccagccaggtctcaagatcaaactcggatactctccccactgtcggttgtgaggaccggacaagatactagaagagcatcaaaccgaagattaatgacgacgacgacgacgacagcggagaagccattacaattgaccgtctgtagccgacgaataggtgtatgtatgtctatctccgatgtgtgctaaagcatagaaaagaagatcaaggctaacttagggtcgacaagattatcggcctaatgatttgccgattttgccggccgcctgttggcaccgacatgctcagccaaccccatcacacccggtctgggctgtcgcttgttgaagagatgctggatttccgcttcccggcccggtctatagacaaaggtgccaagattgattctgttcaagagatgagaactcactcttgtccatcttctgttaaccgatcatggccgaaaccggatcgatatccagataatgttggttttatccgagaccgcgactggaaagtatgattggacagatatacagaacaaccctacatttaattcatgataagaagtgtctacaaagttccaataatcaagtaacagatgagaacgatatacaagcatacacacacacacacattccatgcaaagaaggtgatgaatccatagcaagcagcttctcgagaacaacccagttcttggatctattcctcggcctcgtcttgactaaactcgtcatcgtctgatgaaccgtccaacagctgtctctccctcaaaagcttaatatcctgagaaagcgagattgaagcatccaatgcgatccttatttcctctttgtttgtttcgcgtggtaattatgaaaaggaaaaaagatgaagacatcagtactttaaggcttcagttgaaaagggaagacttcatcaagagggatttgactcaccacacgtgtgagcgatgccatcccaatactcgccatacttttctaacccactcaacagaaccctcacattggtccagatgctctccaattctcgttccaccttggccgggttaaactcgttagccgtctggacggccaaagagagcagaaggaagcagtagatcgaagtcgtcagaccgcacgcacaaagaggaagcgccttgggaaagcttcctgtaagcgctatcgatgccgcccgatggaggacctgtaaaggaacagaaagccccgagttgtcagtccaatgtcgtgcactaggtcattttctcagaaacaacagaggaaaaacaaaacacacctcaagtcggacgaccgaatgagcagccatcgatattctctccaaactcaacccgggaggaaggacgatgccagctctgtcgaccggaatatccatcgactggccatccgtcgccttgatttcagacaaccgagacaccggcttcaacttttcgttcactccccatggtctgaccttgccaactcttgcacctgtgcctaactctccagctggcgtcttccagcccattatcgatgatgacgacggcgacgacgatgacgacatcatcggtggaccgagcaagacggacggtgtcctgttgttcaaacgcatgcttccggctactgggtttagagacgacgaaggcgaagacagatgggcagggaccaaaacgtccgagtttgtcatcgagttcgagcatgtatgcgattgtgagtatgtctgagagctctgagaggttggcgtgtgggaaggggatgcactggagtcggtccgcaatgtcgaaggcgacgattggcgaccgtaaaaaccgtatggtccagactggtctgccataggttgatatatgatctgttgctgttgctgctgatgatcgaaatgactcgggaatgctgcctccaattgatgttgttgtagctgcgatggatacacctccggctgagctaggtggtgttgttgatgagacatatcaagatgataaaggccctgcccatatgtgtttttcgcttgatacggttcttcttcttcttgaaactgaaatccgggggattcgaacgttttttgcatcgactcaaccggatcagacaacttggagtcgatcaatccgacttcatgtgggccgctgacacctaagactccgtctccgttgttgggtcctccttcatttagaagtcgagaccacatctggctggactgccagaagtcatactcattctggtacactgcaggcggctgaacgagcgcagcggcgatcgagccgttggcgaaccacggcaatgatccatcaacgacgtagcctacattgattacctcggacgattgctcgtatgggaaaacttgagattgatcgttggacgggtattcagattgttgtcgttgataatgatcattatgtagttgcggttgttgttgttgcattaatggcggcgatattaaggactgcgactgttgctgctggtgacgctgctccggaaactgtgatgactgttgtggcaacgtctgctgctgaatgaaactattctcttccgactggacgaacctattcggtgacgtcttctcactggccaacgatgacgatgacttggttgattgtcgatcacttttcgtgctccccgtactccgactactagaaggcttgagcatggtcaacaaagctccgggtcgttgagcgaccgtatttgtcaacgcgctcgatctgtccagactcggaagaccacacattctgagatgatgggacaagcaggccttgggtgattgacctcttgagaataaaacacatgcgcagattgaggagtatgacataccgtttcgagaagaatgcgacttctggtagagcgtttcgacgatgaaggttgatctctgtactacacaactacaaatatataaaaagaaagaattgttcaaaagggtaacagtgagccactctaccgcctctaagccagatgaagttgtgaaaaaaaagaaaagatggagagaagattgactaacgagcatgaccgagttgatctggaacgttcgtaccatatcggcctccggtccctttcctccttttttgagatctccgacgacttttctctcctgctctcttagaataccgagcaccgtgacatccatctcttgcatctctcgttcaagttcttcccgtttggctggagtcaaagtgttttcttgatcgatcggcttgccagcgcgggtcagggtgatctcataagccctgcaaacccgacgaagcgcgtcaaattggttggcccagatctattgaataacaaagagaagaagagaggatgtcaaatcaatactctacgagagcagtatggataagaaggcagattggtcagaagacgaacgtctttgcccaaaggagaaaccgggtaggccaatttgatccgggggtcgaacggactgatcggaatttgcgtagcggccatgacggaagatgtatacatctgaccgaaacatacccagaatgtttgtcggttcatcgctcgatgccattcttgatctgggggaaactctttgtctttatcagactcgttgaggcctacgagagacaagagggagaaaggaggcgtatatgtcagttcatgctcaatcaaatcgcgccggtctacgcgcactatagaagaagaagaaggaaaaggtgagggaaactgccaacctatatcaagcatcaattgaagagttgtattttgtcttaatctcatcatagtgacgttaccctgtgacataagtggacggttaatacagagaaatagaaatcgcaagaaatcaaccaacagaacgatcacatcggcttttttttcattgagcccatgaaaagacaaagaaaaaggacaaaaacgaataggtctactaaccttgtgagcgaattcatacacggtcaacgcgatcaacgcctggatcacctccaacgggacgtcctcatcggtcctgccggcttgttcgatcgcgcgttcggcattcttcaaacatatttctgcccactgctcacagttaccccttcgcatggccttacttcgcttggagagtggatatggatcggctggatgaggccataatgctaagagacagaggcagccgaacaagaaagagctacccgttcgagaagcgggacttatattggatgagggcgattgtcgaagacctttcggtgtcaagtctatcggtccaaagtgggccgccagggttgagaccgagacggtccccggcgggggcaacacaggaaggaagcagtatatatggtcatagtaggcgttgagtctatgagaatacatgacaggggagcttgagtgtgggaaaactattaaagagatgcgtcgctgggaacatgaacgtacacatcctcggtattgcgatagatgagtacgatgttctcgacgggagtatcaacaccatcatcgtcaccggaatcgtcagaaataggttgggcacttgggagacggaaagactgtgaggggaaaaaaagtaaaaggaaagataaagaaaagaggataaggaaagataagccatcgagagtttcagaaatgtaagacctgtcgcttgtcttgctaaataatataatagcccagacaaaacgcgtttacccactttaacgttctcgagtttttccagaaacaccttgagcgggtctggctcctgatctgatttgcgggaagcgcaagagtagacgagccatacgagaagggtcagaaagtcgggtcatgatgaagatcaggttcatagggatcgtagcttgatccgtcagaattgcttactagatggtcgttttctagatccgccgcgtttagatttaacgtattcgcacaatatgttcctcttaacgcactttcaagagaagacgacaagcacggatcacaagtcagggcaaagtagagtggcctagttgtcatacgagaagtatggcggaggtagaaacagatggacctaccccatcgcaaactggctgtttcccatcgcatttggcttttcttcctctacacgccaggcaagctaatagagtttttgagaaacgaagacgaacgttcagtctgcttagttggtctgaaagaggggtcggagtgaataagacagaatatcatggactcgtacagacctgctttgacgggctgcaccctggatctgatggccgatcgaccgtccacagatgataaatcatgagaggtgaaacttgcggtcgagtacggatgggatctatctagcgggtgtgtcatggttgtgtccacacgaacaaagctgactgaacggaagaatatatgtgtgtgtctgaatgtgagagtgtatgtgtgagtgtgtgtttgtatgtagggaacggagagaagggttggatatgcactcgtgagagatctgttgagaagaattaggatgggatgtcttgagtctcaacctggtcgagtgttcataagaatcgttacgttaccgggatggtgagcgagagattgaggggttttcttgtgagaagaggaacagagagctgggtaaacgagtggagggtagaagagagacagcagagagatgagcgcagcatggcctccgaggcacctgcccgccaggatagaacccgcagcgtgaggtgacacaagctttaggattgtccctggcgtttaatgagccctcgtctgaaattgtgccctgtcgatccttgacgaatctccaccattggctgccgggcaaaagtgacgctcacctcttctcccgccggccagccgcagggcgtgtcgaggttgaccgcatggaccgtgcagttccccgaggctagactcggagttgattaagctatcatggttcctgaaccggccccatcgctcgcctgattctccttcgcgctctcatgcctccagttcaatcaccttttcgacctcgtccgtctaccggacggacgaccgaccgaccggagcagtttcggtccgacaggtctgatccgacaaacaatccggcttggttcgaccaggcttgtccgtcgagtcgaccatggcccatttgtatcagttgtggccatcatatgttcacgaaagaattttgaggtgttgtatacccttgagttgagctgaagaattgttgattcaataaggttttacagtacatgatgggacgtgatataagagcaagagccccagacggtcgagtccaactcatgtagggtgagcagaccctgtgggaaagataaagagatccatgaggagaaggaagagaatagcaagcatcggttaagaatatagggtacaacaaaagtctaatctcgtcggtcaacataacgcccttcatagctcgaccctctgcatcgtcctcatcggacgatgtgtccactcgccattcgaccccgacatggtcccttcgttaccttcgacttctcccgactcgtttagctcatcctctccatcagatgacattgcctctcccgatcgcttacgtggacgtgagtcagtcggagacgatgctgacagtgaatgaacacttgctcggtagattggttcatattcctatcaatcagaggtcaacgatcagaataggttgttgcgtccgtatactcccatacacctttgctctagaacgaccgacctttagttgattcaaaaatccctacacacgacataatttgaaacatgttcaaaaccagaatcagccacactatgtatcgtcgtatgcatatatccacgattggctacaaaaagaagagagaggaaagacacggctagaacttacctggttgagactcatacaatatcgcctactctgcacccacctgacagcatcctcgtaactcaactgcttggctaccatcacataccctaccaccacgctcggcgcgagtgagattcccccgttacaatggacaaataccgtccctccacgagagattgcatcgtcaatgaatcgggtcgtctgagggaatatacgtatcaaattttgatcctatactccagaaagccagatgtagtttatcgtggtttgtcagcacagtgggggtaaaggaacctccaaaagagtatcaaaaggcctaacctcatgatcagagatgtccaacgtcaagtaggtgaacctatctggaaatctcggtttcaccagcagagcctccttcttgtccctgatgcacacactgccaagtttccgttcgttcatttagtcgcagagtcaagccaatgtcaacatcaagccgtgtgtatatctggctcaaattagctctacgcttccggaacttctactcacatgtgagttacaccatatcctaaaagcacatctagctgtttggaagtctggaacggtccgaggtatagctgaggtagaatcagttgggcttctcgtcgcatctcgtacctagaccaattgaattatccaccagaaccattcaaaaggtaaggttcaataagaatcagtgaaccaagtttcaatatgtaggatgaaaaaagtgaacaagcaaggggatcttacttccaggtatctatcggttgtccaacagctacgtccggaagaacaggaaacgaagtgttgtaaagtttgtttgtatcggaagaaaccaccgtctgataagaattagctgtcgaggtgctggcccggccgtcgtccatcaggaaatccatgattctattgaatgcagatctgggttacgaagctgcaatgtcacgatttaaagttgctcagatgacgaaagaaaaagactaatgcacaaacgagagacacggaagcgacggatgggatggatggttgtaagtttggatgatggatgtttcaggttttcttatttcttattttcttaccccgaaggcaaaatccatttatctttcatctcacaaagatcgtccgtcgttctgttcttctatcaggggtctctcgcttcgtctcccatgcaagccgctactcaaagacgacgagctcagaagctagcgtccgcgtccgacagactcctcagaccgacatcgacaaacactcctccaccaccgccctcgtctctccgttccggacctctccgatcggctcggctccggctgatttcatccgctttcgtcatcgttgtcgtcgtccttgcatccagactgaaatcctcaacgagcaagattgagagatatgatctaggaataggtcaaggagaatgggttgtcggtcggttcgacgaatcttacgcgctttgtggaggaaaaggcatttggacaggggtcgaggaggagaatgaggagtgcatggtcgttgataagaagatggttgtggatgtggggacctatggtattcaccttccttcctctcctctcaatgcaccaaacacggttattgttctgatgacaccatctaaaatctcggtttttggataatctcataccgaacagatcacgtacgaaggcactggggagatcaggagtcgttaggtccaccgttgagcccttcaagtcaggctcctctatctgttcgaaagcaagggataaaggtctacaagctacctaagggttcatctataactgtatgtctcgccattttcatctcaactctcgatggagagagaaagctgacggttggttctgttcatctgcggacaatagccgggtgagcttcatcttcacatgagatgatcagtctcatacatcgaagtgtgctgtctcatggtcagattgtgcttaatcaacaataaatttcctctttcaaggtttggttgattctcacggtcatatcacagaatacggtgtacgtgtatccattcttctgctccttcctctggatcatatatatatatacatactgatcgtctcaattcggaaaaacataaagtattggaagagcgcggtcgatcttataggagcaacctcgatccatggtgagccttttttgacgataccctgatgtcattcatcatattgacgcgcgatgtgcttcttctccgtttatttaacagacgttgtacataggttgagagaagcactttcaaaagactctactagtaggtttgttttctatcgctcgatcattcatcttatttcttactgacctcgtttatgttggtgaccttagaatcttccgatgacccaacgcgatggatagaagggatgggatggaatcagaatctgtggaaagaagctacgttccccaacgcttcagatttggacgctgacgacgctcgttcgtgcttgattgctttcaaccccttttgtctctcatccactctttgtcaagttctactataaactaaagcgttcttctcctcttttgatctctctaacgaagtcaaaggccggttcatcgtattgaaacgaattgatgcgcatggtgtctgggtatcaaaaggtttgtactttatcacatcagacctccctgtaatacatgcgcatcttgctcatccgttgcttttctttgtccttctgtctaaatagctgtgcttgatctgatgagccctctccctgacgatgttgaaggaggagaaataattcgtgattcgtttggaaaccccacaggaatttttctggtttgtgtcttttctctttctgttgttcgagagcattggtgctactggtcatctgatcattggtcactatatcgattgatgaatttatggtcatgttcgataggacaatgcgatgaaactcgttggtttgttctttgtaatcaacttgcttctttttgacctcatggtttgtcaatgtttagcattcaggactgattttgaactttcactttaaaagacaatattcggccaccgcgaactgaacatgaaacaatctcttacatccgtagaaccatcctggatggcctgagactcggtttggtaggaatccacgacgctgtccgtatctcgtctttcttctttaatgattcaatctggaggcgcaacatctgctgacgtttatttctcacagggaaccccacttgctgaagtggaaacgtacaagaagtgagtcgacttcctagtttcgagtgacggatacggtctctgatctctcatcaatcatttgccccgaaggctagctgcttccaacaaccttccgctcagggtatactctatgctaacttgtccagatagatcgaaatgtacgttcaatctcaagtcggatttgcgtcctggttgaattctattcacttgacgtattctgcgcatcagactgtggaaaagggcagaagagggttgattggaaggaatatgatggccgtttcgtcttgcgatccgtcaagttggtttcagatggtgctcttggcaggtttgtcttctctctctttcctttcttttcatcttgcgcccggacctgtgcctttcaaaccgatgaccaatggatgtaaacctggaacgaccattatgacaaaccagttggggtgcggctatgcatgagccatactctgaccgaactgacggatggcggggaattatgcttcagcctgaagaaagtttcaaaccacttgtcgctgagtgggttaatgcaggctggcaagtcgttagtctctcttatctttctttatctttttttatatttcttgaacatgtttctcctttctcctctttattcgaagcggagcgaaatagactgactgtttgtgaatcacttagaatatccatgcgatcggagaccgagcgaacacagccgtgatagacgcattcgaaaatgttttagagaatcagaccataagaggagagaacgcattccgcttaaggatagagcattctcaaatcttgacagagagggatgtaaagagagtcgtcgatttaggaggtatgtggttcaaacccccattcaaccggtatcaaacaatacattaactaacaatgcgaactctcgtgggacttgggggaaatgatcttagtgatcgcaagttatcaaacaactcacgccactgtacgttgacgaccctttatgtcttgtcacgtacctacaattcactccatcgccaaattctacctgtgttattgatttttctagtctgatatggcttatgcagaagagaagattggactagaacggatgaagggcgcatatgcctggcaaaccatcctctcttccggcggtcgaattagttggtgctcttcttttcgagcgcccttctccttctatttttgactgacaccttctccccgtttgcgccaattagctctaggttcagattttcctattgagtctctcgacccgttgaaaggattctattctggtgtgactagattaaatgaaacaggggatagtcctcatgggaaggatgggtggttcccgaaggaaaagttgacgagggcgcaagctatgaaagggatgactattgatggttcgttttctttcttctcttcagtttccactgttttgccctttcttcattcctatgttattttgtagatctatggtcgagtcagatcgagcatgtaagctgaccatctcgttaactgacgcatattaattatcagcgaattacgcatccttttccgaaaacatcagtgttcgtctgccaattttcctttgcaatttcacagtcctctcttcccctcttcatctttttttcttggccttcctaaaattttctttgtttttttataataataaaaattaatgtgaactaaccgatacagggaacgctccgccctggcttcagggcagattatgtcatttggtcggacgatctcatgtctgtcgaaccaggattcatcaaaaacctcaaaccacttgttacagttcgtgccttccctttgtttttctcggttttttttgtcctttttgtagcttaccccgtctgggctcgatatggtcttgcgtgctaatgattcgaacttggtctgggcaatgagaaaaggcgatcgatggtcaacccgtttgggggtctctttaagcgctgtctttctctctgtctaaactgatgttgatgtcggcactagattcaaccgtcagtacgtggatataatgaatgaactaaattttgaaattcacttggacgaaagagttaaccctaactgaagtatctaacattcatctggttgacgaaccttgatctctgctatcaatctatcctttgtatctttatatatccagtttttcttttctcttcttacctacgcaaccccactttcagcctcatcttggatgatgcaagaaacagactgaaagagaagaggagatggaaaggttcgagaagggaacggtttgtgatcaccttccatacgggatccaaccaagtagagaatcagaaaatcaatcaaataaggacaagaaagattttcccaaagagaagaaaagggcagagggaggagaaataagaacaggggatagaaggcagaggaaaggtggaaagaaataagtgggaatcaagtggaaggaatttcaaggagaaaggaagagattaagaagttcgtacaacgcttcaacgatcgctaaaagcgtgaaccagaaaaagatgatgatgacttgagagaggaaacatgcaatgctgcccaaaggagttttgatgggcaaatttggttggtgagacagacagatcaaggattgggttcagatctttgagtttttctaaatgaaagaaaaaattgaagaattctgaacggaaatggggatgggatactttatgaagagacgagaaagaggaataaaacacgtcaagagaaagaagagagaaggaaggaaggtaaaaaatgacaaaagaggaagaaaaaaaggtcgggatagaataaaaccaatcgactgaggcaagcggaaagagagattaagcatttgaaagtacttcctttcttcatacagtagcctgcttgatagcctccttggtccatttggcagtgtttcttgtctcgctgctcattcccttccctcgtccggtcttgatggcgacggtgatccattcttggaggagaagatccttgatctgtccattggggaatgtgctggccaaatcaccgatcaagccaagcgcccctctagtgatgggctcacttcggtcgtcgtcctctaacgctcgctgggcgaaagccaagatattctgcacgtgtggcaagagaagacctacggtgtgtagagaaatttcaagttaattcaaatctagtcggttatcacgcctctaaacacaaacaacacacataccttgatcctcggttctcaaggcagaggcaactccaacgtaggcctcaacaataccctccctgagcaaggttacatactcgatcaggtcgaacgagttcggatcgggctgcatctggccggcctgctccaacacggccatagtggtctcgacgtacggcctgaatgccggtccgatagctagagcgatatccccgaagcatgacaaaatcggcggcttgacagatcggtggagagactgggactgcaggtttttcaacaaggccatcatgaactggtcgcagtacggaacggactgagagccgagcgctcggcaaatatcaccgatcagaccaacggcgattgagcaaagctggtactcttcggtagcatcaagcgcggtagcaaggtaggggaggaaggcagtaatgtagggtgcgaagtcctgatccaatgcagaggtcatagctccaatggagagcaaggcgtcctcaaacacggtggcctgctttccggcggtatcacacaaggagagcaacacagtcatgattcgatccgaaagcggtcgaatctctggtccaagctttcggatgattgaggtgatcacactgcacaagtttccctgaagctcgttccagttgttcctgtcgtccgttccgacgagctggttttgcatactaaggagggtctccattcgggacaatacctcgagcgtcacctgggagacaatcgagagggtatcggtggcactttgggtgacaaaggtggagatggcctcgtaggcggacgttcgagcgttggactcatttgccggggcgtacttctgagagacccgcatgagcgcaccgacaacatgctcgtagtaaggtgagaggggggtggtcgacggcaacggatcgtcatccaatccagttccaagctgttcagccaggttcatcagcgaccaacagcagtttccgacaattcgactgctgtcttccaaaccaacaactagcgattggataaggtttgggagatgaacgtcggtctggatgcagtcgatcaagacgtctgagattcgaccgagtgtccaggcggcggtgtccttgacatgcacatttgggtcctgcatcatctcgatcaaagttggcaaagcctgtgcgacaagtccggcgaggaccttggggtccggtccatcgaggatggaaccgaaggccatgacggcggcctctcgctggtgccaaccctcgggggagtgatccttgatgttagcctcaacgaaaggaataacaggggcgacgatgtcgtctccaacggcctgagcaagaagtgagagacaggtcgaagctgccatcgaaacgttccactcgtcgtcatcggcatcttcctcctgctgggtcaacaactggagaaggacaggcagaatttgaggaagagcaatctttgcaaagttcttgctctctcgctcgggagcctcgttgtactcggcggcctgaaggatgaggggtgttgtagaatcatcagtacacaaacttgatactgaaaagaagtgaaaacagatgagtctttacctcagcggcctcaagaccaagctcgacttcctcgtcacacactgtcgaccagaattcaatagcctgcaaagcgaccttctcctccgggttcctcattcctaaaacggtaagctatacatgaagaaaaaagaagaacgataataaaatcagtcactgcctatctgaaagggaaacccgttgacagattgaagacgtacgccaaacaaggcctgctccatgtagaaagccatcttgtcatagtagagttgcataatcttgacaagacactcgaaggctccgactaccaccgggatcgaggcgttctgggtggcctcgcagacgacctgcatgatgtagtttcgctcgccctgattatgaacaaaagaaaagcagagtttagggatttgggttccattctttttgtcatggtatttgcgttcaactcgagagaaagattcgattaactaacgtctcgctcaaagttgcttcggatgaattcgagagagttgaagagggcgttaatggcagcgttctgaacttcggggcttggctcctcttttctagctccctgaacgacggtggtgaggatctcgttagactggctctcaagaatctcgggtttctgattatgtgacccaaagggtgatacgtgaagacatttaagatgagcaagcaggtcgcataggcaattcaagagagaaagagaagcagacggtcacttaccacagcctcgcagatgaaaccgatagtctggagggtagaaattcggagtccggtgtttgcctggtcacccatgaactggaggagaaggccaatcaactcgggccactcgttgtgaggaagctcaaccgctccgatagcagagacaacttgggcggcaaaggaaccagctcggacgatgggagagccaagcgttcgaaggccctgctccttgacctgagctttgacctgaggagagagcgaacgccatcggtaggtgaactgggcttgacgcgagggatcctgtgatgataagagccgagagaacagttcgtgataagagaacgatgagagaagagagttgagttgaagtgtggacgtcgactaagatgtccataagaaaagaatccactcacccttgctgacaaagcgttcttgatggccaaaccggcggcatttctcacgcttagttcggccgactcgcttgagagttgctccgtcaaggtgatcatgtagccatcctgatagagaagaagaggaagtgtagataggaaggaaaaaaaaacggtcgatcggatgacattcagtcaaaatgatcaaattgataaaggagaatcgaggaagaaagagaagacgacagagaacatgccgaagagcagatcaagatgggaaggaagaatattgcaaggagaaaagggttctcacaaagttctcgttagcgaccttttcgagctgctcagttgcctgttgtcgagtgtgggcatctggaaggaaggagagaaatcatacatgaaccatcgtcttgtcagcgttctgctttcttctttgcttgtcagttctttgggttgcagtaagagcgagagagatacaataaagagccgcaaatgagatgacttgcctggtgagagcgagtgagctagtaattgagcggcgtccatgtttttctcagagatcaagaggagagtgtatgtgtttgtgtggatggataaaaacgcaaggactgaaagatctgtttgagcgggtgaaacaatacgggtgttgggagtgagagagagcgaggggagttgtctgactataccagacgatggcagaccacagagagagacagagaaagagagggaaagaaagagaaggagctgagaggatggaagtctgggattggggttgggatcgttgctgatgggcaaaatctaggaacagaaccaggaacaggaacagagggaaaaaaaatcaattcaaaaaaagatttcatctatctagtttgtattttgtttgttcgcgtcgactatatattctctacagtcctctatcaagaagcgcgtagagaccttaatgaccttagacaagactcgtcaggaacgcttccatcgtcaagtcacacaattcaggagatctagtcgtccttggtgatcgtcagtttccgagagtgtgggtgtgtgggtatgtatgttgcagaactagaggaaaggaagaggaaaggagagacgatgatctttagagcgcgcagatttacccatgtacccatgcacacatgccccatcgtacaacaagtcatcaagcttgatagttagcagtcgagacagacagttgaaggtgatcatagtggttagtgtaccttgtgaacgtcatgttttgtaaacgtgaagggatagcaagagagccagatagagtgaaagtgtaagagtttttataaacttatacatgttcaatgctctgattaggcttctcatagatcgttcgaagcgttgcgcttgttgtgtttatcccatgtggccatgcactctttctgaatcacaagagtccgtagatcgaagcagctcataattcaattgactacggtttctgtttcattctctcctcatgtccgttgcagagaactctgtgatggccacacagaggtgaaacacagctgtatctgagcatctacgttcttgaccttgtacattgcttgctcgttcgtaggctttatatctatatactcagccgtatcttctcgttcacctcattcgttgaatcccttactgttcttcccatgcaacagagtgatctctatcatatcttctgcttgatcagttgtgggtaagatgatgtccattgtatacttacgggcgttgtatggccggtggtcacacatctgctgctggttatgcctctcacccgtaaccaatcctcacgttccatcccctctggttctttccatcttgtttcctaaagcctttgaccgtcactacacgcttaagcacatacacacacacacacacacacacacaca

SEQ ID NO: 206 - DNA, 18586 bp, Xanthophyllomyces dendrorhous
acacacacacacatacacacacacatatatatatacattatgtctgatagagtaacaccccatccgctttggtttccttgatgacctacgattccgttgtcctaaccgttcatctcgacttgatttcattgtatagggccgtggtgcaccaagaggcagaggaggcccatcatctcgaggaggaagaggagggaaccagaatgcaggaggtggtggaccttcgggagagaaaccaaagagggaggctatccttgacatgggaaagtatgtcgacaagaagattagagtcaagttcaccggtggtcgggaaggtgtgttcttgattctttcgaagaatcaactcttcctcattcctcctcttttggttcttgccctcttgttcttcattggaaaattcattgatcagatttcaaccatcctcattctctctcagttgtcggaaccttgaaaggctatgatcaactactaaaccttgtcttggacgacgtggaagaagaagtccttcgtatgttatccttctctctcatttcgcgtcaatcttgaacctctcaaacctcgtcatcgtactcattcctgataaatggacctgctcatcacataaacggtttctatcccagttcctacgccgcatacgagatctcttggacttgtcgtcctgagaggcccgacgattgtcctcctaagccctatggatgggtcagaaggctcgtccgctttcctctcttgtatctgaatttcagacacatattgactaacttttgagaaggaaaacgattccctcgtatgatcaccctctgcttttttgataaacagaaatcgaaaacccgttcttggcccctgagtcgtaggcgcttcgatccgatgattaggacaaaaaaagagtggtatagacgttagagaaggagagaagaaaggcacggcacatttggtcgcctttctcggtagaggaggaatatgtggtcatcgaacggagagcatagacaaatctggttggacttggtgatgaaaccgaacaagaagaaaaatacaaggtcatctatggaatctggagtatgatcaaaagacaagaagagaaatcctatagcaatcttgcttcttgctcgcgaataagaaaaccggaatgtcaaacgaacagaacaggacgaataatctgaaagactcacacgaggaagcaatgattgaagttagaacttctgttttgggcggtcgtcagtcgatgatcaacgatctatcaacaacggctagactcaaggtctttgaggcaatctgcaaagtctgctgcgtccattgatttcaaagtatctagacgcgatagaaaagatgatagggaaatcgtatagacattcttagttgtggagagcttctcgtgagggacggagaggtacaaggtagtaaattgtgaatcaaactatcatatcatttatgtgatcaggccagaccagacaatttccaggacaaaaaagcaagggccaaacaagcaaaacatgaggtgaattcagatagatgatcgttcgcgtgacatgatttcctcttggatgaaacagaagagaaagaagagaagagatatgcacaagaagcctgaaccatgcgataaaagacggtatgcagatgtaattctttggtaagtgaagtctctcgtgccttttttgaagaaaaaaatacagtacaaagtttctttttgtttctttttattgttctttgtcttcggtggtgtacaaacagacatggaggagatttgaagatgtgaatgatgtaagatgggggctaaaagaaaaggagagaagagcaaaggaaagaatgagaagaacaacaacagggcttcaacggccccctccttttttctcttcacctgaatcgacctttctccgcaccgcttccacccccagccgaactgcctaatgtagtcaagtcggtagcagaagcagaagcatgcaactccaacttgcttagagcggtcgaaatatcgaaatgatgagccagcctactagcagccgtcggcgtatgtgatgtcgtggccaccatccccattcctctatagtcatcacctgctgctattgatcctccacctaaactcgctcctagactggaacgtggtcgggagcttgatcgggagagtgaagacgacctaggaacagcgaatccatgttgaaatcgatgataactggctgtagatccgccagatgaacctataggtggtgtggacgttccgttgacaccacccccaccggaagtaccggagacaccctcaccaatagcaccagcgttgttcaacgccgcgttgatcttttccaacggtaacggttgactgacggattcaggtgagagcaacaacgatggactcagataagccggctcgttcgacgaatcacctcctacaaccggtcggtagtgtaaccgaggggatgtgttggcagaagcggaaaccgatgcggtcgcgctcgaactaaaaggcccaagaggtccagcagatcctcctaccgtagccgccgaaggaaacgtaggtgaagagaacacgctggtactactattgctgtggttatggttgtggccgaggttgttgacatgatgactactactactattgctgctaccacctccatttgctccaccaacaccgaccaaggaaccaggtgccccggctggattgcctaccgagctgtttccaaatccaggtcgggctggtaatccatgagaacttccagggatcgacggcattgttgttgttgacgacgaagatcccgtcgacatcgaggatggggcatctgagggtaaaaatccagccggaccgagtccatcctggtaaaatctatcattacctgacgagctgccagctccgttcagatagattgactccacatttgccgatgacagtccgaatgttgagccaggtggtggagtagagattgctctcctagctgctgaactggctggcgaagttgatcgaataggagagtaagccccggtcaatatctgttgtcctgctccagatccaacggcaggtgaaggagagagaccggatcccagtttgatgttgttgattcgatttccagttcgacctctaacatgagtcgaacctggcacagtaaccgattgtctgtccagactagtaccgccagttcccctgttgaatgcatcggagaaaggaacagacatatccactggtgggattgaattagcatacattccgtactgagacccagtcgatcctgctgatgcagcagcagctacagccgcagccgacatctcgggtcggcctctatcctgaacttggaatgtgggtgacgtcgagagatcttgtttaggcatatgttgagaaccacttcggctactgatagggatcccatttgatgaatatccaccagaaccaccaccggatgtacctctgggtcctaggtccatacctaagccccttccacctgtattactgctgccaggacgagaaacacccatcccactcaattgggcagacctacctctgggcgagccagctggggagtgcacaggggagaacggactggatacgataggcgtatatggttgacgggatgtagcagaggcagagaccgatcgataaaggtttccatttgattgatgatactcggcagctgacaaatgtggagatatcgttgatgatgctgggaacgggaggtactgttttggaggtgatagtctatcaacgtgctttaagacaatggtaacacgatagaataaatttgtgagcatgtcacccaatggagctatcaagagaaggatggaaagaccaactcggtagccgcttccaaatgcatatggactccgactccctcctgcaggtgatctagatctgggtgcgcgcataagctcctcgtctctctctacggtcgttttgtcatcgatgagggtcttgtaagcactctggttggacaagatagaacgaccgaagagaacaaaggcaaaccttcgcataattgagctaaagcggtcaccgctctgcctggtcgagatgtcagaattcttgatgctctcatgaactctcctcgtatcgtatacaaaccatcctttgtcaccgttctggccacattctggttgaatcgaatcagagaacaaacgagattgtcagccaattaaattcctaaccaggaacgcgactttcgatatcgattctttaaaggaagagaggaaaaagatcgtcctcacataggatgtctcgaatggatcttcgatacaaagtctattcctgtctcgactcatctcgttcagactacccacatcgctatctgtggtccacatcttgctctccttcgttaacaagccagctcggatagagaccacgtcggtgttgaaagcaaaattttgacagtaaaatttaaagaagtcgatcaaaagttcaccaacggactggaagtttgcggacgaccattctttacgcaacagctacagggatgaagacatatgttgtattcgcaggttctataagtaaaacgagaataacaaagaagaaggatcgcaggggaatcagatctgcttacctcagtatcatcaaagaaccttagagtatcaacaagaaaggcttgttagactcagattcgagggcatgcatgtgttgattgcaagagacagcagatgaaagatctttcccaccaaatattatgaccatctagctcgagctcttcttttgttttgggtaccagcggtggaatttgctgaagatttggtaacaccggtgggttttgtacgtgaataaggaagaagaggacgagaagggtaaacccgtaggatgagagtgtccctcgatagggtgagttgatccgtcgtcgtttcgaccagactttgatgaaaagcaccattgttcgaactcgagcaggatcaatcgtactgatatcgagagtcaagagggtacgaacaaggaacgatcagactcatgtgtgacaagagtttcacgatctcggatgattggcaatgactcacgcgtatgtcagtaataaccgagtattttcaagagcaagtcggttctcgaagccgatatcgcactatggagaagatgagcagagcgaaggtacaaacatgatgagctatcgacagcatcgaggagcgcgtgaacagataaagtgaaaacaagaaagaaaaaggaggcatgtcgactgacagcaataccgaacggtaggccaggggacggggataatgtgagtttaataatctaaagatgatacaaatagaaacaagcttgtcagcacgtcgtcaacatttcttttctgctcatactcggaagtaggatattgcaataagaagaggacgaaacacgtactggaacataagccttgggcagggccttgacagcaaagtttgtttctatagaagtcgaaagcgtaacaaggcaagagagtagagagaaaggaggggaacacgtgcgattagaatcatcgaatattggcatatcaggactagtagcaagtactcgccttgttctagaaggtggccgatgatgttgacgagatcgcttgccggaggtgctgatttggcttcgtctgaagatctgtctaagagcacgcagaggtccatgtctgtgaggtatgcaggtaagcgagtgtaaggtataagatatcatgaaaagatagacgaagtaaccaaccgctatttcttagagagaacccattagcctgataggatcgcagaaggaagaggaagaaaagtgaggaaagtacgtttagcaggtatattgattggcatacgaaacaagttgtgagaggatgttttaagagagaaaaaaagaaggacaaaaaagagctcacagtgctaccaaaggccagtagcctggctcccggctcgacggtacgtataagcttttcgatgaggacccggacttgctgctttgtgttgagctcttcaggcgtggggaggagtgggagaatgactagagagtgagtaaggtgatcgttcgacggaatggtccagtcattatagaggacagcagaggggacaggagcgaaacgagaaacagaatcgaaacgagatatatgtgagtgatttgagactcgtgataagatactagagaaacaaatagagaagttccaaggcgagagaagacaacggtaacagtggaagcgaacgagagagtccggtcgagaggtatatacccaaagtaatacgcacagtggaagagagaggtcgaaagctcatcgagatagcgctgtttggcttgatggacctgcatatggaaagagcagagcagggaagaagagcctttggtgtggtcttcccaatgaataggagatggtggtagtagagcaggagagaaagaatcaacaaaggtagaatcaacgatgctcgagaggtgtggcaaagaggagaaaggcagtcgagattgaaggtgacgagaaattagagggcgtgttttgttacttggtcgttactactttgggtgagctcctcttgtacagacaataccacagtgtgataccatctttcatctatcaagtctctgccatagtgtcagtcagactcttggagaaacatacctatagacttgtaccaaagtatgagagctatagaacgacgggaaatgcttgatgtataagatttaagtgttccgtcctcaagcgcaagctaacagccacgtacaaagtatcatcctatccaaccttctatcttattgtcccattcggcatggtctctcaacacgaaggccggagagcgaatcgtattcaaggcggacaaattctatatgtcattttgtgactgttatttatatggtttggaacgtgtgcatctatccaactcgaataccttgattctagtgcctcaatggcatgttcgcaagcaacggcgccttctgactgttcaggcactcattcaaaacaagagatcgaagaggtccgttgggtgcagaatacatcagcgcatccatcccgatcaacccttacaacattctcgtcagagaaattagcgatctaattgatggtgagcagaatacaacaccaactgggtttatcttatcccattcgcagcaaacaggatagcttctcgttttaatgactccctactctacactatcttcttatgagctaaaccggtgcttcggtttattgttcttctcaatgggcatctagcttgcgatcttctagttttcagtagctgcttcctctccgttcagctctattcctcttacttctgccatcgcgacagtatttgcttatgagtacgcgcacaattgcattctgttcctcaatatacgtttgatatggacctccacaaactttttgtagcgcttcatagtttccgagctggaatcatgtcgtgtgtgtcatcttttccaaagataattatcatcatctcccaggcgacagatacaggtgttagaacactcgctttgcgcgctcgaacattcaagaaccattgttcgctggtttgaaagctatatgagttcaagatagagaataaggtcgtagacctctatatatctgtggtaaggatgactgacggtctctgaagcatgtgtactataccgttatctccggtgttctctttctttaggagtgtgtctgcaaactacagccctttgtagtttggatcagagatctctggtttgaaagtatctagaagattttcatctgtccgtcgtgtatgccaccctgaagtctaggtctgcgagcgacacccctatatgacatggctcattgactctctatgccatgttaattccggtgggatcaatcatggcatgatgaagtgccccggatctgttccgacggctttcaacgcacttttctcttctctgctgttctcctctctctaccgtactcccctctctcttcctctcaacggcacctggattgctatgagctgttggacatatcacacgagcaggccccaggtgagacacttttacgtaatctgactgtaaacccagttacaaagggttacaaccctctgacagcgccttttcccatcatctttacgttcttcgttttttcctttaactctcatctttctcctccaacatcgtccttcgtcttctttcgtcttgcccacatctagatcatccgaacgcatacatcccagggcatcgtcaaataggtctaactcttctcctatacctgtcgtatccgtctccgtttttcttgtcttttggttttttctccatctccacccatccaagacacaatgccatcccgtcttcagtctgaacatctctcgaccctcaaggccatctttcctgattgggcagacgatgacttgttgctcgtgctcgaagagtccaagggtagcatagagagtgccgtaggaaagatttctgaaggtgcgtactgaccgtgtacttggtgtctcagatctcgttctttttgtctcttgtccttttttttcccttgttccttttctatcaccttcgcttcctttttatctctcgttatcctgttctttattgattcttggcacttctttgatctctaactgacccaactggctgccttttttcaactttcattggctgttacctcgctcgctccttcgttctaatacaggacaagcttctcagtttaccactgccacatctcgaaagactaacaagaaggcaacgcccaccgcttcatctactggttcctcatctaaccccggtcacaagccggatcagtccgcctcctccagccgaggaggcttcgagggtggcttccggggaggtttccgaggcggtcgaggtggagctcgaggtggtggtcagtcttttttagactctttttccatgtctcatcttcaactctcagcctttctccttacttttctcatctctaatcttttgttctccatttatttgatcattcccagccggatttgctcaggctagccgaggtggctttgctggccgaggggccttccgaggtggagctgggcgaggaggatacacaaactcgacccgagcagccccttcgactcctaacggaacgtcaactgctgctcctgtggcccctgtcgaagaaaccccggccgcccctgctgtgatcgctccccaactacaaggtgtatgggctaagccaaagcctgctccggcagctgctcctgctccggcccctgctccggcccctgctccggcccctgctccggccgctcctgccaagaacgaggttccagcgaaagaagatgcaacagcagaggctgatggggccgctctgagcgagaccgtcaaggaagcaacccatgaagagagccccaagtcggaagagagtgagaagaaggatgaagaacctgctggacctacagcggccgccaagggcaaggcagtggttggaaggacaatccctaagggaacaaagatgtcgtgggcccagattgcaaagtgagttctgtttaaacgaaaagtaaccaattcttagttatcggcgctaaacaggagacgcgatcgatctaaaaattaggcctcaggaaaagcccaagccgactcctccccctgctcctactcctgctcctgcgcctgcgcctgctcctgtctccgcccctgcccctgttcaatctacccccgccgttgaagaaactatctccgcgcctgtccaggagtcatcatctgccacgtctcccttggttgaggacgagccggaagagtccgcttcggcggttcctggtgatgacacctggcctgctgccacatctagcgaagagactgccgaggaggcctcacctgaagagatcaaggaagagactgatgtggttgatgctcctctgcctgaggtcgacaacttgagccccccagccgaaaccggtgctgctattgaggacactgagatatctgcccctgccgctgccgagcctgtctctgaggccccccccgcttctgctcagactttcctcaacccccctcctggatttgagcccttgcctacgtcatctgaagtcgccaaggcaagctctcctgccgccgcttctcctgcacctgcttccagagcagtaaaccgaaacaactctaagcttcgacagtttggagacgaagccgttgtcatgcccggtaaggccactggtggtttcggaggaattggcatgcagtttggtagcttgagcctaggtggtgatggtgagctccacagcgaggagtcgtgagtcttgtttcccttctctctctagtcaagctgagctgattttctggtacaatactgatatcgtgttaatttgtccaaatacttggatacagtcgacctgagccggcctttgctgctgagcctacacccgcccctatccctcaacccgagcctattcctgcaccggtcgctgcaccggtcccggaacctgtccagcaacacgctccccaaacgatcgagcctattcaaccccagcagccgatcacgactccccaccagtattcccagacgaactctagcatgaacttcttccaacagcccacacatacgcctatcaccagtgccgctaccgttgcccctgttgctccctcgcctcagcttcaggctcagcagtacggacagcatcagcaacaccaccaacagcagcaccaacagcagggacttgatcagcagtcgacctactcgcacgctcctcctggtggattgacgaaccagaatttctacagacaggatactctgacgccctcgccctactacaacagccagcagcactctcagacgggatcgctttcccaacagcagcagcagttgggtgccccacccgcgttgagccagcagtctcaggatcactcccagcagtacggagccagtccgtttggaatgggcgccggaagtggacttggaggttatcagggttaccctgactcgtacggagcgatggatcgaagtttctacgacccatactctacattcactcctcagcgagtcgaggccgagcctactaaggcggcttccgctcagtcccagagtgctcagatcgcttctcagtcgagccaaccgcctgtgcacagccagcatcaggccgctgcttctgccggtggttactacaacaacatgcctccttacaacccatactgggctaacaacaaccgtgagctcttgggttggactccttctttttttttcctaagtgtcgttcgtggttaattgactattcttccttcatccttctatcaatcagcctatggttactacggtcagacccccgcttgggctcagcagcaacagtgggctcggccataccctcagcagcctcctgcgccggctcctaccgggagcgcatccggtgtaaagcctcctagccaagcgcctagcagtggtccgtacggacacttttcgtcttcgtatgaggatcagcagcagcagccgtcttctctcggcggatactctagctcgaacctcggtcaaggtgggctgtcctcccagtatggaggaatccattccttcctaggcggttcgcccgcccctcaggtggcttctgttcagtctaccggtgtcaacaactctcgacagggtcagtcttctccggagacgacctacaagagctaccagcaggcccaggagaagcaggcttcccagagtgcgagtggtggtgctggacagggacagcagcctggccaagtgcaatcccagggtcaggcgcaagctccccagcaacaggccggacagcaaggtcaacaacagcaggccggacagggtggtcaacagcaacagcagcaaccccagcagggttctgtccagggcggagccatccagggtggtagccgaggtggtggaatccaccagccaaactcttactcttcctacggaggaaatgtttccggttcggccggtgctcggggaggagctggtggtggataccccggacagagcgtcgttagcggagtaggtgctcaggtcggacagggcttgccgcctaacgcctaccaaggtcaacagcagcaggagtacaacggatactattcccagcgacaatactggcagtaaggggtaggaagcgctctggataagatgagagacgaataagaagaacaagaagaaaaaccaatattttttgggaaaaaacaacctctactccactctttgcctttttttctcattttctcattttttgtgttctctgatttttatctttatatctggatttgtccgaaatatcatctgttcttcgtttccatatcaatctctctcttgctccttactccaaccaaatttttctcccttctctcttctttatcccatcatgtgctctcttcttttgttactactttttcttctcgttcggcttttctttcaactttaactcgtctgtaacaaaggtcacggtttcgaacgtctcttttcttctcccctctacaaaaaaaatacatctccgctttcctttccccttatccatccttttgaagaaagaagagaagagaaaagaaacgaaaagaaaataaagagcggaagaagagagagggagaaatgattgtttgaaggaaaaataagcacttcggatcatgtttcctatttagaagagtatgcgccggatgtaggatgtagagtctgagttgacatcggaccgagaaaaggaagacggtggtagacatcgacgttgatttgtatacgaacatcagatctcaaacaaggagttgaaaacacgctaaatgagcataggaaaagatggagagacagacaacagagacgggcaagggagatgaaacttatcaagatgatcatgaggattgatgatttcattgactgaatgactggaaggacagatgaaacaatagaatataacacgaggacgggactaatatctttctatctttccttaccttaaccttctttccttatgtcatcctccgtttatccgtcttgctccgtcttgctccgtcttgctccgtcttgctccgtcttgctgtctctccatgttctggttctgccgacgcaggaagacgaaacgaggagaacggatggggttgacatctgggtatcttcttttacagtatataccttatgaactatcatgcaaacagcggcaaatagaaataataagcacagaaaagaagacaaaagggccaagaggcattgaaagcgattgccgatcattcaggacgcttctcacgtgcaatcgtggcttgccccatgcagtgggtgggcaggacggggcttactttacacaagttaattatatcttattctatcttgttatattacattattgtcaatttgaattttttatctatctatccattcacatatttgcctaataatctgtctgaccatccgtctatctacgtatttatttatttgtttacctaccaacatggtttcttatctgtttgtttatcttttgtccttttaccccgttcgtcatgatcttcccttgcgattcggttcgatcacaaaagaggaagggatagcagcgacagaaagaaggtaattgattgactctgtatgtaatgcaactgaccgttcagatgagagtggcggttggagacgctctaccctttctactcctctctctttctggctaaaggacgctgcttccctcctttttttctccgttttttttttacgagtagctcagtttcctgcggaattctattcgatcagattgctctctctatactcttcatttcatttttcaaatggcctaggtctatccaacttgaattcaatacgttttatctttattccttctccgtctcctgttgatcggatcggctttgagctcttcggtctttttttctcctccgcgtgtctacggaggtgtgcaaggctgggggtgagaggcgtgtgtgtgtttatgttcagaggtggacgtcggtccttacgctctcaggtaccatctctcccccttccctttcgacctcgaacggaccactcgtgcctgaaggcgtgagggaagtgagtgaatatgtgtgtgtgtgtgtgtgtgtgtgtgtgtgtgtgccccttaatgttctcttctctcctctctgccctcgccctcgctctgttccttgttcctatcacaattttacatccccacccccttgcccttgcccctcttcatctctgctcgctacccgccgaaagtgcgtcggtctggtttcctgtcagcattctcttcgcttataaagatgaacccgtccgtctgagattgttttttcttcttcttctccttccttctcttctcatatatccatctcctgtccacaaatatactcacccactcacccagccactcatcatatgctcgcttacccaccgttaactaaccatctcgatcgaaatcaagcgcatacacctacccatactcagccggcagccatccgaggagatattgacagctttctatcatctcgctccagagtcgttcacatctcgggcctgccaccggcttcagtcaccggcacattcgacagctcgggcgaaaaattcatcagcagagaggcactcgtcgactggatctctcagaacaatgctcgtgtcattcaggtctggggggagagacccaagacaggcgatctgttgatgagctggtgggtcgtctttgaaagtcatcaacaggtcagtcgccccagtgatttccgacgttccatcatctcttctgtttttgctcattctctgtcgcatctacctccctttctctccaggcccggaatgtccttcggttcaatcaaaccatcgccttcaactgtcgagtctctgtcctacccgcatcagaatcggatcttcggccgttcgagaagttagtcagaatgcccgcccgaggtgactatcgagatagtgtgagcaactcattcgttcttgatgtcgccatcaccaccaaaaactttaccgctcacacacacacacactctctctcttctcgccctggcagactaatttgacttcgtccggcctgccatgtccactaaaccccacactatcatctccaccaggacctactttgccatctccgccaaagcatattctgccggaccttgctccgtcgagctcattcgaacgaaccccctcgctctcatcttccatctcgtccggctcgtcattgatgaaccactcttttactaatagaggcgcccctccattcactcctcgcccgccttgggaaaccccagaccttgttcggtcgtctccagaacagatagaatcaatctggccagaaactctatcagacgctcttccatcatcgtcgtcctcacctggtgcagtcgtaagtatgaagtcttctctttcttttcttatgtgcgctcacacccgccgttctgataccaacttgtcttgtttaccacctatcagcagtggagatctggagactggatcgtaagctcagtccgtacgtttgtcagcctgttcttggttcgcatactaacgtatacttcaatgtcgatttctagtgcccttccgatacctgctgtacgtacccgtgagaactatgtgcccgatggccagatgcctgaacattcgactgacagaattctgtcctgtgtttaccacttacccaaaaaaaaagccttccacaacttttctagaaacgatcgttgcattgtgtaagtaagcgtttagacgtatcaagacacgaccctcacaccgctcatccttctttgctcctttcactttagctgccactgtgctaaaccgacagctatctccaccagaactcaaagtatcaatcatcccatagcttcctacaaccaagcacaaccggaatcgatctcgccagctcgaccaaacttacagaagacctatccttctacctcagtcccaccatcaccaatgtttcccggaatggaagcctttagtccgctcatgggctcctcattccgtccgcttcacctctcctcatctgcccccgactttgaaacgtgccttcgtgtgaacgccccgacgttcagcccttctctctcctcaaagattcgcccggtctcgactggtggcaacgtgtccggccagtcagtccttggtcagccgtttctcccctacgtcggcggtcttaatcttcaaaacattcaaactattccgacgaatgaatctctctcagacagaagggactttgctctcggctcgaccgaaggaacaaaccctaacattatgaaaagacgcagtctccctcgcggcttggagttgacaggtctaggagagattccagggagtgcttacggacggttcgaccgggcacgcaaatctatacaaaacatggacactggcgagaaactacagccagtgcgttctgagtgttttgttccgctggtgttgtacgacctgcccagctgaagactcgcgttctcgtttctctgtggttgatttagatcctgaatactggaaataccggtccgatggtttttcagccagggtaagtcgtctgagttctgtctgctcgtttcgtttctttcttatcctttttcagtagagacgatcttaatcgctctactttgggttcgtatacttctgttatccagcgactgggcctgtggtgaatgcggtttcgtcaattggcgaaggagagatcactgtcttcggtgtttccctgctgccaaaggcaacgaggtggccgggattgctatcgccacgtgagtactgctgtatcctctcgtatgttgtgctcatcccatctcacaactggtcgatccattttattttactttccctttctttttctctacagatcggtcatgatggccaaccagttggcacaggacactcctcctatccatcgaccgaccccaacgcttggttcgatggtttcatcacccacatcgatcacacctcaacctggactttttacaaatgctaccttttctggaccaaaacacgctcgagaagaaagcttggacatgacccaaaagacagcctcattcgacgctttcggaagaaaggtgtcctcccctcgaccactatcgctcgactcttatagctctgccggtctccagcaggcacaacaccgcaagcatggcttatgcaacagcctctccaacatcttgtcatcggcctctgttgttgatgaactttctaattttggtcagctttctctcggcggattccattgaaaaattttgtacatattttcttcccttcttatcagatcggattacacctacacagatacggtttggaaaatcaaaacctacaaataaactcaactctgggtctcttcatcgcgttctctcctatcccacttacattgataagaaaaaacttattggcacatgtcgcaacattcctctcgtgtattctagatatggtccatcacatcatccacatggttctcctttgactctggtccttgcttatacgcgtctgtaacactgttcactgaagatattttcttttctattctttcttaccctctctgcctcgcacacatacacgcaaacattcctctacaactttagtctctgacgttctccaattttccattgctactttctcacgtcgtccatgtttccccttggttctgggttttttagaataatgtccaaactcaaccagctctcgaattttgtatgctttccctacctttacctctctatctctctctcgccgtacactcgtacctagtaggtgcaaggtaggcccatggtatgatgaatcggatgtccatctcggatgatccgttcggcgaacgatgcaatgtatcatactttctcatcaatttcgagtctattttcctgacccctttcctggtcaattctgtgcgaaccagtctgtgagttctggccccaaaggggcacatccaatacgatactgatatagacaagagaaggaaactctagatagatgaaaagacatgctcctcgacgtaggacgtgggaatcacttgctctgtagacccttcgagtacacatatacttggacttgcgaacgattgaaccaaggcgcttatagtgttgatcaaatgattcatttgggttctcacaacctgataatctcggcattgatgtgatatgatgtgacatgccgatgagatatcaagaaagaatcagaaattctccaaacgtgtagatgtttatggaaatgtttatatatgaagtgtagattgcttgtacttatgtctatgccaatgcgaacaggagtgtaggtataatgtacagagtgaacagtgacgagatggtttgcccctagggtttaagaaaagaaagaaagaaagaaaatagaaggctgggaaataagaatatactcatccggtgacagccaagatcttctttcaatcctgtttcccctttctctttctctcttccttcaacgagggacaaaatggacatgagtacaagacgggtgagagagtgaataagggattgatatgtttatttctttctatcatcgaaaaagaatcgggataaagagcacagtggtcgaggtggggttgcattatatcaggttcaacaagagagaaagagttctaaatcgaaacccccacccccccgaacaggaaagatgagcatcgaccttgcttccttctcaatgagccgattttttccagaacgataactttcgtcctagattgctaccttccttctcgtgctgtctttgcgagccgttcgaccccaaccctgaacccgaaccggtcgggtgaccaacgccgagtgagcccaattttcgagcgatctctctttcctgagatagaggagtcggtagccttctatgttgtccgaatgcctctctcccatctccctgttcaccatagacaggtccagaggaaggcagcaccggtggcggtggtggcggtggaggag

SEQ ID NO: 207 - DNA, 21274 bp, Xanthophyllomyces dendrorhous
gaggtggaggatgttgagaggcgacagcagcgacatccacctcggcggcggagaacgcgctggaaccaaacccgttgcgttgtagagccaacaaagcgtccttctgacgttgagcctcgagcatcttctttcgatcttcggcagcatcgtagacgtatctgacaggcttgggaggtgtccagcctggttgaagttcttcatcgtccgaggaggaaagtgaatgattcaccgttaaagccttctgagtcgtcggatcgttgaccttgtagatatcatctgggtcaaaagcgtctacatattcggtaatttttcatagtcaattcaataaacaaacaagaaaaataaaagatgaacactaaattttaggtctactaaagacaacccgtcttgacgataacatagaaaaacacgtaccgtccgcttcgtaagcatcaatgatcctcctcttccctaacgctttcgcgctaggcctcgtgggcggcgctgattcttcgtcatcactatcatccgttctcatttggtagggctggctatcgttcggattttttttgccgtgcccatgtccactagcgtctgaactgatcggggtcggggccaaggccgtgcccggaatcggtaacggcctgtactttggcgagttggagctcacgttagggtcgttcggtcctctaggtgggctcatcggagccttattagacccatcaatcattttcgactgtcgatgcaatggagaactagcccgaggaagtgaggaactcagatggctggttttcgggtaacttgacgataagagagacgtcgctgagggagctttgggaagtttcgattcttctatgaagcccagtcggttgggtgaaggagatcgagagccaccagcttgagggactcctagatgaccatccgattcatagaccggttgctgtcagggcacatgcgtatacgaacgtagatgtttccgtcagtcgtaaattatgttccgtcgaagtgttttgtacgaaatacaataaaatgaggattacttacagatcgatcatgccgggtctctttcctacttcgttcagaaaccatccgaatatcttcttcctcctgcaaatcacgttcgtactctgcaaagtcttccaaagcctgagggtgtgcatagctgactagttagtcagtcgttagactcggataggagaataccaaacatgagcgacgcacctcagaaacctgttctgtgacttcgaccaatgtcctcaaaaccgtctgtgctttggtttccccagtctcgtttccaatgctcaaactgtctgttgcgttcggaccttcggtcgagaccacacgagcagcttcaatagaagatctgcctcgattgagcagggaatccctcgccatagattccgcccagggaagatgattgacgagttcggtttggatatgaaagcatgtttggtagctcgactaagaaagcatcgcaagatttaaaaaaagatcggtcagaccgaatttgctctttgtccaacaagaaaccctgagtagtagaaaaactaactctcaactgttttcccagctcgccttcgaccgcccctggattgcctctggcttccctgagaaaggcgacgagcgtgtcctttgtctttctcgctctttcacattcgtcctccaacctattcaagtcattccccatattaggcagggaagtctgttgctgatgtctgaagacatcatatccaggcgaaagcgggcccgtttgagaggtccattgctggatatgcggataaggggccgtcccgagatcgtctccaagtccgtaggcacgtgcgttagcgaagtgttcttgctgctcatgtgccgccaccgtgggtgcatgtggatgaggttgaaacaagaaaccaggagcaggcgattgagaaagtccttcacttcgaccggtctcgtagactttgccaaagtacttgatcagatcttcagatccttcaatccctctgaatcgttggtaagcatctcctagggcatgatacatatcagatttcggcggacaaaacgggagtttcttcatggctgcttcgatcaaggaaagcgtcttggagtttgtgagagattctggatagagagcgaaggaaaaacaacaggtcagtgatgtcgcttgaacaatctttctcgcgtgaacaacgaccgaagtacaagacggaaaacatactcgtcaatttagcatcattcaaatacatcaacagccaccaccatacctccgggaccgaagtcaaacccgggccgtttccattccgcgctttctcaacctctttcggtagtcccttgatctctgctctgataaccttagcgactcgttcggcgagtgtatagtcgttctgagaagcagcgatcgagagttctctcgacaagtcgtgtgcgtacattcggaaggcttccgtttccgagctcgaacgaatatcatacggaggtagatgagtcagaatcagaacggtttgttcgacccaatcttcctttgttttcgagttcgcatgttgctgttgactggattcgatgtcttctcgccatttacgcaagagtgacttggactcgaatgattctcgcggtggggagacgtttccctctaaggcagtcgaaagtcgctgatgatatgactgagcgtgttctccgtctggtccttcagacatgctttccctgcccttctcacgttctttctctttggagtttgctccgctaaagaacccaaacttcttctttggctctctctccttttccttgtccttctcttttctggagcccgcccctgaagttcccttatgaacgaacggtgaagaggctccacttgaggcagattcttctctagagagcgccacccaactcggtgccggttgaccaggcgatggtgagtaggtttgaaatatattgtgggaatggtcgaccgactgggaatgtcgatccggggcacgacctgaaggaggatgagacgaggttggtggtattggaccggtcggtgcggctagcgttagattggagagcgagtttggcatcatatagggagcttgatccatcggtcggggaaacgtattttccgatatagaagattgatagaacgggttgtttggggacagaggagcaggcgcatggaacggaggttgttgtggaaaaggctgtggctgtgggtgagacggttgtgtcgagaggatcgaagggggatgctggcctatcgaggtccggcgagggtgggagagacgagtgtttgagagatccgcgggggactgtgagactggatggtatacctgttctgtgatagggttgatagtagtagtggtggagggtgaaggtggttgaagcccgattatcggattcaaagattgttgtccggccggttgtcctgatgagacggaagtgtagatttgggtcggcggagacaacggcgcatgttgagctctggacggcctcggggctgccaagggaacggaagccgagtggtgatggtgagtatgatgaccgcctgcgagagagttcgtgtgtgaccgggcagattcttgttcccattcttgctcgcttgctggtcgaaaattgggcgtcccattaggggcgaacggtgcaaaggggatgcttgaatgagacccgccggaggaggatgtgcgaggtcgagggtaggtcggtgcttcgaatgatgcgctgtcccaggcgttcggttgagagggtggtgtggggaaatgcgtgttcggtatgtcgtaccgctgtgaagagggaggaggaaggaaaagtaaaagccgagcataccgagagtttgtacaaccgaacagtaatcaacaatatcagccaaaggtacaagaacatgacctgaagtagaagaggacgaaacgtatgttgcatgcactacgaaaacagaagacgatcttgcttaccggtgacggaacatgatctctacctaacgagatatttatcttttgagcattgtcatcaaaaccggtaggaccggcggattctctaggcgcatagcctagtcctccgggcgccgcagtgtttggcggttgctgccaggtggccggatagggtacaatcccgttctttggaggatttggcggttttgatgaaggtaacctggacgacgactgagagaactgatggcttgcatgctgttgagatacggaaggaagagcttcaatggtcgagtcgcccaacggctggaacagagatggggtaacaggcagaggagccttcttcttagaaaacaggcccatctagagggagatccggctgattgccaagagatattctcgagaaaatttgggaagaaagatcagagaaagacagaaagcagactctttgtgtgtttggcagtagtccagcccaagcagcacacacacaactaaggagacgaccgggtgagtgagggtgagtgagagatggagggagagaaggatgagatgacggcttggacgaggaaaaacagagtgggagggcgagggaaccgaaccagggggcggattgtcacgtaactggtggttacaaactggattaggtaagacagtttataggacctcaaatcacgtgacttgacttggtgtggccataccacccaatagctgtactgcctgctctttctgcttatgcctcttcgtttactctgcatcatcatcttgctcggcactcgtccgtgcttcgcttgctcttctattcttatggccttgagccatattggtttccatgtatttcatctcttctcatgttttatgcgcgggaagtatcgatgcagaacaggccgatctcactctttcttggacaaggattctccgagctggaatctttgtgagaatgcgctatcgaagttccttattcaattcgttgtctgcgcctagcattgtacgctcttgcagaggttctccttttttccggtgaaatgtaagttgagcaacaatgatagaggatcttaagtcttctcccactcccagtcaagcagaggctcaagggctataaccttctacgttacctactagcgcacaacccctagaacggtgttaatcaagggtcaccaaacgacacgtgaccaagtaggttagggttacactccatcccggctccctctttctaccaacacactgagaaacgttcagagctgaggacaagagaacgagatagaacaacagacagagataaagaaggagatatttcgaatcctctgatttgatgtgggtgatcttggtagccctatccatagcatttctgacccagacatctccaaacacatccaacacatcgttgtctaaatcgcattggacttggctggctgtctcttctcctgctctcttttgtcaatcaccagggtcgataatctcgttctgatggcttctctctttgtcgcgaccgttattattgcatgtgtatgtctctccttgtttctcctcctcgctttctctcgcgcatcttgttctcttctctggtcaaagagcggtctgcttctctggttggtaacttagatactcatctagccacgtatatatgaatattatctgaaatcccgacgcgtctcgtccgcctgctgtttttttatcttattttatttctctcgtcattcaacatcgaacttgactctcccctcttcttcctttcataagcaccccccatccagagccatgtccgaagtcatctatactggatctctcaaatctaaacgaaaaaatgagtacgtgttgatgattggttatcttttccttatctcggtggaacgtcgctttagagggaagcagctccatctgccttcaaaatctagtgttaactcctgagctttttttcccttcttctcttctttctatctaatctctcccctttcctatccatccatccattgcaatttctttcgatcacgatgataggctacaagaaatagctcgagccatgggactctccgtggatgtatctgtcaagatctctgagctcgttgcccagatccaacacgagatggagactcgtagagaggtgcgaaccggccttcttccttttcttctccttctctgcgcgtccctcctatcattacttacacccatcccttccctccgtctatcccatcttactcgtgatgcgtgacaattcgcaaaaacctccctctacaggagctcatcttacaccctcagttcaaacgactcttccgaccggcccgcgcttcagcgtctcaaaagaatgacatcaaagtctcctcttccaccctaaactctggctcggacactcactcgcattctgactctgagcctcactcggatgattcaaccgtccagatcgaagcttcgtctggctcacgatccaagactgctaccggagacaaccacctcggcgtgacggaagggaatgatgaagaatcaaacaaatcaaagcttgctaccaaccaggccgacgcgtcttctgatgtcgacgactcttccgattcgggatctgacgacgaatcagaagaaaaccaagagccaaatgctgaatccagaccgtccgtgttgactgaaagtctggcttacgtgcttacgtcgcctttcaagtcacttcccgcatcgtcgcccaaacagaaaaagacgccagccaagacgtcctcctcctcttcccctgttgctggctctcctcgaggtccatcgagcgcgagaaagactccttcttcgaatcaaaagtctcagcagcagccgggcacgcctatgtccacgctcattccctcgccgatcaagtcagccgttcagtcgacgattcagtccttgacacctgctccagattctccactccaaaaagcggtctcgagtgtattcggttctccctcgatttccaagctatcaaacgcgatccctcaagcggcagctcagatcgcttcggtcgcgaccggcacgccttcaaagttgagacaacaaattctaccggtgacagaatccccggcggccactgctgccgcagaggcagcatcggccatcgtcgatgccgctggacagacattcggtcaggtcgaggatgcattgatcgatgcgggcaaggtcgtcgtcgagaaagttagcgaagtcgatggacaggccattgagggtttcttcaacgaggctgctagggagagtgacctggttatgaacaagatgaaccgtgctctcaaagggactcactcggtatgtggtttctttttgtacactcttcttacaaccccaagtgacgctaaattctctcctatgtttcctctctgatcagatcctctctactcccacgtcccagacaatttcactcttgattctcgaagcggcctacctatttagcaatgtcttgaccttcaagaccaccacgttcactctccctccaaagtcattgacttctctgtcaactctcgacccatcaactccttggattagtttggcgctgaaagtagtcgactgggagaccatcaaaggatcaaagattgatgtgtttggtcctttagccgtctggctagttggactcgtcctccttcctttgttcttggccggtttgatggcctcctcttcttcgaccgccgccttgtcctcatcggcttctccgtcagaagaacacgcctcatctgacgtacctgtacatacgtacaatacccgtcaacagaccaagcgtcggtcgatccttcctcatccatcccagacgactgatagctcttcgtcttcggacgtgtcatcgccaagaccgacgtcaaacccgttgatctttacgatcctccggttcggaatcttcttaatcgctcagacccagctggaggagtttgggaaagacggactatttttaggacagttgaaacagaccgggttggtcagtactgagaggattgggttgggcgtcgttttgagtggcgtcgggattttattgggctttgctcagaaaaagatctgaggaccctcgtttggtctttctttcttcttctctttttctcctctctttcgatccttgtcttctcttctttgtttgtctgtttctttttctttctttcatgtctgtttcagtttctcgccttgttcaacaaagagagggatcaatcgtcacctagttgggatcccttccgataccctgtacataaatcttctttcccctttttcctcttcgatttggttctggttcttttcatgtacccttctcttatcgtaaccctctgttcttgcattctctctctctctctctctttcttttcccgttcgcttcgtgtcttgtgtctcatcgtttctgtgccctctctttcttgaactctcttcgctctgcgcttttgcggtcttctttctctttatcagtgatcgaccgattatctcacatcaattggaacgtgtttattttccctcccatgaaagatgaacagaaaaagtagaaaaaaaaaaacaagaaaggagaaggagaacggccgtgtggttttgttggttcgtctttccaagttaaacggacttgaccaactgactttatccgtttgttaatcacgtgaccacactgaacggttagggttacgatctttcaattggagcgtaattaaatggattaccccaaacaaccgacagatgtacagatatacgcacacaccagagacatatcagacagacagacagacagatagatggaaagttgccgaaatctataaaaccttgctcgagatccgagattgatcgattgactcagacacacggacactgaagcagagacagagatcaagagatagaggaagcaaagcagttcacagatgtatacacacgcatctcttgatcttgtccaagagtctccagttagtatgatcccccgctcaaccgccatccatatcctgttctttcccaggatttgaattcccagacgttcaggcagacaggaccaactctcgaaggataaggaccagagtcggaaacgaggacttgcagaaaataacgatacgataaacatgggatcttgaacttcaagatatctgagataccagcccgtccaaacacagggagaagcaatgcaagatcaaaaactcctggaaaaggtcttttcttaatgaggcgatcatcctttctttgtctttgacggaaagagatggccagtgtttcttcttttagcttctttcttcagttctttcggatctgattcggtcagcggcataccgagaaagaaaaagacggaaataaagatcacacaatcttgcccatcgttcgctcgcgatttgtagtttgtaatctgtgaccgagtttacaagaaagaacgtccaacaagccatgtgatataatcggaaagaaacagggaggggacaccaattatcggttggacttggcaactcgctcgagctcgctgttaaaaaggaaaggatgacaaaaatgagacggtcagatgaggacaatttaacacaaacacatctaaggacgaaaaaagaaaaagaaacaagactaactccttcttcttgatggcgaaagagttggaagatcccttagcggcgttgatgagctcatcggcgaggcactcggaaacggacttgacgtttcggaaggcagactctcgggttccgatggtgaggagagagacggcctggttgactcgtcggaggggggacacatcgacggcctgtcgtcggacagttccggcggatccgattcgggtggaatcctctcggggtccggtgttgacgatggcgtcgacgagaacctggatggggttctggtcggtaagaaggtggacgatctcgaacgcgtgggcgacgattcggacggccatgagcttctttccgttgtttcgtcccttcatcatgagggcgttaacgagcctctcgacgatgggcattcgtcccttggcgaactgcttcttggcgtatcgcccagcggtgtggggaacgtagacagcgtgtcggacctggatgtaatcagtcaaggagatatccctgacctcgatgctgtttgaacgaggagaaaaaaaaggaatatcccgtcagtctggctaagttctgagggtgcactagaaaagctcacgatctccttcccctctccctccgctcgctcgaaagtggatatcctctctatccgagtgttgttttatatgtatgttttcttcaaaagaaacaatccaacccggataccagtattctgcccagagtcccttcagaagttatgtccatccctacgccagcctttccaccggctggtttccattctgtgccaaattcttctttcctcttttgacgtggttcttccactgatcgcttggtctttcttttcaccttctccatctcctttcccggactctggcaaacactggttttcggggctgatcgaaaagaggaagaaaaaaaaggacgaagagagggacgacggagcgaacgacggaaggagaaaggacgacggaacgagtgaagcggaaagagggagagtccatggcgaggataggtatactcactcgttggtctcccactttccaaagagcttgacctgaccatcggagttggccttgacgacgtcctgggggagcgcaagaagggtagctgaaggggccatggtggattgtcgaacggggtggaaaggggaaaaaaggggaggcgaagattctttccaaggctactgtcgattttccaaagggcaagccgcgcacaggcctcgtctgggtgagcccaggcacccagcgcccacagggaggggcgaggggcgagcgtgctgcgcgggaatcactcccagcgccacattctccgtttagcacagcattagcacactctcttcacgcggcgtgtttgattttctcttcccacttttgcaaaagtcagatggactggaggtgtcttgatattttgtagttttttctagtctcttgtagtgtcttgtagtctgaattgtagtgtcgcttgactagttcagcctggctcattctgtagtgtttgcgtagtgtagtttatgctggcttctgtagtgttgtgcagtatcgcacctcgctgtatcatgttggattacatcctccaatgtctactgcctaattcatagtccctattccctattccctattccctattccctattccctattccctattccctattccctattccctattccctaatacctaatacctaatacctaatacctaatacctaatacctaatacacatcgtccatacattcattcgtctcactcccttacagctctcgatctatgacgggatcccacagtcatcacatctgtatgtttctatgcagcagctgctggatgctccatctcttgctactgtagtctccgtcacctcgttgttctctctgtcgtcccctctgttatcctcttcatcgttccctatgcctcctctctcacactggcttatctcgtcctgaacattcactcactcacttactcacccccccttcccttctcgcgcagcccggcgtatcttatctattcagaagtaaacgttgatcgaccgatctacttactcatccgccgcggaaaggtgcatcgacccatccttgcatacctcctattccctttgcgtctctcttctgtttccgaagctttctccttcttcgtgcatgccttgttctccccacctgatagacacactcgtacgtacatacaaacactgacccatgctatttcacccgacaaagcacaagagagagaaaacaaacacgattaacaaaaacaaaaacagggtgacatctacatgacacatgcatccattcataattaagcccatcggtcctatatctcttagtctttacacctctcggctcacccgtttccttggcactaacacaaaacagggctgattgcgcactccgctcacgttctccgtactcatcttgtttggttcatgcgcgtttgatagataggattacacaaaagagatcagaccttggtccttctctcttttatttttctcctcatgctcttcaggtctcgtccttctcttgtctttctccctctcttgtcttgccttcgttcaggatgatcttgcctgatcgcataccgttcaatccaccggcgtctctgttcaacatttcttacctctccccaatatccttaccttctttttcaactccgtcttccactgctttttggacgatcaagaaatgcgtcgcctcttcagacttgaatcctatcggaaaaagaaaccaaactccaaagaacaagaccgtccttctgatctctcaaccggcagtagtccaaccacaccgtctacctcccagcagcagcccattcaccaatccttctcggcctccccacctctgcactcaaccttgcctcgcctttctctgtctcagattaaaggcccaaacaaggccaaaaatcagactgaaaaccagcagccaggtttgaacaaactctcaaacttatctttcaaaacagtacttgacttctcaacccctctgtcggtacattctcactcgaggcctttgaccttctcgtttgaaacaggatcacaaattcaatccccagcacagtcagaccccctcagatggacgggcgaagactgggatcccgcgctggatgattattggggcgaaagagggagagaacttggaaggctcgttgtagctatcgatctaggtatgtgtgtttcctgcgtatatgtgcctgtgcctgtgcctgtgcctatgtctgtgtccatatgcgcattcgctatgtgccggaagagagaccttcatggagtaacagactcacagaagaaccgcctttttgttctcctctcttctccttccctcctcttcccttccttaccacgattctctcttgcgctctttgatggacaacacaggaacaacgttcagtggcgtggttagctaaagattttcatcaactcgtgccaagaaagaaagacttaaattagaacaacaacgcctgacaatatctctctgtcttcttaccctcatgcgcatgatccggaactcaggcttacggctcatctcggatccagtccggagaaaacaaacagattgttcattggcgtagatcccttcatcccagcatcctggttttgcctgaagcgcaacgaaatagactaacgatataggcactgatgttttctcttgggttttatctgttcaccttcctatagctggatctcaggggacattcagaaagattccaacttgtttgtccaccttgttttctcatctctgtgtccttcctgtatctctatgttctgctcaccgaatcgtccgattcgatgccattccctcgtttgctctcaatcttcctattttccgttgtctaaaaaggcattgtttactcaccctcaggtcaagtaatcgcctggggcgtcgaagccgaagctctgggggtcttgcctgcaggatacgtcaaatgcgaacgattcatatcatccctacagcctactgctatgaagatcggaccggaagagagggaggtagaaagaatcgacctgaggctacctgatctaccagtgcgctctatcgttttctttcttcagactaccccgtctttccaaaattcatccgtatacgattccaccttttcaaaccgtcgttcattttatcttgacacgacataaaaaagccaaacaagacggtctcccaggtgatgatagactatctgacccatctatggacgtatgctagagaccggatcaccaaagacattggttctcttggcgatcttgacaccgcctggatctttctgagtgtgcctgccgcttggaatgacacagggcatgaagtgatgaagtcggccgcgatagatgccggcctggtcaaggtgtttactctccttagtctcgtgttctgtctctgctaccgttctcgatcttgttttctctctatctttgcttacctattctcaccatttgtagaggtcggatcctagggataccgcttggagagaccggttaaaggtcatcacagagtctgatgcagctgctgtctattgtgcaggttggtacctctatctctgttctttgtcaatcgaaaggttcgtaaagaaggcatatgaatgtcctgtgtggtctttttctttgtatgtcgattacttggcgtgttgatgggaaatcgaccaaacgtagctctgacggaacttcaccggtccaaaatcttacgaaactttatcgtctttgacggaggaggtgtgggctgtgtgagtgctactcactcttctctctagcgtcttgtttaaattcttactgagactcgacagttccggttggactccgttcgataggatttgacgacatacaagctcctaggtaacccatcccgtttggacgtcacgcaagtttgcccaagatcaagcgcgaattgcggtagcctgtttctcgatttcggattcatagacttggtcaagtgtcgattgaaagatcatcctatccatgtacgctttccctcccccttttcttccttttctcctttttgtccatgtcagccgaagccttcgtctacttgactcttgactcaatcttcttgttatactctctccatgaatgatacaaacaagctcaacggcccctcaattgaaaactaccttcatgcgttcaccgaaacggacaaggtcatctatagaggagaacaagacgacgagaccacgttcctgttcacgacattcaacccggaagaaccggatgatccagctatcgggttgatcaacggagaactctccataaaaggcgaagtcttggtgggtcccttttctttgtgttctcatcattgaattagcgcgcctattgacaaacaatcccactctcttcttccttttcaaatacagagaagagaagtgtttgatccaatcatcgaccaggtactagagcttatcgaatctcacctaagtcagaacactatcaggatcgacgctttattcatggtcggtgggttctccgaatcagaatatcgttcgttctctttcattcaaccggttgcgtccgacctggtattcagtctgaacgtacgtttgcttctcattatcttcgttttgttcttcaaagtgttcgccagggtcgaacgtcagtttcaaaaccggattgatttgatcgccagacccggtgattgtgatgtggctaccgtacagggagccgttcggtacggactttcaaaactggcctcgatatcgagtgccagccgtccggaagtttcacatcgtccgtcctattcccttgctttcccagtcacgtgagcccttctcccctacacaagagatgaaaaggttactaggatctatctgcgtgtaacaaatacagctgggtgagagcccgtctgccggctgaagtgtacccaggttgaacaaagggggtgggacctaaaatccttgttctgcgataaccggttgtagtatttttcttatctttgtggtacaggtctttttttagttatgtgcttgatcttatcacgttcaaagcgctgacatctttctctcgtttcggtcgttatcgaatgggacaaagatgaattgaaagagagctatcattcggaggggccgaactgcaaggtttctcttgccttgtcttgcagtctgtgatacctggttatcaaatgcacgaccctttctttatatttttctctgtttaccaacgggctagacaatgtgagttgacctgccttcaattcaacggtttgcgcgcgtttgcaggtaagagagagagagagagagcctggctcaccgactgtactcaatcagtccctctctaaaaattcgacgaagcattgctttgtaccgacgatctatgagtctgatcctaatcgtccgaaaccgcatgacgatgaggatggaccataggaactatatgaactctgtcaatgtgtgtgtctcttgtgttggtagatggttcttccatatgtatagccaagactgtcgattgatggattggaagaagccggctggtcctcttacacatacttggtatcgaccaagaatctggccaatcgactttgttgtgcagtccagatagtggagacgagagatgcaagatacctaaaggtgttgaaagggacttgatctcatgcggacatttttggcttctattgacttggtcgttgagacaagcgatccttttgcgctcgggaaagaaacaggtacaaagatggtttccattcggaatattgtacagcagctcatttcgtttatctaggcatactagatcaccctctccttttttattctccttctactcatccatacgcgtccttcattcagtgtttctctctttcgtgtgagcaaacagttttacatgtgtaacatcgatgatgatcgacagttcaattgatgtttaaccacatattcatcagataaacgcagagatagcaacatgccgaaagaaaaggaggggaaaggaataagaatgtgatgtctctcctaagcataaacaatcgtccagtaagaaagagatttcttggagaaatcctccgtggggattgcaataaaaggagaggtttgtaggatgttctggccccctcaatgatgatcccaacgaaacccagaccttgtctgtttagagaccctaaaggagggactggacaacgtatttgggaccttcgagagggcgataggaatgggatcgttctgatagatcggatgatgtcaaaagaggaatgaaaggaagggaaaaaacaagataacgaggcagaaataagatcgagaaatacacaaagaggacaacatgctggtgaggcgatgcatatcctgttcaaatgggtggtcagctgcacgtccatctcccgtcatgtcatggcttgagagcctgatggagagaaggtggatggttggttagagagaaggagtaaaggaagatacgataaaataaaatggaataaaaagaactttagagctgtgctgtgccagcagaatcacgtgacttgaacatatcccgcctctgctccccatctctatagtgcgccgctagaagaatcccaacagaacatcagagcacatttcaagacatccaagaaagtcgcgcacaagtatcactcacagagcatcctctaggaagagagaaaactagaaaggatgaaggagaacgagcagatctggccacacacacacaggcaccaccggagggccgaagaaagccgtgcttacctaagccatctaaaggtagggaaatctcccccatcccgtttttacagtctgccttctctcctctctcaacactctccgtccaaccttccctctccgttcgttctctcgctcttgtgattctctttgaaacatgatctctctttgccgtgctcctttcgtaagtcttgctgatggtctacttcgatttgttgtggaagagaaacgatgcttgttgactgagatttttccctttctttcggcacttctcaacgcccattcttttttcttttttctttcttctttctctccccaccatgctatcgtccttcatctacatctgttccttctttgtttccaacttgacgtaacctgattcatacagtccgccaacctcctccgaccgttggcttctcctttggctgcccacaacgtccgagctggatctcttcgaatcgtcgatgtccgacgatcgatggctacccagtccaaggaggagtacgatctcgtcgtcctcggtgccggttcgttttattttcattcttcttctttcttccttctccaaagatagcagacgatggtcatagaaccattttctgcttgaaaggaaacctcaaaccggctggcgcttattgggtatctttacaatatatgcgtttgtgcgtgtgtacgtgtatgcttgatgtgggatggcgatgggaataggacctggaggttacgttgctgccgtcaaggcctcccagttgggcatgaagactctctgcatcgacaagcgaggaccccctggtggaacctgcttgaacgtcggatgcattccctccaaggcgctgtatgtgtcgtccttctctggttttatctgttgtctttgatttgtcgcctaatgacgtcgatctcccctctcttacgttcttctctacttccacctccaccttcctctttccttctctaccacttcttcccttcctcagtttggactcttctcacttgtaccacgtggccaagcacgatttcgccaagaagggaatcgaggctgatgtcaagctcaacctccccaagatgctcgccaacaaggatgctgctgtggccgcattgactggtggagtcgagaagtacttgttcacaaagtaccctgtcacctacctcaagggaactggttccttcatctcgcccactgagctcaaggtggccatgcccgatggatcggagcagaccgtcggtgccaagaacgtgttgatcgcgaccggatccgaggtcactcctttccccggtatggagatcgatgagaagactatcgtcagctcaaccggagctttgaaccttcaggaggttcctaagaaggttcgttaaatttccgtttaagaagagcatgagaggcgagcaggactggagctagacgagtgattgaggaagggggttcaggaaagagccaaacaaagtagtatgctaactcgaagatcctgtgtgatgttgttagatgatcgtcatcggaggaggtgtcattggtttggagttgggatccgtctggtctcgattgggagccgaggtcaccgttgttgagttcatgagcgccatcggagctggtatggacggtgaggttgcgtaagtggtcacttcttttctttcccgtcgcatgttgctttgaaatcacaggcgaggcttatcgtgtaattcaactttcattctgcagcaagaccttccagaagatcttaaccaagcagggtttcaagttcaagcttgatactaaggtcatctctgctcagaaggaggatagcggcaaggtcactctcaacgtcgagggagccaaagacggcaagaaggagtctgtgcgttcgcgttttttttgtcttgttgtttcgtcattactcgtccattttaaaagattggtttcactgacaacatcatcctatgtccggctactagcttgaggctgacgtcgtccttgtcgctatcggtcgacgacctgtcaccgccggcttgaacctcgaggctatcggcgtcgagcttgacaacaagggccgaatcgtcatcgacgaccagtacaacacctctgtcaagggagtcaagtgcatcggagatgtcacctttggccccatgttggctcacaaggccgaggaagagggtatgtctctaatctctcctccttcccccccttttttctgcttcttctttcttagtcttctaacacttcaacctcttatcaaacaggtatcgccgccgtcgagatcatcaagcacggtcacggacacgtcaattacgacaccatcccctccgttgtgtacacccaccctgaggtcgcttgggttggaaagaacgagcaggagcttaaggccgctggtgtcgactacaaggtcggaaagttccccttcgctgccaactctagggcaaagaccgtgaacgataccgagggtttcgtcaagatcatgattgagaaggagaccggtcgaatcttgggatccgccatcatcggccccaacgctggagagatgattgccgaggccaccctcgctatggagtacaaggcttctgccgaggatgtcgcccgaacgtgccatgctcaccccactctttccgaggctttcaaggaggcctgcttggactctttcgacaagtgcgtacccttctttctttttctttccaatctccgtcatgacaccaaacgtccacctttcctaacatgccctttttcgatttgcgcgtggataatcctcttaggcctgtcaacttctaaactcatcccccttttccttcgtcctcttatgatttccttctttacccccggtcatcatcgcatagttccctttctcaaaccctttcaaggttctatataatcccctttctgcttttctacccttgggtgtctttttctttctttctctggtcaatttcttagaagaaagggggggatcctctccagatcatgctatctctccccccctcctcgcctcagtttcttcgttgacgtgtgggtgcgacccaagtgaacattagcgacattatcatatctattgcaaagccaaagagacgaatacaactacaagtgaagatggaagtaagagtggatgacccttggatcttgatcctacccttaccatccatcgttagcccccgacttttcggccttcatcaacctgctcttcccctcgttcctcttctttgtaccctttttatttccgagtttaccaggggcagccttggcgtgatgtttagcttgagcacgagctcggtccctattaagatcagactgaacggtagatcgaacatcgtccaatttaggaggaggagcatgcggatgggttttacgcgtctgagttcgaggctggtctgtttcggacccagattcttcttcagcttcagagccggattcggtttccgggtcgaaggtggctgtggcggcggtggtggtggagagcgttgtggaagaaagcgtgtcggccaggttggaaactaatgcaggagcctgttcggaatcttcttcgtctgcttctctcattaacctctcgatctcttcctctttcgtctcctttccgtcttcttcttcctcctcttcgtcttcatcttcgtcctcctcctcttcctcctcttctgaatctgagtcctcttcttcggacccttcttctccctttagttcagccatataaccatccaacttggcagcctcgttctttccaaagccagaggcagccacctcgacgtctagagtgaacgactcgaccgagtcatccgagagtgctttcctgaaccgggggtagatctttgactcatagttgaaccgtcttcggaagaacgttcggatacaggctacatctcggttgaagtacctttttgtcatttgatggaataaacagatggattttaagtgagtatgaacgtcccggtccccttaagatagcaaatgaagtacaacgtcatagtaaaaggaggaaaaaagaaggaagagaagagaagagaagagaagagaagagaagagaagagaaggacgaaccactcggcatccttgtggttagtggaaaccaattgagggaaatcgatgacgacgggttctccatcttcatccctgatcaagatgttgaactcattgaaatctccatggatcagacccgccctggcaaacctgacgaggagggacataagttgagaatacaaccttccgggattaggatgttcggctacttgtcggagggcgtaaccgtcgacgagagacatgatgatgcagtgtcttgattgatcgatcggcgtgggtacagggaaaccattggcatgcaggacctaggtttggattcgttcagaaggaggaatggagaacaaagggcggagcaggagaagtaagtgaccgcagatgtacagaag

SEQ ID NO: 208 - DNA, 6619 bp, Xanthophyllomyces dendrorhous
  misc_feature (4914)..(4923): n is a, c, g, or t
ggctatatgtggagaggcaaaccttcatgaaagcccattccttttgagcggccaaccgggacatgtacatccaagtagccgactttcgtttgcccatgtaatcccgcttctctttaatcgcacggaacgaaattcgacccagtctagaatggaaagcagaaagaaagagtgtacgtatgtttgaacggaggttattagtaacttcaagtgctgtcaccgagtctgcggcttcacattcagagagaggaaagtggaaagaacaaaccgatgcatcttcatacaaagcttgttgccctctttatcagcgacaacgtagatgtcagactctttacccactccgatttgagatccaacagaatagagactgtccctctttgccatagctcggatggccaaatagtcgtatcctccgtaagtgagtcgatatccgtcgtctaaagatttcgtcccggcccagaaagaaaagaagcatcctggttagacattattgtcgatcgaagggatgcacgtccgaggataataccggacggaaccatagaactagtcaagattaagaagaattaatacaaacacttgatgttctgaactctagcaatcaagtttcgtttagctagttgacccatcaacttgtttcccgctcctgatcgaacaccagagatctgcgcgatcaacgatgcaggaacaacctcatggttcttactccccatctcggtctgatccgttcgaaatatgcaacattaagagaggaaccgacgacgggtcatcagttggtatgctctgaaacatcactcgacttgaccgatacccggttcggcaagtcaagaaatcatggaagaatcacggttgtacatacagctgtgaggatcctaaactcatctgcggtgagatatctgatatcggtagcgtctagcttcatggcgtaggagtgtaggcgagcgcttgtggaagagtaccagccagggaaagaagaaggtgagaaacccaaagtcaatgaattccaaaaatgcacctgacaaataattgaatagatgaatttcttatcgctacgataagtgctggggtaaatacgtagattacatacctctccgaaagcatcgatgaggagttatctacccgtggaaatgcatacgaccatcatcccctggccatcgtcactagccagagctggaccacacgtcctgattttcttcaccttctagtcccagcagctggatccagggactaacctccgagatagacttattatcaacaccctggaagagcagataacgtcatcgaatcttcgaacagagtcaagggagagtaacaaaaggatacagaacgaggttgccaatccggaggtgaaagcattcaatttcccgggccggatcgaaccgattagaggctggccctggcccgtgctacgaggcgtctttacgacttgatcaactctctatgtatagggctactcacctcctatgtgttctcggtctcaaactaatccttcctagaatctgtggcttgatcgaattagaatgtgtgtgtgcatacgtacggagtctagactaattctgttccggatggcccgatgggacgatgactttattcactatcacaggcaaagctgggcgatcaccacgtttgttgcactcatgactgaagcctatctctcacgctcatccggttcttctaacgcatcgtcgagtcgtttaagattttgaatctgacgggtatacatgatgtttaagctccccgaggtgttcactccgtagctcacagtcactcactctatccttctactactgatcatcgctgggcggtaggactcgttcggtctgaacaggcaactcatccctgcaaatttatatacaccgaatcttactctgtcccgctcgtcggataatcttaatcacatccatccatcagctttccgaatcagccagtatccatatattttcccgattttattcctattggattgtatggatggccaaggaacctcgtctgtatgtatagcgaggtacatgattttagggtcggcgtgtggttaaatcaatgttcacgtactcacacccacactcgcattcaatcaaaccgttccttcctcgctctctcctctctattttgcccgacgggcttgacccgctccgatgagcaggacaaggcgtctttgttcccgttgtggatagtctcttctctatcaccctctaatcgtatccaaccctttttttttcttgacttttctcaaggtttgatataaaaagaacgggtcgatgagaggaaaccggagtcttgctttcttcctttcttcgaccactctactttccatctttccttctgcttgctgctttttcatttgctctagctactcttcgctaattcttcgccgtgatgcttttctcggcatccgctcttctctctaccttactgatcgtcgcctcctcgccgctcaccttggccgtgcccaccaaggttgaggagccacgggatcttcgtgcaaggacctccgcgccagtgtgtaattgtaagttctgtacacatggaatcattcatccacaccctttgccgacgcaccggactgaccgatcttgttattgaacctttcttttgatcgtctcttccaatttgttcatttgagctaatagtcgtttgccagtcagcgagtggttacacggtggtaggctcttcaaccgggaattctggcggttaccaatgtatttatacatcaacatctgtgtttgggtatgtgtcgatctatatttgtttttctggtctccttgatctacccacgcagtcttttgtagttgacttttgatcgatctatcattacgtcttgctctgccggatcatggatgccaggaacaataaagttacatgcacctacaactcaagcggtagtataaacggtttcgcctatccgccttgcaaatcaagcgtgggcacctgctcgtcctcgaagcgctcgttcacagaagcgcagagcgagttggcggacaagatccaaaagagacagtggaagcgtacgaatgcaaaggatggtgtcgctcagaaacggagatgattgcgaatctcttgagtatatatggacccaagaccggggcttgctgccccatggacatttccctcctatatcgctgcttaccttctctatcgctcattcgtttgcttgatctttgttcggtccattatatcttcgctctcgtaactatcttcgctttctatctccgtttctgcttgaggctttctcctcctccccctctatctttctttgttccaagctttagttccggttctcttattccgttctttttcctcttcacctgtaaataaagttcttgttcgcctgtctgcttatctgctttcatcctaggtgcgtatctcatcgcccgcccccatggcagacctacacgtctatagtctatcctatgagcgatcgatacagaacattctgcatctgatcttcctcctctacgagaaccgctacactcggcccgacggatgatgggcatgtttgatgacgctgccgatgacgcgtctgtagccagaaaacgttaccatggttacagacaaacgttagcgggtctccctcctcccggcctttttttttccggtagtcacagacaatcatctttcaacccaaccaacacatcgaaagctttcgttcagtcaccactcgcatccatcatgttcgctgctactgccatccggtccacctctcgagtcgcctccaaggctgtgagtcgttcgttttgatgtgttgttttagggtggatgcagccaagagagtgggagatggatgaggagatctcgtgccggtcttttttttcctctctctctctctctctctcttcaccttccctcggacccatctccatattttctatcgatggttctttccttctgattggtcaggtcgcatgcacagataactcttactgatactgatgcttttgttcttcctcttgtctgctagcccatgtccatccgagcctacgccgacaaggcctctggaagcgttgacaagaccttcaagtacggatttttctctctctgttctctctgaccttgaaactccttcgttcttttctttaactcagaaagatcgaagtgctgattcttctgtctgaaccatcttactcttttccgtgcactgtgaaacagccagcgagagcagacccaggagaacatgtacgttcgacagcaggagctcgagcagctcaaggctctccgaaagaagacccagcaggagctcgaggccaagcagaaggagcttgtacgtttctttcttaacgttctttaactaatcccagacggagagcataatagttctcatgccctccttcgcttttactattcgtcgcctcccgaaacaggccgatattgaggctcgacacgagactgcccagaaggcctctgagcagaagtaaatgtaaccgaccatgctcgtccgacttgtgttcacttccttcctcaattaattcatcaatattgtccattccaaattctcttccccccccccttttgtttctgctagcatgctgcttttgatgatctgaaccttcatgtatacttatgctgttgtgtctgtctatctgtcccatgtttggtttttatctatctcttgtgatggtggccgagagttgagacaactggcctttgttggacaaatctgatgtgtgtctgctaggtctggcagaggcaagcgcgacagagagagagagagagataggcaacatggtgcacccaaagcaaacatggtcgatagattgatacagaaagagtgaaagtgggagcagaatccattcaatcccgatgacgatgagaaagaagagaaaaacctgcaaacgtcgtttttccattcaatccgtttcttccttctcgtccgtcgatctcatccatctccatcatcacttttgcatacacacacacacacannnnnnnnnnacagaagcacacgccaacacatgtctgctaatccacttgctcatcataggagaacgaggagggctccgaatgacgatcagccttcatccagagatgcaagcgaggaaggtatgtccggcctgttcttcgtacatccttcttgtcgttccgtcttttcctttcctttccttttttttttctttcctttttcttcttttctttcctcttcatctttttgttctcgcatatatgtcctgttctctagctacttcagaccggacaagctcgctggactcgatgttgacgacgagccgatctttttctctccatatgaacgttctcatccacaaacgttcatgctcacttggctgaaaacagacaacgacgagtctccgcacaactcgatttcccaacatcaccctttgaacccctctgggaccaccaataccaacacgggaacaagcatgaacactaacctggccagtcaatcgtccaagccgcatcatccgagtccactccgaacgaagaagacggcagagagtgggttgaaggttgaaaacagggatgtcgaaacaggggccgagagtcagtcaatctatgatggagatgtcggttcgtcccgggtggtttctttcttcgttcttgcctttcttggattttccgtttagctgaatccccttgggtcatcctttgtcacatcacatacacccagagctatcaggtgcctcgactccgaacttgccttcactcactttgccgtctcttggatccctatctcaacaagccccgacgtcgtctccgtcctcaacagacgtcactccgtcctctgcgaccgctccttccgttcttaccggtggggtccaaccatcaatcgtgacgctgtctgaagctgacattcaagaattcgtccggaaggcgattgaaggagagtttgaacctagtgtgggagtgcgaaactacaagatcaacaagccaccgacatcaagaccggtgaggatttatgcggatggtgtatatgacctattccattacgggtacgttcaaagttctgttcttatcggagagtagtcatcgttagttttttgaatccagataccaatcatcctatcgctctcctccacagacacgccctacaaactcgacaggcaaagctctgcttcccgaacgtccatcttcttatcggtgtatgctctgacgaactctgcgccgctcataaatcccttccagcgatgacacacaaagagagatgtgaatccgtcggccattgccggtgggtggatgaagtcgtgccggaagcaccgtgggagatcacccaggagtttttagacaagtacaaaatcgattatgtagctcatgacgaggagccttacaagagcagcgggaaggatgatgtatatgggttcgtcaaagaccaaggtgagttctaggctctctcttcctctttttttttctttttctttttcatttctcagaaagtggggtgggcggatagaaaatcaagttcaatctttacgtcagagtggaggtgtatctcaaaacttagtctgacatattcgcgcgcacatacacacaaacaaatcaggccggttcttaccaaccagaaggacacccggaatttctacttctgatctactcgaacggattgtgtctagctataggaacggagtgttcgatccaaaacttgaaaaggttcgttcatgaaacttttatttattta

SEQ ID NO: 209 - DNA, 9019 bp, Xanthophyllomyces dendrorhous
acttttatttatttatttgtaattctttattggaatcgtcatttcgttcgagaggacaagagaaagatcgagacttattctgcctttctgttcgatctttctcctttccggattgtgatgcacccatcaaacagaacggtcacccagagttgaaggcggacagagtcgactggacagtcaaacattctccgtagcctctttttctcttcatcccctgaaaaaaaaaacgatctacttttcgtctagggaaggggcaaacccttgaatttctaatctttatctttcgcattgtttccatcatctaaaaactgatcgaccaaccaacgaaccaaccaatcaatccatgcatgcatggattaaatccttttttttcccttccgaatattaccttccgacatccttgtttcaagccctctcttctctttttctttccaagttttattttcgttctttaattctcatgtatacatcactgctccgttaatctttcacctatctgggtgtcatcgcttgctaactttgtttcttacgacagatgatgtatatagacccaccgacataatcttttgcctctctctctctctctctgaccatgtgcctcgttctttgtatccttctttctctgttttctcgcgccagtctgaattttgattcgagatatttgtagtacaaatgaacgaatgaatgaatgagaaagaagggagggaggctgactcatacacacatccagatttaaaaaaaaaattaaaaaaaaaaaacaagaataataaatgaaagacggaagagattcagggaatcagagggaacacggagaggcgcgcaacgatcgacgatataaacagataacagaagggaacccttttaatccgcatgggtctttttatccgcttcctcgacttcctccggctctggatccgtggtgatctcctcctcggcctcgtccaaactttgtttctcgcccaggtatgggttcctcaccacagacacacagcccaacaaaggcacacagagacagatgccggtgatacagagcaaccgctgggtgtgttggtacgcgagcaccaccgcctgtctttctggggtggacatcgggtaggacaagatgaaggtgaactagacgtccggtccatgcaccggcccaggttcgggatcagagataaagaccgaagatgagtgctcatgttcgtgtttgtgcccctcgagaaagagagcgcaaagacaggtgaacggagagaaaccgagggccgagaacttacgggatctccatagacggaagcgacgagagtggagttcacagggcctagttcttgggccagatatttagggaggacttgtgtccagatcgctccagagatcgtatttcccagtgccgacccaatggagtactaaagagagaaatatcctcgacgtcccgtatgtcagcgttggcgtattcttttgtttctcttttcgaaaaagggaacgagtgaattgggtgaaactcacggcagagagatacagtgcggtgatgatagctagatgggatcgtttcgtcgcagaccgaatgagcgcctgagcgggataggggaacaaaccgcctaccgagcgttgcagcagcgaaattgagatagaaaggcgcgtcaagtccttctcttaggtatgtgggttttgtttatttatttagatcttttacttcacagcactcaccagcaataccaagaacgatctgaccgccgatcaaacctgaatggtccgaaacagtccttcctctgaatctgatcagtagaccaaacccaatcatgtagatacatacgccggcaaccatgaacgctgcttgtcagtcaagcgagggagaagagacaagaggaaagtaccagcaccaacatccatatgtgagtaaaattagagttgaagaggaataaaaagaaagaaacaaaaaaaaaacacacactactgacgtttcaatcgacgaacgcgacgaacgacaataccagcgatgacaccggtgatgaccgaagtgaacgaataaagcgagacgattctcgttgccgagagcgtggattcatcgaacgccaccacaagcacggtgtctgagaggcgttcgttggtttgtgtaatgatgtgtgagcttccgggtctctactgggaacctcctatgatagacaaaacaaggaacaaagacatacagagataatctccctgacagtaccaagtcatgttgagcaggacagcaattcccagactgctctcagcgtcacccaatgaaccctccatcagcgttcgcatcttttgcacaagagaggaaaggagacagctctgatttagattcgtaccagcctatgaccgttctatctttgagtaactatacaagccgacgaaggagatgatatttagcatttgaggaagttattcaagaggcaggaagagtagaacagattaacatgtagaggaacacagggatgaggcgcaaacctggtctcccataccacgaacgcgggcacacaaaggatgccgatgacgagcatcacactgcggtcaagtgtttgtccaccaagacacgatgagctcgagtcgtgttacaggcggaagaaaggaaataattaaagaaagggtagtcagagaggccccggacgcacatgatgtgagctttcttccaagatgtagagactccaccggctagagtgaacggaaggagaatgagcgtgaggagcgccacgagctggatggattacaagacatggtggactttatcaattttctctataaaggaagcgcaaacaggagtaaaaaaagaaatatgagagaaacaaggtcgaaccaagacaagtccgatgacgtccaactcccagaagagcttggttgcaaggtttcttcctccatatttctggaaaggagtgggtacgtcagccaacttgccgcccctctttgccttccgaagggcccacaagagggcgcccagaagaggaatacagcatgccgggaatattatacctttttgtaacaacaagaagagttaggacgagaaagtcgcgagaaaggatgatgagaccaaggaaagagatgtggagagacggataaaattatatagggtgtaccaaacatcccgataccccagttccaactagcgttcgcctcaatggcagcggtgatatttccactaacccacgcgtttatcaagaacgggagggctatttttgtgcgtacaccaacaagccggtcgtcaggggcagaagaagggagaaaggagaaaaaaagaaaggccaaccaggaatgtaggagaagaaaagacgagatctcaaactggtggtatcaccgatagtgacctcgatcaagaggatgatcgtggtgtaacccaactggtacaaaaccgctgaagaggccggacacaagatgaatcaagactaagcatgtcagatggagaagaaagaaaaagatcaagtgatgagggaacaggagaactaaccaccagcgcagaaagctttaatgttggtagcagtagcttcgacgatcgttcccacacagtactgttatcctcgtcattaaaataaaatagaaagatcaaagaggcaatcttaatgttaagatgttatccaagcgagaacaagaaagaatgacgcacaaagatgatggagaggatgattaattcgacccgaccaaatacgtctgcaatctgataaagaggaaaagggaggaaactgataagtggagtttaccgagagggggagagataagaacgggcagatgagtttaccttggcaagaggaggctactcaaagagatcagagtaacaacgaatatgcaatggtttcaaacctcagcatcagaatttgcttaatgggagtaggctttcaagagaaaagattgagcggaaagggggaaaaaggccaacctgagcggcagcagcgataatagatctgaggacgttgacggtggccaaaagactgagatttgagtaagaagctgtcgcaaacgcttggaacgtcgctctggtggttccgtcgattccataggcgtaggcgacaagaaagattcctttttttacggttcccattgtaagcccgtgacatatgatagaggatcgatatgggaaggatgtcagctgcactggagtattctcccagattcaaggagcgacagagataaacgaacggacaaacataattgttcgaagcttggtgtcgatttcttcagagatcgcagcgattcttcgaactccctttatttgataatccggcagagagggaggaaaaagatggttcagtcaggttgcatattggcttttctgtacagacaagagagatcagaggacgaggcctaccggactagcgtctccatagaggtccaactgatattcttctggtctttctttagagttctttcggtcgtttgagattgaagacctataggctggagggctacgaacggaggcggccatggcgtgtgtgagaattctcaagagtacttactctgaagaggatgaaggagcaacaaggtcgactccctaaaactttggtttctgagaaaagtgagaaaagggaaagatatgcacgttctgctttttctaaaaagattctcttgtatgactattcccgagatcctgttcctagatgcacactgtaggagaaaggacagataaaattaatggtgtcttctccatcttcatgtcttatgaagctttcggctcagggaagagagtgaccaatgagaagaatctatctgataactcagaattcataaaaatggaagaaaaaaaaaacaaggtaaagagatctttgtggagaaccagaactctgcaaaaagtaggaggagatccttttaatccgagcgtcagcgaagagcatgtgcatttttcgtcagcgaaggagaatgctcggtcagataaaacccggtcgatcggtcggtgagttagatagttagttggtgaaccagtcagtcagtcagtcagtcagtcagtcgatcaatcggccagcaccaatccttattcggcccaggtatccactctccgagttcatagaggaaaggaaacagagaaatgttctcttgctcgttcagaacatccactgagagctcaaggttgagacatatccaatggcgttcgaaatggaatgaacttgaagcatactcggttacgcctgactcggaaggaatcggaagggaaccgcgctggaccctcacggaccggcctcgacctgagcgaaccgtgggagaactaggtccagccttcgagtagccaatttgtaaccgtcaggaccgggctcgagaccgggttcggctatctcggaaccaaaaataccgagccgaaagatggcgcagcgatcagttcataacgtacagcctgcgccgcggtcgagtgaccgccatttcacgccatcgaccgcgttttggatgaatctgattgcttttcacatgaacatcaaaggcttatgtaagagtcatcacgtggcaatcatcttatgtaagccattcgtcctttccctcgttgtgttcagccttcattcgtttgttccttccctgcgtcttccgcttatcagaacgaaacatcgattctctcaaccctcgtcctatcccatccttcttccatctctggctacatcaagtggatcggatcccagatagcgtctctatataagatctatcgctctgctacgtttcagccattccgtttcttctggtttcctgcccgttggatctggaattaaacgttatctctcgcgttggctataagaggaaaacccctcaactcctgatctctttcagcacatttttccacgtccacataaacattctcatccctattctcatccaatatggcggctatcgactttgacgatctggttgctacgatgaacacatcgtgtatcggtcaagaagcgatggacctccgagcacttcatgtaagtcgatcgattcctaatcaggagttgtgttcctccactttccccttttacttttctatgtctgtgagcatctgggcgaatctgttgtccagagggaaggagccaatatctgttggctttttcacatttccttctacctgtttctatcgtcttcatgtccaactctatttccacgaacccatacctccgtttcctgaattgaagacgtgctaaacccacggaccggctcgtccggcccgtcgggtttaagatgtagacgagcgtgtaatcttgtgtactctcttctatctcttccttctcgttatcttctcttgtttcggcaaccagaagtgccgcctgatccatttgggataactcatgactgattccctgggtttcttcttctcgctcctacttctcttcggccccttttcatgttcaaattttgccccctcacacaccgtccgtcctcctcccaatctgttctttctaggcccatctgtcacaaacattatttatgccaccggcgcaggctcatcctggtcagcctacaccgatctcctcataccatcagtatccgtatgggcatctgccgggcccgccgccatcgtcgttgacgtcgaacgcgtcattcgcaagcaacagccatcaccctcacaattctttttcgtcccgcccgccaaacatcctgcatcataactcgtactccaaaggtttcgaacagggtacaggctacggcagcccgatcggagtgccggtctcgagaaactcaggattggctgatttggacgaatcactcgctgccgcttccgctgctgcttcatcctctgtcggggggaccccgaattcaatcacaccgagtaacagaccgtactacccgtcgcctacctcaccaacttcaccgctgacagaaggcatggatacgtattcatcgttccaatcaccaccacctgctcagaggcagttctaccagccaaacgactcttcaccttttgctaccagacaaaccaggagccagaccagacgaacagtcgaagccgaggccgctgccgctgctgctgctgctatgaccagatcatccggccagaacgagctagatatcgacatggccgattgagacagttccttggtaacgaaaagagtgtaacgattcagttcttggcatcacgaaacgtccttcttccttctttctttctctcccgggtttttgtgaattttcttcccttctcttttgtttccatatatacttgaacggaaccttctactcaccctctagcatccttttcgattgataggtttttttttcctcacgcttcctccatcttacctatatctccgccgtcgtctttcaatcttcctcttcttctttcttcattccttcatataaaaacgacattctcatcttgatgcatatagatttcgctcccaaggtaaacttcccttcccttcccatctccatacctgctctttctgtcctgctttgcgttgcatttcgccgaatgaccgtgttcgtttgcttcgtttctccttatctttctctgctctttttatttacgcctctttcgatctttcgatctctcccctcgtcttcaagtgattggttccatttacgctttctacgaggacagatgaaactagtcatggctgacgacgggagattgtcgatcggtctgtaccgggattgcttctctttcctctttgcctcttattcttcatatcctcgtcgactgtgaaaacgttgtattcttcttttcttgttccttctgtcttcttctccctctctcactctcactctccctttctcactctctctcgtcaaaaaccccatctctactctttattatctgtttctcaaattacatctccttacacttgacgatacaaaagccctattgctctgtcatcctcccgcaagagtcccaaacagaagtggaaccgatcgagagaaaccaggacttgtccccaggcgggcgcgcgcagtctcgatgacgcgcctgttgcttatttcctcgttgacgtcattcatccctcagtttccagcctttctttggagaacatcaaaaaggccttcgttggtctggtcaaattgatttctcttttcttcttctcctctatctacatctacatcaatatccacatctcttggtcgttcttctttgcttccatccatccatccatccacccgtttttcgtcagcccaaagtcataactactacgataatgtcctacgctactaccaaccctccttctggaacccaggatctccgacacggtgattctgctcctcactctcattctacctcccactcccacgagcacacgcacgggaacgtcggcagtgtgcccatcagcgggttcgctttgggagctcctattggagagtattcgtcctctggcgtcggttccggtgtcggaatcggatctgctgccggtgttggagccggagctggtgtcatcggtggaactagcagctctacctacacccacactcacgatcactcccacgccgacggacactctcatgaccattcccatggccactcccactctcacggaacggagggtgtcacttacggaaacacgggtggaaatcgacaggacactgaccctgccaggaaggaaaacgtcggacgggaggctgagaagatcaagaacaacatcacgcctactgatgctaccaggcagaacgataagacctacgctggattcgatcccaaagtaaacactcacaatgacagttcgtcctcttttcttcttttttttttcttttcttctctttttaaattattcctcgggctttcttcctcctctcgtttgtgaactttgactgatagtgacgcgttttgtaacccttccgtatcactctttctcttcccccccaaaaaacagacctcgaacctgcagtcgctaagcccaagcaggtagagcatatctcgaccgatggtcctcatggtttggtctggcaggagtccaccgggaagtacgttcaccgaagggagctcgagggaaagaactctatctagatctggtgtcctatcaacctctcccatgattcttccttccgtattaatcctatctatatctggtataatgcccgctgtggcgtccatccttgattcttgataaccctctatgttgtctgggggggtgtgtgtgtgtgtgtg

SEQ ID NO: 210 - DNA, 4547 bp, Xanthophyllomyces dendrorhous
gtgtgtgtgtgtgtgtgttgattatatagctttgtagtgtaaaacgtctgtttcgtttttcgatcttgtgttttatcttaatgtatctatccatccgtccatccattcatcgcggctctgtctgatgtgtgccgttaagattccgaaaggtttgcagaaggaacaggacatcattggaggagagaagaaaaaaaccttgacatttccaggtgtaccggagagaaaggaaggaagtaaggacaacaccagatataaaactgaaacaacacatctaagaagaaaggaaagacgagcagacaagcagacggatatataggtaacagtgctcgagaaagagaataaaaaaatttaaaaagaaaaagacttgttaaccaagacggggacactcaaacaaggaggcttcgttgcaaacagagtaaagaggccggagagtcaacaaacgggaagagacggaaagatgaggatgaattcaagaggagaggcccctccctctgggatgaatgattatcaagacgaagcggattagaattgggtttattcaaagaacacggatgggtatgatataattactagaactcaaacaagacaaagcaagaagggggagaagaagaaggaaaaaaagaaaaaagagtatggacgggaactcaaaccggatcacaacgcccctccggctaggaaatctctcttcttatccccatccacccctgttgtcggtatcgacggagcatccagagggactcctgatcgagcgtgttcggctgatcctaaaaccggggtcgatcctttcccatttccgtccgaccttgatcccggtccttcgtgcccatacccatactcggcaccatacccatgttcataatcgtattcgtcctcgctgtcaaccggatagttaattcccatccctagacctgcctttcctttcccgacgacgccagagccgggtagagggatagtaggagatgtaggactggttgaggttgtgaatgtaggagtggaaggaacggtcgagaatgctccaaacctggacggatgtccgtttccattgccaactaaagaattgttgttgctgttgttgttggtggtggtggtggaagcattggtggaagaggaagaggggtcgggagagttaacggaagagttggtcttggaaggaatcgctaattgaccaaggttcgttccggctcgacgttgtagcctcgctctagttcgcttgatatcttccctgttgtccccccgacataagcaggcgatcagtcccgagtcgatgattaaaagatgatgagaagaaacatcaaaggagagacagtcgaacaaaaaaaagaggaggcaaacgaaccattcgattcgtaaaaacacccacatccacctcctggccaactccaaagcttccatcaaaaagaccccgctctcgatctcggatatcgaatgtagatgactgctcagttttaaactccatgtgaacctcagaacgagatcgacgatgattgcgaggtaataaatcgttggatctgcaaaatgcatttcctttcgaagtccgaaagggtggtcgtccgagtccactccaaagttgtttgcgccgttgttgttacccccgctgccacccccggagaagggcgaatagttgacggaccgagaaggatgtccgggatggtaagggtacgtagatgaatggtgtcggtgatggtgagagacagaggtcgtccgcttgtggatatctgatcgagcggcatacccggtagggttgtttcctggatacccggtggttgaagacatggttgatgggaatggaataatcgagggtgaagtcaagggtttactcaacgaaggccgtctagtgttcacagaccattcggacggagaaagaatagtgagtccccaatcgttcgtgacatcccaccaaaaggaatagagtgagttgacaaagaccgagagaagcctgagaggcgattgagcaaggggcaagacgttagagcacagacatgtgagaaggaaaagagggtgaggaaacacgaaccacagtcggaagagagggtgttcaccgaaccacctgttttctccgagttcgttcatatcagtcacacctctctcggctgcgatatcttccatgacggtcttctggacggccgagaagaggatgacggggaaggcggtggaatatttgagcgcgttcgctaacggtcgggtttgtttgtaatccgagctgatatactcgaccatacattgtctgaaccggatcatgtatggtattctttttattcatttattttcaagatcatatgatggagagtaagccagcaagatcgaaagaaagcagcctgtacgttcccagagttggatagaactgtacgtacgaagtgatgaaaggaatcaagtatggaccgagtgctccgccggcaccttccagttgagaggccgacaagttacccgcaaagatcaaacacatcgagacccaaaggtcaccaaagacctttgcgaacgacgtcaggatatccgcgcagattacatcgacaaagtgaaccggttcactgagtggtgagaagatcgttcgtttgatcgtctgcacaaacgccatgcgttctcttctccatatccgtccgtagggcgtgatggttccggcgaggacacccagcccggtcaacaaaggaagtattctgtacgagttcatcttgtcctgatccgttccaccggaaagccagatgaacagtatccacccaccgagggaccatccaacgagcacggccaagagaccccaaagcggtcgaataatctctcccgcgcgggcataaccagctgctcctctctccctactagaatacccgccgccgacgttggattcgaaaaagtctccggggttcccaccgagaatggtcatctcctcgtcatcgtcgtcgtcgtcgacctcgggtaagacaggtctaccggtggtgagtgcctcgctggaggaggatgagggagagttgatggcgagtatatagccaacgtcgattccaagatgatggagcaagtgcaagttggtcgtccagagaaagagcccgagcccgatgaggaagagcaccctataagggaggcagaatgatgaatgaaacgatggaacggccaggtgggtatgcgggttgggtgtcagcaccggtggagtgtctatatccatcttgagaggaaagaaagattgcccaagaagaagagatagagggcgggaagagaggatgtgtatacaacgtaagagggcactgagggcccggaaagggagtggtctagcctagatgtaggcctgcgcgacgacctttttcacggtagagtgtgctggaacgagagaagacacgcattcagaccgcatgcaaacgatgagcatggacagacgatgcaagagaatgaaaacaggctaagggaagctgatgggacgaatgtattcttacctatcttggcccggtcggcctgccttttaagaagagaaagaaggatggatggatggatggatggatggaagacgaggccagggatcaggctgagagttcaggagagccgagacgctggttggatgtgtatgctacttcggtcacagacagagtcgagcgagtcagcaacaggatcgggcagccaacagaacgaaggaatcgacagaaactgcacgctcaccacttgtgatggtgaggaaggactatatgcactctctgctcgggcacccgctaaacacggttaagtcccctgatgcctgaccctgaacgaaaggattagaaaattttgtagtctgttttaggaaaagactacgaaactttgtattcacttccggccgctaagattgcccagcagaaaacatcaggcaggcagagcatacaccgacatacaccatctctcctcgccgtgctctttctcgatcgtggacaggatagaactcatcaagcaatcatcaagggaatgggcaagacccatagagcttcaccgtcttataacggcaagaagcagaagagaggcatgccgagtagtacgtccgatcggtcgtcttgacattgactcgtcttgcctcacctccgacttggagttcaagttcttggctgaattcttttttatttttttatttttcatggaacttttctcttttctctttctttccttgggactcttcggtcgacatctgtctgtgtttgtctgttgtctgtctaggtcgggttaagacaagatcacatggttcaacctcagacttttccatggacgtggcgacgtacgaacgggaacttaaagctcaggttggttcgatcagctctttcggctttcggcccaaaggtctcagaggtcgatgacgtgggtgatgagagtgggatctattcgttcacatcagatgaaccatctgggactctattcttgatgagacgatgagacgaaagaacgaggcaaacattctgggcgttgctcatcatcgttcgttggttgactgaccgtcaatctttatatcctcgttctatttggctcgctcggtttccgtttgttcttccctctcttgccatttccctctctccctctctttctctctcacgcacacacacacacacaca

SEQ ID NO: 211 - DNA, 12915 bp, Xanthophyllomyces dendrorhous
acacacacacacacacacagctggccagcatgggactctatgcaagcaacaccgtcggagatgggaattgcatgttcaggtaaacactatcctttctctcatgcgaccatctttcgtactatcgtacctagctctttatctaaccgccggatcgctcaatgtctttcttcctctcttcatcggctattgatccgtaacgcagagcgctctcggaccagctgtacggtacacccaaggagcacatgagtcttcgtcgagaagtacgccagtgttctacccttttctctcgtcagcactcctggagctgcactctgatctctgtctgtctgttcactttctagatctgcgactatctcgatgccaacatagatatctttgagttctttgtggacgatgggcgaccgtttgcagagcacatgcgcgccatgcgagagaacggtgagcaaatctaggcttatatacggttatatcatattcgcaagtgcttgcctgacacatacacactcttgatacaggaacatggggaggacatctggagctcacggcgttcgctcgactaaaacaaaagtggatcaaagtcgtccaaccgaacgtacgtacgagtggcctgatatgtgcgatggtgtatatgctgacctgaccacaacacccgttccgttcctcgtccacacagctcgtctatgttgtttcgtgcaaggacgaatccccagggggtacccctcgacgggcggctggaccaatgtttaaggactcggacgtcatctatctcgcttttcacaactatgagcactggagtagcgtccgcaatctagccggcccccacgccggtcctccgttgactaaggaagtgccgagaccatcaacctcgttctctcctacgagatcatcaacatcgacactctcctcaccacccagccggtcactgtcgcccacatcgttctcagacaaaccgtcggaagtcgaatcattgattcttagctcaatcccttccggatcggcgtcgttgatcaagattcgggagatcactcgacaagtcgccagaaaggagactgacggacagatggacgatgttccgtgggagcaggtcgtcgaggttatcatcgaccaactagataagaatggcgatggcgacaaggaaatgatggatctcgatcgtggccatgacccttcccctatttcagcccccgcttcgaaaacaccgccgcctttagaacagattttgtcccaagaaaccatcaatcaggatcgagaagaccgaggtcgaagtgtactacctactctcgctcaaagagaaggacacccgtacccatggagagaatcaagcccggttccttcgacggacggaagttcgtttggcgagaaggacgatcgatcaccgtccgttgcttcaccaagagttgcttcacctctcgtggccgatgctgctgccggacctggtggcctggctaagccgaaacgaggccggaagagacgatcgccctcggcttctgtctctgcctcggcggtcgcctccgggagagtagcaagtaagaaagcactgttgccgagaaaacagccaacgaggacgtccgctcggatccgaagctcactcgtcccggttggacaaggcagatccgaagtcgagggctcgtcgccggctccttccttggctggaacagacgtctctgtttcctccaccggttcatcttttgtctctggctctggttcgtcggtttcgtcagcaaacccttctcaagggggggagacagagggaacgactgttgtgtctaactcggcgcccagcgtaaagacggtcatcgccccagctctagataactcacagcctgtagacacaacactctctgccgacgatccgactttgatttctgctcgttcgatcccggtcatcgacaacagctcgaacccgtcttcttcagacactcgacccgctcgacctagacaaaaacgttcgcttccgagctctcttcctggctcgtctgctctctccaatggggctgagttgtctgattcgacgtcggctagttctcatccgactgaggatgaggacgaggaggacggcaacgactcgaccacgtcgtcctttgttccttccggtccaaaatccagatcgaaaacaaagccttcggggccgtccggcacgacgaaagcgaagaaaggaccgacaggaaagggaaaacggacggagaggaggacaaaggtggcggaagctagagctgccaggaggttggccgttgcaggtgagagtgttgggggcgaaggcgggcagcagggtgaaaagacactaaagaaacgcagggaaggaaaagaaggtgagaggatgatgacgagaagccgaaaatcattgggaaccgagcctggaggaggagcggcgtcgaaggaggttgggaagactgtcgtcggtgggttcaaagagttgttcatctgagggacattgaacgttatctgcctcccctctcttttctctcctttttatcgtgctgggatttctttctgtcacctctttcttccttctttctcttaataccatcatccacaggacagaacgttgtgtttttcttgtcgattttttaaatcacattcttgctctcctcctgctcatccgttcaattatctttttgtcatctttcaatctgtggttctcgtttcatcttactctactttgcttcattcttcaattctcttcgtctatttcatctctttgctccctttcactctctctctctctctctctgtatcacaccccctttccaatttttcaacattcttcattgcatttgcatgacagcctcgtcccccctttcctttcctcccttctctctttgcacgctcacgcacatagtcatatctcatacttcataagcattctatattcattccatttgccgatgtacatctgttatatatcacatcacccgttctctctctctgtctctggatcacgggctcttcacgctcgaacacccgcaagattcaaggaataccgcgatcttgagctaacgcttggtttttatcttgatccttgcgtctttcaccttcactcatgtttcgccgtttacctctcttttgaaggaaatagaacacaatcactgagacatgtcaagacgcacgagaaagagaacgcgaaagagatgaccaagacgtcttgtgagaaccaaatcgacggctcgtgactcgcgggatgagatgagatgagatgagatgagatatgagttcgttcattttatataaggtgataaaaggaggatatatatgtatatgtgcgcgggtgcgtagatgcaagtcgggtcgagtggactaggaggagattgtatcgcgttggtgttggtgttggtgttggtgttgtttttctctttttcaaaggaaaaagttgtaaaaagagagaaagagaaagagaacgaaagatgtagaaaacaaaaataaaattgaaatccaaggaatcgatggaacaaacaaaagaaaaagaaaaagagacgtgcgaagacagcgctcagatctccttcagagcagctccctcgaacccagcgagcccctcgcctgcctcctcgcccctgcctacatcacccgcggtctccatgcccatcctgtcggcctcttccagaccggccgctatcggcctttctgtctctgcctccttgagggattcttctatatcttcagcctcggtctcggtggacgtcggttgcggggccgaggcatcggcagtagtagtggcggtggtggtggtggttgatgtcgaaggaggaggggcaggcgcaggttgggaaacagcggtgataggcgctgggaggacggaatcggtgagtgaatgaggtcgggtaggtgaatctggaccggccgtcggctcgagcgcgctgggagtggaagttggggtttgttcgggttcgtctgcctcgtcccttgattaatcgtgagtaaaaacaagacgtttttttgttgttgttgttttttgttttttttttaaaataatttcgaagatgagctttgatgttgactctgaatgatctcaaggaaggagaaaaaggagacaagaacgagacacgaaaaggcaaagctcttaccatttgttactgaacctggtgactcgaggggtatccgccgtcacgctccgcaccagccggtccatctccccgtcacccactttgccctcctcgaccgaggtcgcgtactcctcgctatcccaattggtagccacatagtaacccactctgacaaactcggtgtcgttatagagcgcggagaggatgatgactgtgacgcctacgagttcggccggggtcgggatgcctgagggtgagtctgttggaagggaggataaggccggtgcggcggccgagaactcgaaagagttcagaccgaccggaataggtccgacctggtttttgcaagggaagaaggaacaacaccaagatgagcaagacagctgcagaagtgaagaggcggaaggagagggaggggggggaaggaagaagaagaagaagacagagccagacggaccatacaagagtccaactcttgatcatcactctccgccgatccgacatagacaagtttccactcgagatctttggaaccagaaagagtttgtgcggttgcctctgatcagaaaatcccgttggacgcgaaggtctcgccagacggaggacgaagaggaaagggaaagaatgatgagagcaggtataggacagaccttctttcagaggagcgatacattcaaattggattctgaaaacatatggatctgtaaactttgccggattgttgacgactggcaaagcgtttaatcgagggcgacgaagaaacatcagcttgtgcctgtttgcatccggactgagtttattcgggctaccaccaagggttacagatccgatagagaaacttactctcgacgttttggatgttgacgatcttttaggttgatggaagggaggcagattcaatcgtcaaaccgaccgatgaatggatagaaattcgaacaagacttcagcgaccggttcttctggcatgtgttgctcaaaacgatccttaactgtccacgactcacagacatgaccgctttgtttattactttgatgcgagggagaacgaagagcgagaaggcggatcaacagaggttttcgatggaggtgaaggagatcaagagaactcggtcgggacgcgtacacagagaagtaagtgagagaaagtgagggaatgttggacgaagggaagagaattgttgagtgatcatctatcttgtcgcgtcgcgtcgagtcgcgttgtgtcgcgtgccatattagatcagtcgtatacgaggcctgaacggtctctcgactgcaacgtctcaactttctggttgacttttctttcatccgttctttctttttttcggtgaaaggcatctcgagagacagaacggtttgccatctgagagcatctcggcggtagaaagttccaggaggcaagttaagccagaagggaatgaagacacggccggtccacatcatcatatacaccacgtgaacgaggctcatagagaacgaaacacacacacacacatacatgtatttgaatgagtagatcagatgagagaggaacaatgatcgtgaagcacgcaatacggagctaagcgataacgggaagctagcacgagacccaacgtgacggttgatgagctagaaggagaagaagatagggagtactgtcgagagctgaagattgagcgctgtgtgaagtccatgagagaacctcgaagagagagggcgctattgaggttataaaaagagaagaagaagtagggaggaaagaagtcgtttttgagtcatgtgcaagtatgtgtgagcatgtgtgcgcacgtctgtgtatagagattgaatatcagtcgctgcattatattcggcatgacaattcctctcaacggttcaaaaacttgaacgaaggttttggtcaccgaataatcagtagagtagggaaagaggaagatcacgagcatcgcacagattgtgacaaccctaacactggttatctgtcggctaattcatcgctgatcgttagaaacaccgagagaaccatgtgggctaacgaagaaaattttaatatgccgtaacgaggcgcagagtgaggagagaggagaagaaggaaggaaggaaggaaggagggaagaaagaaagaatagatgaacgaatagatgcattaggctgtcttggcttaggtggatgcatgagaagatacgtgatcgtccaggtaaggaagaagaagaagaacgaggaggaagtattttcggctaaaagagaacatgagctgaaataatcaatctgtccgggcataaacggggaggaaaaagagcgagagtagaattgagcctagcttcagttctcgtccgtgtcaataacgataaccggcctatgacggctagacctgagttccgggtacttgtcgttgaaacgacgatcgagattgaaggaatttcgaatagagatcgtataatatgatatagactgtcagagtgatcggataggtcgaccgaagagaaaagatggatgagggatttatgaagatgaaaggaggcaaaacgaaaagttgaaaattgaaagaaagggatgatgatgtatccgagatggcttttttcacgtgcgtttgttgactttattcgagtcgatcgtacgatatatgtggggcgagatgaaaagcaaaagacaaacaagtagatagatagtgaggccatgacatgtatgtttggaaaagagaatatttggatatgggagttttagcaattggttttaattcttgtagttttttcttctttttctttcttctttgaataatatgaaactcttcaaagaccgtccgagtaaactctagaaacaagtgatgaaaaacgaaaaaaaagtgaatgatctctaggcttccgtgattccttccttcctcaagaaaacaaagaaagacaaaataaagaaaaatatgtaaaacaaagtgagagaccggaatgagcgaatttgtacaagaatcaactggaagattagaatacaaagagagaaatcaaggtttgcctgatggatagagaggacataagcgagataggccaacgattgataaattaagcgaggataagagatacacctaggataaccctatattgtctatacgctccaaataggactggtaaaacagaacgcagtacagagacaaccaagtcaatctacaagatagaaggccacaaacagattgtaaggacacaaacagagggcacgaacatcgatcactgggatatgccaaatctgtcatcgagccggtaaatagacaatcggctctgtccagaccctctcgttcggagtcttatcagaaacaatttgtatttgcgccccgcctgcgaattgaactttcttttgttcttctccatggctaacctcgctatcgagaaaaatcttgtacgctccatatctacctataacattgttggcgatagtaacagtgccaggtgcgcggcgtcaaagccagtgaagctgctggtgacgacgtaataaacgctgctaccgtcgcttaatacagcaataggccaccttcccctgaaggatcaactaagcggagagagcgacagagagatatgccgactgcgcacgtgatgattaccgtctatccagcggctattcaaatctggatataaattgaacggtatataaccgccgggcgggtataaaaatagatcgatacgaactttgccctgaacaccccactggcaacacgccatctgacgcctagacctcggaaggatccgtttgaaatcgattctcgctcaccttgaccgggcgggaaatcaatcgaacggggtccgagcgtagaacatcctctctgcgtccgtagacttctgtttcgccgccttcccgatagaaccgattgatcgtgcaggatgtctttctgtgggagatagattcctcagccgtataaaggtctgccataagatcgtccaccctgtctgggtttctcttttccttactctttcttcatcagtatcgtcagaggccacactccacacttcctcgtcctctcatcaagttcccgcacctccgacctcttcccttcttcgctccctttctactccgtctccttccgccatcatgtcgaacattgaggattacgagacaaaaagctacgagaaagatacgggtgccacccacaccatctttcccgctggggaggagtccaggccggaagcccagcaccttcaccgagggctcaaatccagacacatggccatgatcagtatcggaggaggttagtctagaaccttttcttgcgttctcttctttgcgctctagaaagcttatctctccttaattatacagttatcggaaccggtcttttcttaggtactggtagagctcttgcccacggaggcccgcttggtctcttcctcggttacaccatcatggcctccgtctgtcttgccaccatgttggccctcggagagatgatctctttccttcctattgaaggtggtcatcttacgttggcccaccgattcgtcgatcctgcctggtcgttcgccctctcttacaactacgcctacagctggcttatcattcttcccgctgagatttctggtaagcgtctttccctcatctcttgattagtttccgcttctctttccgttgtattgatctcctattctcttgcttatctctaactttccccgtctcagctgtcgctatattggttcaatactggaccactgcctactcgaacgctatttggatctcgattgctctcgctatcgttattgtgatcaacttgtttggtgcccgaggatatggtgaagccgagttcttcttcgcctccatcaaggtgatcactatcatcggtctcattatcgttggtatcgcaatcaactgtggtgccggaccggccgaccagggttacatcggtttccgatactggaagaaccctggacccttcgtccaatacgaacgcattcccggatccctcggaaagttccttggcttctgggctgtccttacccaggctgccttctcattcattggaaccgagatcgtcgccatcgctgccggagaagccgagaacccccgacgaaacttgccaaaggccatccgaacggtctacatccgaattgttgtcttctacatcctcggcacgttcatcatcggtcttaacatccctagcaacaacgcagaactcggtcaatacagcgatgcccgagcttcccccttcgttctcgccatcaaggccgccggtattaagactctgccctccatcatcaacgcttgtttgatcacctctgcctggtcggctgcgtcttccgatatgtacacctcgtctcgagccatctactccatggctcttaatggattgcttcccaaggttttcactcgaaccaccaaaaacggtcttccttgggctgggcttatcgtctccagtctctttggtctcctcgcctacatgtcgctcggtacttcggcctcgaatacctttgattatttcgtaaacatgaccgctatcgctggtctcatgagttggcttgcgatctgtgtgacctaccttcgattccgggccggtatggatgcccagggactcgaccgagctatacttcctttcaagtcccgatttaccaaagtcggagtttactacgccatcgtcttgatcatgatcgtccaattattctccggatggaccgttttcctcaaggacagctgggacacagctacctttgtcaccaactacctgcccttggcgttgttcccggtcctcttcgttttcaagaagttctactctaagaccgtctggcgaagggctgaggacatggacttcgtcaccaacattgccgagatcgaggccgactcttacgttgttcctcctcaccccaagtggtggggtcgattgggcaatgccatcttctaaacaaagacaagaatgctcagttttgttctcctttttctgtccctcttttctccacattctctatcaaaaatcacatagtttgtcactccgttgtatttgagcccaatcgggtttcgcctcttctctggcctttcttgtttgctgcatagtttgctgctgccttcgtcttcttaaatactattatctcttatctctcacgatatccccttgtacgcttggtcgccccggttgtaatagaatgggctttttatttctccctcaacgtcctcatcttatcataccagctacgtcattgaaacggctctgacgcgtgacgcaattaaatttcagacgcgtccaacgacgcgctcagcccgatcgatcatcatcttgagagtcttcttctcatccttctctcaacctcaacatagaagaatccaagttggatgcgctcgttcgtcgtcttgcttaacatcaacatcagagctcgactagtcaaccctgtctttcacccagcagtgagcaccttccagacccaatccacacgcagatcgtttagttaccacgttagcaagttgaatatgccagagaagagaaagaagccgttgccagacgaggtggacgaggacgtgaagagacacaagccagagcaggctgagaaggagaacgagaaggaggattggttcaaaggttccgtttgtgagttccttcaatccaatctctttcttccgaatggaatcccgctccaagaatcctgatcgccttacccaacattctttcatacacacgaacagacccaagagtgtcgacggttgaagcggccgatcggatggatgccaacaatcctcttgagctactggagagtgcgttgaagaaacaaggcggaccggaggccgtgagtgatgccggagagtcggtcgtttattggatgaatatggaggatatgagacgttcgtctcccgttttctttgattcactcattgcctacatatgtgtgtgtgtgtgtgtgtccctaggaagtcttccattgctgacggtttcgtccattctgtgtttgatgaccgactccagtcaaagacaacaaagcgctatccaaagcatcagcgtacgcgaataagaacaaactcccgttggtcgttctcttcccgatctcaccgggagactacaagtctcacgacagatcggccagacggatcgatttcatgttgagaaacttgcgttctctcaaggtgtgtctccttctttcacttgtctctctagatttcaccatttttctcgaacgcatagtcatttactcttggtttggtccatacgcaatagacttcgttgcacgagctagagatcccactccttcagttcattcatccgactagaaagacacttcccaaccggatcatccagatcgtcggctcaccaggtatcaaagcgagacacgtgtttgccaacctgtcgtacgaggtcgacgagttgaacagaaatagagcggttcttgaacagggcgcagacaaaagaatctgggtagggttcgaacatgatcgttgtgtcgtcccgcccgggggtgtgaaaaagaagggaaccggtaccggagcttacaccgttcgtccttgtaactttcttacttctaaagagaactcaccccgctcgagtctgatgtctattcccttcatacgtttcaacgggctttgaacaatcaaggtttattcaccctggttcagacaatggggctcgatgatccatgaggatccctcattgtttgacgaataccctaatcctcagccgaaccccaaagggacactcgaatccttctctgccaatgcgtccggcgacaacaaggatctcttaaaagacattccggattatattgaaggcttccagcttgacaagaccgacgcggaacagatgagagccgtccatccggggggcgaacatgcggctgaaagagtgctcgaagcgttttttcacacaaagtcgtcttcgaaaaagttggggccagtcagacctttcgaggatgacgatgaggtcgtcaagaaggggaactcgagagtggaagtttattcggatgaaagagatcgagcagatcgaaactctacctctaggctttcgttagtgtcccctttgggctactatcctgtcctttgctttcctattctcaattacacggcttcggactgaaggtttctttcttggcgattgtagaccatacctcacgtcaggcgtgttgtctcctcgacagatcctcactcatgtcctcaagttttccggaaagaaaaccgtcccggtcgataagaaggacggtgttggaaactgggtaggcgaggtcgcctggagagacttctacaaccatgttcgtccatgactcgctttcttatcccttgcccttcctgagaatgatatctgtcgtgcttacttcggttgtcgaactgaccatgggcgttcacttcaccggatacactcagatcctggcggcattcccgagggtctcaatgggtcaaccatacaatgtgaaatatcgaggtgtccaggttcgagctcttactcttgttgcatcgctatgcctcatgtcggcttcttaacttatcattatctcatgcttcctagtgggagacggatccggagttgctagaggcttggaagacgggcaagactgtaggtttacactattttctccttcaggtacacttgatacgaagatgctgatggatttgtttcctcttcttcaaattctctcttcgcagggctgtgcgtttgtttactccatctttctactctgagttctcacacagatatctgaactctttcttcatgtgataaaccgaaaattatactaaacagatcccgtcgtggacgcggcgatgcgtcagatgaacgcccagggatggatgcacaacagggccagaatgatcagcagttcgttcttgaccaaacatctcttggtcgattggaggctgggcgagaggtacttcatgaaccagtttatcgatggtgatctcgccagtaacaacggtggttggcgtaagtcgatgtcttcatcttgtctcgtccagaagg

SEQ ID NO: 212 - DNA, 3161 bp, Xanthophyllomyces dendrorhous
agaatggatcgcttctgtaagtttgattctctatttcggtgtaggctgtagattagtttgactgagactttgttctatgctcttcgttttcattcctatccgtttatcagaccgggtcggatccccagccatatttccgaattttcaatccgaccactcaggtcagtttttcagcctgccgctcctcttgtaacatgctcggaggcatgtcaacttatctgattcaatcctatgggatgtcctgtaaataggctgagaaagctgatcctacgggcgagtacatcaagcatttcgtcccagagctcagaaacctcaaaggcaaaggtttgtttcctctcttctttgctttcctggaacgaaagggggttctttcttattcaacgttgcatgtgctttgtattgccccaaccacacagcactgtatgacccgtacgggcatttatcgcctgcagagtttaaaaagctaggttatcctatgccgattgttgaccacaagaaggcgagggagcgcgctatcgagcggtacaaaaacccaggggtcaagcctgatgaatctgctgacgggtatgtagtaatttcttttacaaaaacagggtttgttatctgggttatgtttcaagaaacaacgttgttaacatgttctgggatggtgtggctttgtatgtttgttgatagacctacacaggatgatatcaaggtgtcgaacaacgtgaaaccgaaagtcaagaaaagccctgcagggctcgagtcgttcgggtttatatcaaaggcttaaactgatttaactattatcgtttgttcttggtcttcctctctcctcatacaatgtatgcttctctctatcctcgatttaatggctttgttagatattccgtcaaaacaaggaaaatgagcgaaaaaggtcgtctcatgggtggatccgattagagaaaatttgtagtctgttgtaataaaggactacaaatgctttctattgatttctctatatatgataatttctttcttttacctattttctggccaacaccatcttccaatccgtccatcaatcaaccgagcttcatgtttggtcagcctgttcgtatctactcgtcccctatgctcactgatttcttactacatgacctctggctcctgattccaagcccaactcacgcttactacaaaatctttgacgaatatgaaagcagcaacaacaacaggcggcatcgtccccgttctcatttggagcaccagccggaggatcagctcctaaaccttcactctttggagctccttccaccggtcaacagagcgccccttcgttgtttggatctcagcctgctcagcctcaacaacaacaacagcaacaacaacagccgggaagctctctcttcggtcagcctgctgggcagcaacagcagcaacaaccttcgacaagcctgttcggtcaaccggctggtggtcagcaaaccaactcgacaacatcaactgggctctttggtggtggaaacacaggacaggcagcaggatctagtgcgataggtggatcgtcactcttcggagccaaaccggcaggatcgacttttggtggtgggttgttcggccaacctgctcagacggggtcatccggtggactgtttggccagcctcaacagcagcagcaacagcaacagcctcagcagcagcagcctcagcaacagaacatgtttggaggtggtggtggtttgttcggttcaacagctcaacaacctcaacagcagcaacagcagcagcagcagcagccccaacagcaacaaccgcctcaacagcagcaaccatcagggatgtcgaaaacgacaaagttcacagagctaccagagtctgctcaaaaaattatcgaggggatcgagtcagttacctctctttcaagctctttcgggctcatccccaaagatgtaatcatctgattttctctcttctgactcttgatctcgctttggtttcctccgaacacgactcggtcacagttcgttcatcatccaacaaatcaacctgtcacattcgctcgctcaacatccactctccgaagcttcaaacgcatccgcctcatcttctcttgctctactatctagtactacctcggttgctcctacgatccctcagacggctggtcttttaaaacaattgacgaccgttcgttcctcttctttttcgtccattgtctttctatttgttgacgagttagccgatagggcggttttgctcgatccattttggggaggagaatgaagaaaggctgggctgactatttcaactctgttttgtctccttgtgatcctttactctggcatactatgtcgtcgtcttttgttggcggcataaacaggaaaccacagcgttgaccgctcacctccagagctgcgctcgaaatgttaacgatcttcataaacgagtttctgcagatggagaagatgccgttcgaggtgctcggattatggatgcttccaaggtgacctttttttctttagatgttttttcaactagttttgttcctccatatctttggaaaaacacacgttcatccgaactgactgtctcccgattttctctcgttgaacacgacgacaacgacagaccgcacaaggaagacaagctttgaagggtcaagcaaaattccccaacgaatactttacaaagctcaccgacgagatgaccagtcgagtcagagtctaccagaccgctatggatgtttgtcccctctgttctcttgcgttttctttgcctttgccttgattccttgtacacatatatgtcattcgatggatcggtactgatgaacgttctgtctttttccaaacaccagcaactcactcaaactctccactcccttcttccaccatccagcttgtcgagctccagtctgtcgaacccgcttccactccctccacttcctacgccccaaacgatatcccacacgctgcaatcgcaccaagtcctccttcaccgacttgccgctcaggtaggattcctcgacgaagagctgggcgcgttgaaagcagagtacagggtcctgtggagagaacgtggcggacagggcgggagtgtgagggatgtgttcgagatcgaccagccgggttcatctgggtccgggccgacaggagcagggggcagagcaagacagggaacagacgggctcggaa

SEQ ID NO: 213 - DNA, 3029 bp, Xanthophyllomyces dendrorhous
cccctaccctccaacccctttttggtttctttcattcttcttactctttattattcttgttcaccgatcatatgtaatcgcttccttctcttttggtcgttcattcagagatggttcggatctagactggagagtggaaaggagaatagggacctgaacgcagcgctcttcgaggtatccagagaaagacgatcacatagacgaagagtagatgaaacatgcgtcgggaaagaaaagagtgcataaaaaaggatgcgggtggtggtggtggtggtgatggcagcggtgaagaggcaagttaagtaaagggttgcagagattcgggaaagaaagaggacaacaacagattaggaaaaagaaaagagaaacgagacatgatatgaagcatacacgtggtttggaaaggaaaaaaaggggaggggggatgaccagggaagaaaaaatagaataaaaaaggatgatgggtgttcggaatcaagagaatgaacgacagggggatcactgtaaaggttctttactctcgcctagtctgttcaaatgaatgtacacctatttgaatccgattaccaaacatgatcatacaaaagcagcgatggtcagatagagtgtttcataaggaaacgaaatgtagaaaatcaaaatgaaatggaacatacgtcggtaccgctaaaggaaaagaacaaggttgtgagagaaagcatgaaacgggtcagaaactttattgatcttgatggatttcaccttcaaacacctccatgtatatatctcaagctgcaagagagagaaagagaactcgacctggacttactagccttccatctgaaagcccgaaaggcagaccaaacaaaagacacgaacggttcagtctctgccggttgatgcgactgcgatcaaggaaataggtcgactgaagaaacacatacactgatcaacctaaggtcacctccaaagaacctcgcgtactattcgacctcaaatgaatgcatctgttagcaagcgcccaaagaaatgttttttttttctaaataaaaaaaaagaaaaaaagaaagggaaccaaccagtcttgataacgggagaccataaccgaacccagccatgggcgcgttaaagtccgaagtgacatcgtccaacgtggcggcctccatggtggtatacatgtatgtccagatcaatgggatagcacttcttgggattcctccaccttcatcagagatcttgatggtgatgtcttcctttccttcgacgacgacgactttgatcggtgggtattctcctgggtggtccgctccgaatcgctcgatcgtcgctcgtagagaatttttgagaagctcgaaaatgatgtgcgctctgtgtttgtgcaaagagagtaccaagtcaggggtcgtcgctttggccttttatttattctattctcgatagttggagttatgaaagattggaagaacatacaaatgtccaggcacataagggaacgccaggtcttccggacaaaccagctggacttcgggcgctttgaaaaggcagtagtgatcagacgcgacaaactttgcgttctctatcgactctgtgcacatgtcaaagatgttctgtggatggcggtgaccggcgacgtcaagatgatcaggccgggatacgaacgatcatggtgtcaagtagatggatggcttacggcttgtttgcagatgattccgacatattcaggatgaggaggcaacgtgttgagagcgatatctaaggaagagccaaatcaacagagataagaatgagagacgatcggatgaacaaccttgggacgcgtccgacaagagagactaacgttgaccgatcaggaaacgaatcccaattcgactcatatggaaccgatcgaggaactgttggatgctcaatcctatcctgtccgactttttgctatgcttccactccaagatacctcgtctgagatttttttttcccgttcgtgcgcgcaagcaggaaatcgacacagacgtcagtcaacggctgccctgagttggacgacacacacaaaaaaaaaagaaaaaaaaaagaggatggattcgaagatgacgagctactcacgctacagtcatcaccgtcgggtcgtgtctggctttgatcttttggagacactttgtgaaccggtcgttgtagtcgtggacctcgggtggccagatgatgtcctttgtggagccataatatctgatcggaagagattgggttggagaaggcttagcgtgagtggtgtggaagatctgaaggtttgaacacaccttttgtcaagagggattcgcatcttgcccttgtctggctgtgaggatcgatagtagtgcgactccagagaagggttgtccgttgcttccggtaagggtctaaggaaggaaaacaacgccagtcaggacaaaggggatgagagaagcaggaccgggatgagatgtctttaaaagaaaagagggaggagaaggacatacgtaggtgctttgactcgaagagcatcctggatatcttccggtagttgcggaggcgggaacgagacgagctcctggatgaatgaataggtaaacaaaagaccaggtatccgtagagagtactcggtcgatgagcatctgagatctcttcaggcagagccgaggaagctgtctggcttggtcctcaaccgagaccactcctggaactgagcatgggataagaaacagagaacgaagactcacctcgaaactctgagcataccactctttgacccggttaatgctcggcatcttgttcaagttttccggtagctcatccaactctttgactctgtgggacagtctgatgggtagctcttcggcaagaaactgagatgctttgagaagtgttccttgggatggattctgaccgaaacctgtgagaaggaggaggaagacgaaggagaacctgcacggtcagagagatggaagatccgtggtgaggaaaaccaagagggaaggaaggaagaacgaacgaatcatctgttgcagggacactacatgacccaggagcacccacatcccgac

SEQ ID NO: 214 - DNA, 477 bp, Xanthophyllomyces dendrorhous
aacatgaacggaaaagaccacaaagaaagcaaagagaccaaagagacaagcacagattcagaacgaagcagacgcgagcacaaacaaagcagatcagccagacggccgagccgaccaagaagactgaccggcagtgggcgcgaaacctgcgaaatgattgatcttgtcgtacgtgctaggagggatcttccaagccatgatgaacgagtgattgtgtatctgacagaacgagaacgggagtagctgcaagaccagatgaggctaaacacacgacggctggacgttgttgatggtgagcaagacgagcgtgaggaaaaataagaaggtgactcgagaaaactctgaaaacgtcacatgcccaaaaagtgtaaactctgaaagccggatgtccgagttcagccggtgcttcgttggcttgtccgttgggtagcggggaccccatcgtattatttaatagacacacacacacacacacac

SEQ ID NO: 215 - DNA, 5385 bp, Xanthophyllomyces dendrorhous
cacacacacacacacacatgccaggatggcgacagaaaataaagagagagagagagaaagaaaaaaaaaggaagggagaaaaaaaagaagaagatattaatggcaatggctagatggtcgatggtaatacataagaaagaagagaacaaaagacacatccccttcggcccagatctcactgccagatagctgcagaggtaacatggaacaaagagggcatcggggcgtcgacagaaacgatggtacatacgaacagacacaagggagaagagaaatcagacaaggcggagaagaagaagaaggaagggagagggaaggacaagtccaagaacgtcctctttgcgccatctcacggatccactcgctgccgcttcaaccctctgtccgacagatcctccccttcgacctctccggcaccggctgaatccccaacggtgccaccgacaccggcatcggccgccccaatggatgccgccaccttgtccttctctgtggcaagctcgtgctccaacaaccggactcgctcctctagatccaccctccggtgtcgttcggcctggacgagcgctttgagatcggatatcgcttggtccatcatcatcttttccatcgcccacttctcacagttcgtcgtctcggacgcctttaggtgagagatatagtccgccgccttctgcaagatcgtctgtggagcggcaggcaagggtcgagacagaatccgggtcagccagcaaaggacaggaatgtcaccgaggtcaaaacgaaagacgagagactgaccgatttgttcttctcgacctggggcagataattggctagtgcctcgattcctgcgttgatcttttctcttcgcttcttttccacgtttttctacacgaataggagagttgagatgatgtacaaaagcacacacgtcaaaaaggagacaacaacagaacaccttgtcagccaaatgagttctatcggccaggcaagtcaaaagaagactcaaaagaagaagaagaagaagaagaagaaaagaaaaacacccacatggttgtccttcttgttctgcacgttggccaccccgttactcgtccgtcttctgactccaccgacacctcctgaattctcgccttccgttgagccgataggttcagattcggacagctttctgatctgtcctcccagtccaccgagagattctgacgacccaccgtctggcccggtcccagttccggcgcctcctcctcctcctcctgccaccccagggggtaacgtctgtcggagtccagtcgatctcgagacctgacgcatttggttagctgacattccaccctgtctgatctgtcctccggactgtcctcctgaagaagaagacccggcagcagaattcgagccttgctgttggagaagagaactctccggtgcggaaggcgcgtccggggcaggactgtacgggccatatggatcatgctcgttgtgttcgtggtggtgatgaacgtcgtggtgatgaccgtgatggtggtgatgatgatcggattcttccggatgggaatggatcggatggacgtggacgtggacttgggcgttctcagacacgagtcgttcgagttcatcgatcgtcgtggtcggatgcggtcggtgctcgtcctatcgagtcgagtcgagtcaagtcaagtcgcgtcgaaaatgaagggggagaggaaaaaagaaaaagaaaaggagaggaaaatcgtcagcctgttctcgagatcaaacgaacccatccgcaaagagaagaacgtgatgaacataagaacatgtcaaagaaagatatacacttacaccgatgggcagagctgcccaaaacgccttcgcgtccatctcgtcgaacggctcatgatccccaacgccaacgccctcgccgtcggccccgtcgtggtgaacgtgatcgtccggctggacttgaacctggccttggacgtgatcggatagttctacttgtgaatgagggtgtggatgagagtgtgaacgatctgtcccctcggcttccaccccatcgacgtcgacgtcaacgtcgacctggattcctgagggatgcacgtgtccgggcacgtgtcctgttccgccgccggtggtggtcgaaccgttgtgatgttgatgaagatgaagatgagaaggatgatcctccgactggtcgtctccctgaactggggcgtgtggatcggaccggacagatgctccagctccggcagagccagctctgagcccaccggtctggctgctgtttgtctgtccgacggccgaggcgttggggacagccggcaacgaggatttcgagtctgtggtgatgtctggatgatcgatcactccatccacctcggaatccacttgcccggatggatgagcggatggatgtgtctgtttggaaggtactccgattgttgacattgctaagaaaggtcgtaataggtctcacccgaacagtggcaatggttgggagatggtgagaggaaggtgggagcggaggaaagaatcttctctgggtgaaactttggacgcgtctgttcattcttttttcttctttttttttgggtcgcttgctttcgttcccgtccgggaagtttccctcttcgtctcttccttgcttctctcgttctcgttgtcttgtctatctggacctggttcttgtcctttggcttggcttgtctcgtcggtgatggttctttttttttctctctttggctgagagtatccacgaaaaacagcgtgttgagacactgcatatggggtgtctctcggagaacgcacaccatgatacccgacaactcagtctcacacagaccgtcctgttctctctgattttcttgtcagttccgttttggttcgttttgctttgattcgtctcgtttgctcgtctgccgtagaaatacatgaaaacagaaaggatagatagttctttggtgtattgccacgggatgcggcaaagaaaggcgaatggagggtaggcgaggtcggcgagagggagagaggagggtaaatgaaagcgagcaagattgaagcggacccaagaaaagatggaaaccgagaacccaagcaagtataaagagagagacagaaagagagagaagatcaagatgagaaaggccaaatccaactccaaacgctagctctaggcagactcggtgtaaggcgggccgagcatggtcctgaacatagagagtactccctccacgacgatcaacagcactcctcctccaggagccaaccgaagcaccttgggggtctgtaggaaggaacaaagaacgtgtccaagcaaaacagttgttagatcagtctcgacgtgttctcatacatgtgtatacacacgctcttcacttctctcaggaggaggaaaaaaaaacagaatggaaaaggtagactgacgaatcctcggtagagcgcaccaacaccctcgttcttggcgatccggccgatctcgataaacgtccagccgatcttttgaccagcaggcatcgactgcgctctcgacttccacacatcagccggcgtgttcaatgtggtaccaatgaatcctccgatcgctccggccacaaagttgttgaacagctgctcggatttcgactggatgacagtcgagaaaagatcgaatcggtcagtcggattgactatcaccaggatcaaaacagaacaaactcacatcagccttgggaagcatacctcgaacggaaaagatgcatccgaagtatcctcctacagaaagagaaaaacagagcgatcatttagttcagcttgacctcgggagagacgtcccagaaggggaagaaaagaaaaacggagaaagcaggacaaaccgttccacaacacgtgcctccagaaggtagcctccatacccttgtagagacctgcgggtagggaagagggagaaggacgttgtgttcagatggatatcgatgggaatagacgaggatgtgtgaaaaagaaaaagaaaaaaagaaaagaaaaaaaaacatggtcagtcttctcgttacagccagtccgacagataatgaaaagaaaagagaaacgacgaaccaagaggtcccgaggcggcagtgacctttcggataacatccatactgcccgtgtactttgagttcttgtcttgcaactggagggccggaatgaaagcaaagatgcaatcaatacaacgtcacatacgagagagtcaacaaggaagcaagaggaaagaaaggactgacgttgatcttgacaccttcaaacggagtgacgattctgtaggacggatcaacgatcagtccgaacgaacagagacagcagacggacaagagcaggtgtgaaagaaaggacgtacaaagattcggtagcacctgcagacatacccgtcaggatggacaaactctgagtcataggagtcttgccgtcattggtgtagacctttccccacgcgtcgttggcggcgactttggggataaagaaagatcgaggagaaacgtagttagtatcctgcgcgggccgttggaaagacatcgaaagaatgatctaacgtacacttgagagctcgcttgggagcctcgagcatgagaggagggaccaatcctcggtacaatcgtccaaagctatgaagaacattgtgagagatatgtgatctcggtcagcgcacaagtagttgacacatgatgagggagaagacaacgaaagatggccgaaggtcaagagtcgaaacgtcggaaggaccggagtaaaacgggggaggtcttaacttccggccttatctcttggaattctctgcccgaaccaacaaagagttgtggtctgatggattggtttcttctcttctcttggttctatgggaaacgccgcagagggcatcctgagcagaacgcttgctatgtagtagaccatggcgatggtacatgtcgaataggacgggaaacaagagaaagacaggatgatcagacgcacccttcggttccgacgatatccttgaacgtggccatcatgccgacctgcttgccggtcgcgagctgctgcctggtcttgacgacatcgagcgggtagagggtcaggatctctgtgattccggcgatggcacctgcagcgaactggtactgaaacgggagagcaagagctgacgaaagagaaagaagaaagaatacgcagaagaaaaaacgaaagagccatcagttcggacgtccggaccgaaggacaaaccaacggatggacggatggatggacagaactcctcagaggattcgaccccaggcgaggccaaacgaatccacagcacactcacgctgcttcttgggtgttgtacttgaaggggcggacatgaggatgagaaggaagagaccaggacaagagacgaggagtgttcaagacggagagaagagctttcttcgttggtgatggtcgtcgatgggc

SEQ ID NO: 216 - DNA, 3068 bp, Xanthophyllomyces dendrorhous
aaaaaagaaaaaaaaaaagaaagaaaaaaaaaataatccgaaaaattcgccaatgaaattccaaacgattcaagtgaagaaggtccaagacgctttctttctggtggtggtgttgctgttgctgctgctgttgctgctgttgctgctgctgctgctgctgctgttgctgctgttgctgctgctgctgctccttcgcatgttaacgtccgagtgtgcatgctgccatcgtatacatccagtccgtaggaaagacacacagaaagcaagagaggccaaatgttccatcttcatctccatcctgctcctcccactgcctgctcctcctcctagacatgtctgtggtcatacttccgatgcttgtcctgctcctgctcctcccgcgttggcacacaaccgtatctgagccgttggacgacatcctggtctcgtccacgcatctcccacccatctgatgagctacccgatagatgagatctaccctactgccttggccggctgactaagcagcgaacgaaacagtcaatcagcatcaccttctcctcatcatcatcatcatcaccttcatcaccttcatctcccttggtctctactagtaacggtcatcgtcaagcaaacgttcagtccacgataccatcgatggcctcttcagcttcatcttcccctcacgcaaccgccgcatccttcaggagactcgtctggcaaggttccgtaccggtgagcatcaggctggctcaagacacacctcccgttcagtctggtggtgtggacgcgtactttgtgagttcctatgtttctcatccgtccgtccgtccgtcctgttcaacagaagctgatagagtcgctttgaccaaccgttgggacgatccttcagattcaggctcccagacagagctatctgcctctgttgcttcaagacatcagggaaaacttggtcgaacttgcactggacgaccaagcactcgctgctaccaggcaacaggattggtggttcgaagatgaagccggtagtggcatcacgagatggtgtgtgtgtccttctcaatgtgttctctctttgttatctcatttgtcttgctcacctctctacctctctacctccccttcacttttcccccaggcactggccgataggccttctctacgatcactcgatcatcaatgatccatcaagatcgccaacgattggcaccaccccatcttcgccaaccgctccgctaagactgatccttcatctatccaatccaccagcagaaaagctgttgctctcaaactctatagacgcttgtagattggcatttatgagcgcgatcaaagaggctgactttgttagatggggaaacgtcaaacgagttaccggacttcgcaagctcgaccaggatagtctctgggatggtctccgagcgagtgggtaattcatctttgttgttcactacttccttttcatcatgagctgacgcttcgctctttcctttattttttcttcatctctttctgttccgctttcgctcgctcatgttcactgccctccctcttctagatgactttgacctgcatgcgaaagtggcgtcccgaatcctccctctgcccaatttctctcctaactcatccgatcatgggtcttcacagccaccgtccacccacctgctcgctcctacctctcgacaacatctatcccgaccgccttcgactgaaccagactcgacctcatccggtggtaactcgagtctggccagtccgaacggaaaaccggatagcgcaaacgcggtcagaagcgtccctataaagattcacctcccagaagcggcaggcgtcttgcagggcgtcgttcctccttccgagcccaatggtgaactcccttctctcttttttcttcctctttgtcttacggacatctgaccgaacgttctgtcttttcccactaaaaggcaccccaacgacgattcattcatacctgcattcatccatcccgctcctctttccgaacccaccctcgagcctgaccccgtcgactctatcgactccatccccctcgctcgatccctcttcttccctgtttgttcctccgtatacacatccgggttcacacacacagccctcgacgtcaacatcaacatcggcttacacattggcgtacccaatcatacaaggcatcgtaccaccgccagagacagagatcgcttggctaggcgcttgtctagtaggcgcagatggttggctcgccatctgtatcgggatgaacgcctagccgatcggattccttacgtatctcgattcttttgttttcctctgtcattcgttgacacctttttcttgttttttcttttcttttctcttcttctttggtgagcgggggtgagaatatatgtgatgtgtttgaacaaacccagatccgaaattcatacgagtcaggacttttctcagtccttttcatgttacctctttccttctttcctctccaaaatatccatagataaactaaaacgaatgcgataagaaagagaaacagtcgcttgtaacctatcaaccatagattaggacatccctgtcctactcatctttttttttcttttctttttcctttgggaccctctcttctctttcaaactcttcctcctcaatctcacagctcgcccgaggatgaagatgacagaattgagctttcagtcaacagtgagctcctggtcgaccttgccgaactgttcgaagaacgtccgcatgaacgcgatactatgaatccccagttttccacacacgcacagatcaatattacatcagtttcatcgtcgatcaaacgagagagaacgagagggcatctccttccttctcctccctccgagaagagggacgaaaggaaagaagtaaaaggatcggacgcactagtaggcaacgtcttttgaaccagcggtctccctgatggagtgcatggccaactgagcgagtcctatatcgaccgttcgaacgttggtcgacagatgaggtccgactgtcgatccgcatgtactcttcaagtccacgcgttttatcagacccatcggatgagggagtcaacaaagagacgggttccaagg

SEQ ID NO: 217 - DNA, 35292 bp, Xanthophyllomyces dendrorhous
cattaatcaattaaatttagatttaaaaaaaaaaaaaacaatgacctacgtcgtttcgaacttcaaactcttgaagtggtacgcccgcactaaagccgattttaattccaaaaagaagattagttcagtcgatgtctcttccaaggacctggccactctgatgtacaaagagaaagcaagacaacaaaagagaagaaagaaaggcaagggaacatacattttggcaattcgccgaaggacgaacgtcgtttgagcgtttgaggtgtaccgctgattggcgttcgtcttgataaccacaccacctcccatcgacggttgactgctccatccggcaaagcacatgatgtatcagaacagctccttcgactcacaggtctcgattggtagcccaggaaaacaagatcaaacaagaaatgacccactgcaactcctggtgtttctctgcaaagttggggtgcatcgcgtgtcccatatcagccgaaacgaggaaactctttgcgagcgcttcatcagtcctgcctacgatcgtagagctgtccgcctctgagacgttcagccctgcagctgttaaccgagtgacgagcgatggctatttatttttgtgatcgtccgagagaggtgtcaaattctggtgaacgtgatgacatgtacgtgacgagaaggagatactgacaagcatattggactctgctccgtggtgactgacagaaccaacttcctgatcgacccccaaataaatacactctatttgagatcctttttgtccagattagaatttcaaaggacgtaatagatagggaacgaacctcgtgatcaaatagtagaatggcagaagcgggtgcagggctagagctcaaagccgatccagcatttgtaaacgagtcagtcagggcctcgacagcggcaaaactggacatcaggttgtcgatccgaggactaaagataaactcgttagaaagaccgcccagacaggcaggctgggtgtcgtacaagcataactcgaaatcctggatctcatctgccttgcagcccaactcctcagccaagagccctaggagcgcaggatgatgtttctccttcatctcgggcgatccaacgggcgtagcaaatgtcgaggcagcggaggcacttggcgaattcagaatcgacgaaacgagacctaggattggagtgaattgggtctccttgttgaaggtgaaggagtcattggagcctctatcaagatggatagccaaggaaggaatccgtaacaaaggcctatcgatcttgatcagcttggagacaaacttctcatcctcggtctgaacaataaccctaccggccagactgagatctcgatcaaaccacgaccgccagatccctccgccatagagttcacacgcgacctgaagccagtctcctttgaccttgttgctgacaggtcgaatcttgagacagcatgagtccacatgagtcgcctttgtatgaaataatgacacaagttgaagccttttcagagtctgcacgaaaagaaaagaaaagaaagatgaaaaagggagagagctcagaacgaacgataaggccaacaccggattgaccagagatgaaggaggagggtacggcaaaggcagccagagctgactgattcctagtaaaatagtagccctttccaggcttaatgatcttggaccagtccgaagactcggaaatcttcgtctgtgtaattgatcagggcaaggggatgaagagaagtacggaagatcgtcagctctatatgatgaccagttggccaaaatgggaagcgggaaagactgacaaagccggctttatcgagtcttgcaacggccttagccacagcatggtaaggcgttggagaagcgttcacgaaatcgacaaacttaagggcagctgcatcgttggaactcgtgggagatgtgccagctgtggaatgttcaggagagaaccgggtggaaagagagaatagcggagttagccgaaccccgtatcttggtcaattctcatgctatagagaggaaaacaagacggaaataagaacagtgaagcgaacagatagacattttgacttgcatctgaattgagatagagaaggacgaagagagaaggaagaagacgattgggagttatgagtgtgtggtagtaggatatctcgaacatgtacactgcatggctccatccgtccgacaacaaccctaacccgatgatggtcaacacatggtccttctagacacagctttcgggtctatcgtgaagcccgacgtcgctttggccgagtaagaaaggtgaacatagtttgagtgcgctgagtagaaggaaatataaaacggatgattggctttttataggaaaaaaaaagaaagaaagatggctcaactgtcggcactgaagattgggatcaagaagagaagaaacccgcaagttttgttactgaaagtcgtttgcagagccttcactggctgctcatcatacagaggatagcatgagccaaccgatttcaacaaagaccgtattcaacttaccttcgtctccaagctgagaccattgtttgatacaactacgtgtgttggcgtcaagtgagcgcggacgaacacaaccgagtggcaggttgaccaactaaatcaacctcgtccgttctcactcgttctgatcgggtcaatgtacgcgacaggctgcgacgggtttgaaggagacggtgggataacataaaagaggctgaacgggtctaccatcagctggaagcgaactctttccatacacctgggatctaattgtcgcatggagccttcattgctctcctcaacgctacctgtaccgtatctatcctagaggtactcctgttcatctgcctgtctgcctctcttttcacttctatcttgttcaaaccctcatctgtaccgctcttctgcacaccttctcatctgtagagtcgtctcaccattcattcatccatccatccatcctccctctcgaccacttatgcacaaagatccggcttgatatcaacgcggtcaggatgtttctgccgggtgtggccacatgtcacgtgacgtcacataatcacgactggaactttctagtcggttctttttgcccgttcttttttggatcatcccaaaatccgatcgagagcaaaagtgagacttagcggccgacgaccaacaccaaaagctttcgtatcacacatacccactcatatacacacagcacaagatggagtctcttcttagatggtgtgtataaggatctttattgacccttctcctcagtatgttttgtggatcgattttggcgcttcactgatcacacatacacatacctcacaccacacgattactttcgttttcgtttcttaggggaatcgaaaactctgttcctgcctccggggacgcctccgagcttcaccaggtcgcagccgaagtcgcagccggaaaaagaaaggatctcctcgatccggcactatacgaagccatcatgggtaagagtgacgccgtactcatgaaggaggctatggcggccgccacggacaagggaaatgatgtcgaacagagaattgtggctttggagaactttgaaatgctcgtcgagcagatcgacaacgccaacaacctcgagttcttgaacttctgggcacccctcatcgagcttttgatcgacccagaggacgaaattcgacaacatgcttgttgggtttgtggaacagccgtgcagaacaacgctcaggctcagaatgctgtatgtgtctagactacgcccacgtttgtgtccaccttctgccctctatctctttcctcactgaccttgttcacatctctgccgatgtctttcttcagtttatgaaactcaaccctctcccaacgttactcgccctgatctccactgttcctgctccatccgacctacacctccctgcacacgtctcaaagagctcacaggctacccgatcaagagccatgtacgctctcagcgggacgctcaagcataatgcctatgccatcggcaggatggacgatcacgaaggttggggttggcaagtcctcaagggaggattaagtggtgcgtttcatttatctgttgatttcttatcgtgctgcagaaactgtgtcgcatttagaaaactgagcgctcccttcttgactcggacaatgctcttcagatccatcaatgacgattcgacgaaagaccgctttcctcctctctactcttctccttctcgtcgctgctcccacatctgaattcaccttaacattccgacctgctcctacgacttccaaccctacgccccgatcaagctcaacagcagtgacgctcgctccaacccaagcgaatgaattccctaccgattcttccaaagccactccttcggttccctcgccatcctacacttctatcctcaaatcattcgaagcacatgggatcccatcagttgttctagattctctccgacaggccgatttcccaagagctggagcagacggggatgaacctcctgcgaacgaagatccggactacaaagaaaaggctggaagggtgttaatatcgctcttggagaagaacggattgaccgaggagctcaaagcagagtttggaacgtattggcttgacgtcaagaaagaacaggggggtgtggagaaggcattcgaggtcggcaaggaagaggctgtagagattgagaagttgttgagtttacaaagatcatagagttgtatctcttgttcttagacaatatcatatagaatgcgccaagcgacgactggctctcttcatagatttggcgagcgccgtgtttcgtcaacgattcgatcacacgcaacagtcaaagaactaaacaggaagagcccattatatcagacaattcattcccccttgcgtcccttcgattttatattttctatcaggaacagttcaagccgacggaaccttgtcttcctctccggccacaggttccggaacagaatcagaagtcggtcccgaagcagaagtagcggcagcggagtctgagaacaccttccactcttctgggaaatctctgatagacactttgcttccgtccggtcgtcgtttctcaagcataaactgtcttgtgaaatgcgtgacgtcgagcggtacatccgcgaacatgtcagattcatcctgatttttaacattcgcgtttggtggaagagaaaggaaaagttggtattgtatgaggttagttcaagaaaagaaccagagaaagaacaaaagagcggaacgtacattggcctccttgaccaatcttcttagcgtatcctcgcaccactttttgttctgcagctgatacctaaacaaatccgacctgatgacaacccaaccgtccacgtcttcgcctttcctatccttcaagccgtgcttgtaagctctgtcgacctccatctctcggacttcatccggggtccaacctcctaccctaggtgcttgttcttcgccaagaacagccggccgtccggttcggctgagatgagaggcttgctcaacatgccggggaacagcaggtagagaatgtcgtcggtttttgagggctggagcactcgtgtttcctagtttaaaatgtcggtttcgatcaaacgcggccggtcgaaatggatgatagaattctggagtagcgaggaggaggaacttgtgtttggcggcaggagatttgaagggaagtttgcaaacaggagccgaaagtgtcacgaccgagctttgaagatgttgatggatgttgagattaattggcgatgttcgtaggtgtgtaagaaagaaacagaggaagaggaagtaaagaaaacaaaagacctacgtctctttgctctcctcctcaaggggccatgtcttttgagtgtggaatcgaacatattcttcctcgacattaggaggctcgaaaggaagcgctaaagaatccaaaagttgagcaaatggccgatcgatcagttcgtcttatcccaaagttgaacagcgtcggcttcaagtttttccataagagctcatcttcaagccgagttgtggcaatcgcacgatgtgttatccaaaagaggactatgtccctcctacggagaagccatctttcgtgacgggagcacgagagaacgagctacgttggaatctcaagatagaaaagaaaagagaaaaaagaacgattctgaacttacgttgaagctttggtaactccaactctactgttctcatgaacgccaacgcgtctctctccttctgaatcatctcgtgacctatcgaagttgtctcgtcatactggaaatcatcaaacaactttgtccttcctttgaagttagatacctcagcagaggcagaagcagcagttgccgccggggaaggactcgtaggaggagcttcggcgtatgatcgggtagctgtgaaagtagatcggaggagagcagaacgagcaagcacaggaatccgtctgacaagcatggttcttgatgtatacgtttgagtagagagacgaaggttggtcagggataatgatttgtcgcaacgtacaacattcggacggggatgggaataaagtgttgatcgtggagtctgtccgactgagtcgattcgaccgaccctatataagcaaccctaacatatgctagttccgtcgcgccttacagcttcgtcttgttcgtctactctccgaatatatttggaatcgtcgatggagaatctttcgtagagcgcacacgtatgacacacagaagagaaaatgaaaagacatatgataagaagagacgaactaggattagagaagataaatgatctaatagattgtttacaaaggtgttctgtccatccgttctaccccgcccctctttcgagcccatggtatctacatgccatcttagtgatttgagagggaagagataaagaagagaaacataggacgattttcttagagacctccgaaaccggacatcgagttcctagactttgttggcccggtttccacactcgtcccacctgatgccgatgttgacgccagagcgttcggtgtcgatgggttaggagacgaaggatatccattgaaaaagtccgtcatggatgctctacaatatcaacaacaagagacatattgtagtaaggtcagaaataacattgatcagcaaacttatcgaaaagccaacagaagaaggaatagagaacaaacttacccgaaagtagctctggaatccccagtcttacacttcccgttttgactatcgacctctgctctgtcctcaccctcctcagtcaggtcctcctcgttgttccctgctactcctcctacccctccgctgaacaatccaagtccggttccatgcgaacttccgtctggagagccagtgtacccatcgtccggccccctatttgactcgagccctccgcctaatggggtactgcctccactcccaggcgtactcaacgagggactcgatggccgagtgttcgaccgtcgggatgccttcctcgcgtgatgtcgccttgaggcaaccgagttcgtgaacaacggaagcaagtatcgctcatccaatgaagtgaaccactcgccatctcggaaaaccatgccttcccggctaccctcttccagaagtgtggtcgactctgcttctccctcacccggcaggggttgaggttgagatccttggttatcaaaatagtcgtatcggttgtcggcctcgtgggggaacatctctccctcctcttcctcatcttcctcctcatcgtctatcaaatcaccatcagatgagtctaaactagtctcgcctcggaagctaggactggctaacaacgcattcgccgtccggggcggagcaccatacagcccagagcttgtccggaacccgttcggcctgattgagctttggccaggaccggtcagaggagagttatagccgctaccattcccaagtccgccaatctcaagatcgttatccgaatcctcatacccgcctgagacgccccgtcgaagacttctgccattggatccggcgaaccgtctggagctagggaaagaagacgaattccgggagcgatcattccacgcgtttcggtttctgctaggaccatagggtgccggaagggccggaccttcttcatccgacgaaccatcggcctcttcaacacctacacggatccccaagacctcaagcatacgagcggtagttcctccaaagataatgaccgtgagtacaacaacgacaaggacggtcgtccgcaatgcattcgcgttctctcctgtgagtcctacagcgagcgccacaccgacggctcctcgaaggccagcccagaacatcatctgtagaacgcgaaggtcaagtctgggtatgagtataacgctttagtagggcccaacacagatcgagtagactgaccatctgataagaatgagggagttcgtcatatcgttgacctctggcatggtaaacccaattgataatctctgatagaggaaaaacagcagcataccttgcggccataactgagatctatatttgaaaacacgagaaaacatggtcggtgaccgttgttcaaataccaatcaagagtatcttacacttacagcagttaccaagatgaatagcggcttaaagacctggacttcttgcgcaaagagtgcgagtcctaagtagataaatataaagttctccgatagttgggctaggacggcgaacatgtacttcgtcgttctttgtgttcgacgggacattgaatgataggcgtaatgcttgagcgtgattccgcagaaaagcaacgataccacccctatgtagtaagaggatacgtctcacgagtcaatattgtcaagaaccagatgagggcgcaggacagtagttgaaaatggacacgtaccagacatgtgcagaccggtgctcatgaaataactcgtgaacgcaactaaagtgactaggcaactctcgatgcccggatagaaccgtagttgagagtgttttagaacaagcgatgtcaagagcccagatgcgactccaagcgccatcgagatgctaaactgaagcaagaagatggccactccgtggaagaacgagctgaagtgaagggtgtctgagtcgctgaattgagagagtgttctatcaagatttacatgagacggatcaatttgtatggtcagtaaagacgccatgacgtaaagaacatggaaatgagagagcctcactcgtaaagtacgatagagaccgcatcattgattaaactctctccgaagatgatcgagtatagcttgggatcgactttgtacgagttgaagatcgataagatagtgacggggtccgttgccgagagcgttgatccgaaaatcagacactcgagcaatgtgagcttcacgttttctagaccggtgaaggaccataggtaaacaagaacactggaaaggagagtatgtagaaaataagttcgagttgatgcgagagtcgcgaagacgaggggatataattaccctaagccgacctggggagatatacggcatggagagttcagcaacagtcatgatagcgcttcccttggtgtattagcaaaatggacgaacagcacttatgaatgttccggcaaacgcgaaagttaggataaccccaaagtttcgaaagaagttgtcctgatcacgtccgacagaacgaaaatgtgatgagttgaggaaatccagacggcatcacatataacgaaacgcgtatacctgcttgagttcataacccgagttcagaataatggggggaaggagcacattgaagaacagggtatgcttgaaagcctgtttgttgtattcaaacaagagggagcagttagccctccatatcgatgctatcccgtcccgtcccgtcaacgtctcaaagccggccgactcaccagcatctcacggatcatgtgtcctggtgatagcttgaggactaagcctacaaccatacctacgtatcagaaggatttgatatcatggtcagctctctgaccatcagccgtctacaactgtgagacgaagaacgcccgaagtgtagcgttgtgccatgtcacctatagacacagtgtgttcaagtttgaacgctatgcggtatctttcgagaagaaaacatacctgcgaagatagagatcacagtctcatgaatggctctgatcttgcgaacttgaaggtagtatgaagtccagagtgctccgataagaagaaagcagaggatggtgagcgcccaggtggaatatgtctcttcctcctcaggcgtcgggtttgctatgacactggacgacattcgggacagctagagataacgagcgatgatcggagaaagctgaagacttcctcaggaggtgaaaaccaacagtggatatgctctccttgtctgtctataggcgtgtgtttgtatcctgagagacccaagatggggagatctactacggagaggagaccgaaagggagatggatggtctgattgggatggtgaacgaatcgaacgggcgaatttcgtcaaacgtgtccctgcctcactttcagcgcatacacaccaacaccttattcgatttgcggtccctacatcatcagttttgatctcaaaggcctttctatagattcagatggatgaggacgagcagctggcacagtaagtgctcgtagatgtgtgtttcgaggataccagcatgttgagctgaccgtcgtctggtatttcctgttgtctagtgcgatcaacatgtctttgaccggaacccagcccggtcgtacggatgacaacgaagaagacgactcggtgatttatctttcagatacggatcttccagcccaagtacgacactctagaactgtgcaaactactgccagagagaccgacgatgtcattgatctaacttcagatttgtcagacgatataagtcctgaaggttgatgtgacttcttataaagagtatacagacatctcaatactcgtcctgaccgtcgatttctttcccaatctcttgaatctgattacacagtagataccacatatacatcgaacagcgatgcattttttgaacctgagatggatgccgaactcaatttgtcagtcgactccttatcatccgggaacaatctatccgggattgctcactgctcactccttctttcactctccaaagcgcaatgaagttgtcgaaggaggccgaggaactcgaacaaagagttagaaaatccagacctcagacagaggaagaggaagcacaggctcttcggatgtacgtgtcaaactattattttcgcttcaaccgctttctgacttatccttctcaccactctccattcattgctcatcagagccatacaagcgtctctgattgaaaatcgtacgcgctcagagaaaccagagtcttccaacttgaaacgcccgcgccgatcaagttcagtcttcgaaacgtcttccagtccctcccgtgcagattgttctgcctcggatgttgacgactcgcgcctgctgtctcagcgcaagagggaggaacaagaagagagaagacgtgccgttttaatcgcacgaagtaagaaaagaggcagctttggagagttaacccctgcttctgtgacaacaccccacgcagccagtacttcgatggccaaagattctctcttttatagcgatcctgatgatgaacaagaggaggctggcaggagagaagatgccattagtcttgtttcaaatccccaattaacggtcagggcaataccactggttggagcgcagaaggcgctcgagaggacatccagcactagtttcgaaggaaggaataaagacgaggcgagctctaaaccgcgaaccaatccccagagcttgtctataccatctcgggctcagatggaagccgagcggctggccagggctcaggctaggcaatcctcttcttctggttttaattcttcaccaaaacctgttccctatgaagttcatccacctacacccgctcctaaatcaacgagcaactatatcattagcgcaacagccacctcgttcgaagcaccccggaagaaacccagagtagatccagccctgcaagcaactattcaacagcgctcgggtgaattgtattggcagggtgttttaggggtgactccaaatgtatatgctaaagaagcaaaaggcaaaagcaaggtctttagcccgaatgatgtaattggggatgtaagtaccttttctagggtcgaatagtaccttcagagccctcaggtttcgttctgactatggatggaaaaatctgtttttgatctagaaaaaccaaatcgcgttctcgttagtcagactgacacctccttcaatcatgtctcttcagacatatcgctaatcatctcgatctgaatctatagtatattgtctacgtactgctttgacccaaattttttacctgatcactttcctcacccaagtgaagctcccatcatcttggtctctccaccaccagcggttgagttagcagggaagagtagttatgatcagctgattgagggagtctggagttgttttccttatctgccaaaatcattctcgtacgttggtcctcatgtcctcttctgatgtcaagaagcggtcgtaagctggcagaacgacatcagctgactttctctcttgtttctttcttcggtacctcttcgattatcaagacccaactttggattgtttatgggggcctgtcatatgaaggtgcgtacattctaccataacgcttgatggttatgacattcgcaggctctaatgacccagctctcattctatctcatcccttctggtctgcttggacagttcatgctggtcagcgtttgcattcccctcaacaccctttcttctacacttgagtgctaactatcatctatcaattttcgatactcttagctgttctacaaggatggacggatgagaacagtcatcactagcgcgaattttatgggattcgattgggagagtattgagaacgtgagccctcatgtagttcctatgctctctcctgtcaatcaacttagatcagacttttgcaatcatagggcgtttggatgcaagatttcatgcctcttccggatggaccgccccaggatacagaccgatccgatttcggccagcaatgggagtttgttctacaagtatgtccccgacaatttatcttgtgacccgttcatatacatcgaggtatatttaatctttttctagtccctgggagttgataaaacgttagatatgatgtctaagatgcatcttaaaatccccataacccaactgtcgcacatacatcggtataacttcgggaaagtgactattcgattggtagcctccgttcgaggaactcgtaccggcaagtatctcatatcacatcttatgattgttctgtgctcgtagactcaataccacctcaatcttacacctaggctggaacgaggtcgaaaaggcaggagtggctcgactgggaaaaatcatccgtgaggaacgctggattgcaagagatgaatacaaattaccgtgtttggaagcacaggtaagtgtctataatagctaaaaaatgttgtggttgccaagatggactggctaacaagttatacttcgtgaaccatgattcgcactgtaggggtcttcagtagcggctgctactcctcgtgagaaccctttgttgatcttactttccggtagaaacgagccctggtctcatgaagtcatatgttttatcacctttgacgatattcaggttggctgaccgacttttggagactctcggacgggttggatccaagagattggttagttgctagatcgacaatcaagacatacccacctatcaagataagtgagtatataaccagagaattgactaaatggaagacctgtcctcaatttgcgctcactctctatatcaatactcggttcgacgtgatcaatcatcgggcgtgctccgaagtatatcgtaagtggaattcaatttcatcatcagtcagtcgcctgatcaagatactcacttgtgaatcggcggatctcgtcttttctggatacagcatctctggctacggtaaaagcttccgagatgagcacgcaaggagggtaggctctcacagtttatatatatataggaccgaacctgacatgggagcctcacttactttcccaaatgtgattgaactggaactttgaagagggaccatgtttttcaccaggaaaaactgggtacctggcatccagccgctgtttcatgacgccaattcgaagagagcaagagtcatgatgcacatcaaagttcgaccgtctctccatacccacgaccctgtacatcgtctagtaatgtatcgctgacatggaccaaacttctctgtttccttgatatcggcatcttatcatgattcagatgttgctagcagtttttgaaaaagttccccaaaggctgagctcttctgtctcgacgaacaggccatcttcaatgaatgataagcgatccgtagcggcttcagcagctctatctcggcatgtgaagcagaagatagacgtgattgaagagtcagagacggaggacgaggatgagggcgaggatgtgggctccatcaaacagaccggaaagactttgcggcaggtaggcggttggatgtatatgggtttgttcatctctcttcattccgaagcacaagtactcttgacgtgggacactaaattttgttcatcctctggcgcacgaattgcgctttatagggagtcataactttactcagtcagcttggggaaatctgagtatgaaaaaggacgtcggtccgtcgatgtctgtgagtcatctctcttgaagagaactctccatgcttttccatcgaatagcattctgttggcgcgttgaacgtggatttgacttcaatacatcttcatcacagcttatgaattatgaactaggcatagtatttgtgcgttatcattcttttcctgattttgtatcccttcatgtccttgagactaaacaatttttgtgaattcatgctgtgatactctgaacatcggatagcctctgccacttgagaaagctgaggagaccgcttcggcgcttgctacctggaagagacctccgagaaaatacttgccatctgacattccctgggtgggttcttgtggtcaacatcaagtgcattcgctctgtcatatctcatcctgatcatctgttcttgtcgtttctgtttcaacactagatccaaagcgaggccgatatgtgatagtttatacactgtatctagaatctaatgtactatgaaacatccttaatcaaatatacgattttaaaatctatgtattcaaatattaagtctccaatgatggtcgcccccctccgtctgctttggcccatctctgcgtttatccgtccgacctaaatctcactctcccaaccttctatcgagcgaaccttcagccatgcaatctgctctctttaacaaggttagctcaaagggctaatccagcctcagtgcagctcatggttcctgctgacaaggttttcggtgctttgaacttttttctctgacttttctatctgtcttctggctcgactttttctataataggctggcccgttagccgtcggctcgactcttgctctcaccggaggtttcgtctacaatcagcagcggaagccacttctcatggacgagtatcgtaggcgagaaaaggtacgtctaggctttcacagtcaggttctcattgggggcgtggatgagacaagaagagagaaaggctgcatggcagaaagatcactgacgtgactgattcaactacttctatgataaaaaaccatgcagcttccgatatatcctcagcctcagccagagatcatccttgtcgacaccttttctcctcttcaggctcatattgcggttggtagagaagctacgacatcagtcattcaaaacatccgggatgaatcccaaaaggttgtcgctaaatgggtggccattgagcgaagggttgctagttagtctgatctttgcatctctacatccttgcagtcgaatacatggttgaccactcttcctgcccttctcttctgtctctttctcagacaaagtaaaggcgacgatcccagaggacgagcctttgactcctgggattgcctgggtgggtgtgtctaccctcgctggttccatcattgctcgaaacagtcagtttttttccaacctcctgatcacgcatatctcatctatacactcgaaataacaggaagaaaacgcgtctctcttctctgttcgtaggaaacatccttgtccgagctcttctccctccaactctccttgttgcctctctgcccgtcttccttcccaagctttcagaaaacttatcgtccgaaatttctcgatacaccctcaagacttctcctgaacttcatcgtgaggtttctcaggctcgagccaagctattcggtctgactgagcaaagccgagaggcctggatatctggcaagcagaagctgactgacagtgtcacccaaggtgttgactttgttgatagcaaaactggacttcagttctctcagactcttcgaaacaattcatcagcttcttcatcccctatcggtgaagagagatctcagatctaccagcccccggtgtacactgtttccaagacacccgttcgagatgctgtggtggccattccgtcaaactctgcgccgttgacccaggtgtctgacgtattggatgtgcctgtttaccaagttgttaccacgaccactcctaactctatcactactaccagctccaactttgcctccactcctgtggcccctgctcatttgtcgactcaggagcaggttgactcggccgccgcgtccactttggcttacctcgaggagaaggccaaggagggtcttgcttcccttcaaaagcaagaggccaaagcggagaccgctgctcgacagaccgcacatgagggtcacgttcaggcgaacgcccttcgggctaaagcacaggaaatcgttcgtgatgctcgatccaacgccgaggagggtgttcagaccgctcaagcaaaggttggagaaggtatcgaggtcgcccgagcaaaggctgaagagggcaaggcttctctcgaacagctcaaaaaggaggccgtcgaggctctggctgacgtgagcgagaagacgaaggagcaggttcaggccgccaagggcaagttcgaggaggtccaggcagaaagagcggcggagcaggagaagcaggtcattctcgaaccgttacgtgcgcacggagtggagcaccccaagttgcccagtggtttcaagaagctcatctagaggaacccctttcttgggttggacgaagacgatatttgtattgagaatggatgatgctatgattttctttattccaatctggtcccacatcaacttagcttgctcgcatatcgatagttatggcagttccttctttcggcgttgtatcaaatcaagagagcagacatttgtacagacgaaagacagatgaggtgtttagacgacaatcaaggagaaaaaagaagacaaagatgtttcgccatcaaacgtcatatctacgtctcgacaagggaacacccgccttacatcctatccatatccatccatccgtcgcgaaattgtccaacttacgagttctcaactttctgtctcgatggcttctcttcttcaccgaatgcgaccagatgactctggtgtcatctatcgaggtcaccgaagagagtccttcatgccgttagatcaagcggaacaggtcgagctacgagctcgtcaaagaacgtttgaaggagcttggacaaggtctatcccctgcatatctcaacctggcttgcttagtctctgattttctttaaccgatgtcagagtgatagttctagtcgtatatgaacttacatgattctcaattcctttggcggccttgcagaaccgcgttggtcaacctgggctatggagcggtcgtattaaaagtattcgaccggcgatttctatccagtctgtcctctttacctcgtctcgttctattagattgcactttctaaatgaatctcgctcatcggatgatgtgatgcgcttctgcccagttggcttgctgtatacaacactttcgatcgtcttgattatcgtagcagtccatcgaggaaggcagagtaacaagtcgttttctgataagtttccccacaggtacggggctcttttattgggaaaagagagacgagatctctcttgaaaatcttgcctgactaagggaactgacgaagaaggactgtgtctgatgaccaggtatgatggagagacactagacgcatcgcaagtcttggtaccaaccgaggagccatctcctataacccatcaaataccaagcgttatcaccgatgccatccctgttctttctcctgaaccattttccgacccagatacatcccggacaccgacaccggtgggtactccaccagggatgtcatctcagacgctcactcgtcctctgttatccggaagacagtccagaggaggattcttcaaggatgcagacagcagtgatgctgcgcaaaacgctcaacagacacgacagaagctagatcagcagaaacgagtatttggagcaccgttcgtcactgcagggggagcggtcttgctattcgtgagtaaaggtttttctcagtatcttgttcgctttgagagatttctttcaactgccaaggtgtactcgaccgtgaagtcattctttctcatctctgtaaaattatcgcgttcatccgcctgatcccgttttctgttactatcgggttgccgtgttaaatctcacagagctctctagtctgtggcatggagatcgcattgtttgtgcttatcatgaagttttaggcgttgacgacagtcctctaaaacaaaaccttaagaaacatatttgtaccaactgctcttcgtgttcgagaataacatatctgataatatcgtcaaatgttcataaatcaatcatctctggcacagtcgggcgttgttggagtatcatcacatcgcaagggagtatctacctccacaaaacacacagcacactgcagccttgagcaactcctccaacagccaggcttcatcagtctccgatattggcctcgacctgtttgcatttccagtcaaatcatctggaggcttatcacagtcctctctatcttggcattcatttgtatgctccatctcggtttcttgatctgtcagagtcggctcgttgtcggcctcatcattctcgtcttcctccttgacctcctttccgttctcctcttcgctgtcttcgtcaatcctttttttcattctttgaccgccagtctcgctgttgtgagaaacaccattggcggatatttcctgcacaacagagccttcaacgttgaattctgggagaactgcaaggggtagggatgaaggaatctgcgtgtccatttcggactcaggcgtgggagtcaactctgaagacaactgccttgaccggtcttgatatgtaacacgtggcgggggtgatgaggcaggtggcggtgtcagttcagatgtcggtgggatcgacgaaggggacttctgcagatgtggtagatgtgcaggaccaatcgagggccggagggcttgtctagatgtcgaactaagaccaggaatcgatatagggatgtcaagagaggttgaaatggcaggagttgcttcatctactgaagcggaattgaaaattggggctgcgtctggattcggagttgaaggagaaagggtagcagcgcgggtgggagaggaaatcgatgagtagatgttaggaggcgaatgttgatgaacactgttgacagtgatatcgttgccatcttcttcctgacgagatagcgatccatcagtgattatcaactccgtccgcccttgctcctctcggggcttatttttgagcggtgatcttggccttgtaggtacgcgtaatttctttcgacgagatggtaatctggaaggtggcagaagtgttgggcgggtacagttgatacatctccggactcgagggtcgacgagcagtctcaaagtgactgaacagcgacctgaatgtactcggacatatgtcacggcacagctatcagcatatggcgtaggaaatgaaactgaagacaggtataggttgctcaccccaaacatgcccctgctcacaaatagcctcttcggtatcgttgaataatatcttcgctccacaggccggacaaacttctttctcgtctgcacaatcgctgagtcgagtactgttcctagtagcctgtcgaatctgttggtcttcttccgactcttcgggtccttcttgttctacattctgccttctgtctatagctccatcggtcatagctgactcgagcctttccagatcgacctgaatatcagtttcgaaaaaaacggccagatcgaaggctaagccagtgatatgcatgagttcggcagacgaagggcctatagacaaattgagagcagtcgaagatgttggcacatgtatgcacaacgataagaatgcgtggatcaatcggttgatgagagctttgtcctcggctaatggaattaccacgtttcgcgtttcagatcagcaatagttttcttgccagacaagagaacgctgtgaagcgcgaggacaaacctgaatcaacaaactcctttactctgtcgacccactcaaggatcacacgtagagattctcgaagaatcaaccgagccagtttctgtcggtgaaagacagatgatggatcttttgatcgggcttgcgactgtacctttcgagtcaaaattcaatatgagattcatcatgacacaatcttgtcgaactaggagtgaaaactcaaacatagcgaacgtaacacataatgaggcgaggaatacaaacttaccgacaggaatgtagcaagcgctacttttgaccgtaatcttcctatgttctcatctgcccaaaggtcatctttcaaaccctccctgaaccaatgcctgatatagtctccgtcttgaggatacttctcagaagatgatggtcgcatgaatgttgaaggaagttttatcaagtgatgtatcaatcgagagtaatacgtttgtgctgaggcggaaggagacatgagttgaaggataaacggcaagagttcagacgagggagaagtgatagccgctgcaaaggatgaaacaagaagtgactagacatcagcacacgaagtggagcatgcttgaagaacgaagaaagtacggaccgttatcatgtttattgttgaggagcaactccaactcgctgaagaacatttgttccggtaattgattggtgatgggtaatcgatatatcgagaacgtattatagactcgataagacatagtatatgtcatatcataagggtagaaagggctagaagaggtaacataatcaacgaattagtactcaagagcttgcaatgaaagtttttctgagaaagactgacgaatagatcgaagcccaaaacccatttcccagatatgaaacacccgatgtcctcataactacatctcttagctcctcgactgtctcagacccgaacgcttcggatttttcaaacatcgtgcggacagatcgagagagctcggctgacaagctataatcatatataggctcagcagtatcgagttgactgatgagttggtgtgatccatccgtgagcgaaaacacaatggacgttggagtcggtcgactgactcctgtgcaaatccatgagcaggaaaattcaaacgggcgttgattttagtgatggacaaccaagtgcaaagaacgaattccaaaaagcaggcatcgaagtacgaaccacagcagttgcccagttttgtgcttccagcccatctacctgctctacacgttttccagcgtttcgttccttcccagcctatccacccatctctgacactttcgctccagacgtagagccatccaaccttagcccaagccagtaaggaactatttgaatcaccatttgatcgattcgtccagactaaagctgaggctggtctctggtcaggcgggaaaagttgtttgggctcgcttattgataaggagagtgatgttgtgcttgatatattttgagtgacaagcaaataatgaatcgagcccgatgggtcggtataggcaagttttgcatgagctaggatgaagcacacaagaagaaatgagtccaccgatcaggtagttaggctgttgaggaaaaagcgaacatactggcataaggcgactctgaggaccattcactccacgtcagggatgaaatccactgcttagatacacgaatcttgcggacaagggagagtgttccatcaaatgcatgtctaaatccatggtcaatgtgataaaacaaagtgctttagtgaaaagaagatagatggaaaacgaccgattacgcacaaccaaaaagtgatacatcctcctttatggcccagagccagcaaactgccatcggaaaagaaagatcttttgccctctgcattcaagggaaaaacgacctgtttagaccattccaagcctgatccgataataatctatatcaacatgattgcgcaaaagactcatggaagaaggtgtttgagagccgtacaggtcgtctgggcgtctagtactcgttgaacttccatatcgagcttttcgatgtttgtttctaattgcataattgcctctcgtggatagtcggacgcgtccagtagcttaggtacaagcgtatcaatctgaaaaaggacgcgacgtaagtaaatgcaaaaggacaagctatggccctaaaacgacgcgacttacaggttgccacaagcctaaaacaggatccttgggaggtgagaatacaaacacatcaagattcgtggtcaggccgacaagaacacagctgagcatgcaaggattaagatgagacgtttgtcagaatgtaagagcagataggtatagacagtaatgggaaaacgaaccctcctaacgagctaagtccagagggagaccaacaagccattctccaggaaatctcatttgatctggtttgtgtaccgaagttgagaactctgtaatctacagcaacgacataagaacaccgaagacgattgaacctcgacgacgggtgcgactgcaatattcaaatgacttacctgcactttcgtcctcttcccaacgtgacagaaagtctccagggactgaaatattgttgatcaagcattttaccacactgggaggttcaggaatcctaggcagggtagattcgcctccctcttccgctttgtttgcagcagaatctaaggtacggtctacagaccaggcgaagttgtgcttcgtatctagcaccctctgatcaactagagataaaccagtcgaaaacgtaggatccggagtctatgaagccggtttcaagtcaggcgaagcatccaattcaaaagagctgatgaaaagacgcgtacgactatgataagatctctagatcctattacaagaaattgcccgtcttgagatctttgcaaagatcgaggggtatccgaaggacacgcagcttgtagtcgatacgtgaccgaaggttgagcagaggccatcacaccgtttgcttgatgaattgtttttgaacggagaacagaaaaacgcgttatcaaggatacatgagtctacctgagaaagctatcccagaacgatggtgatgatgctgatgaagactattgttgaagttttgaaacgcagcggtaagctttaatagagagtttagaatttcggtttccgctcttatccatccatccacccatcccaccacctattcgtccaacaactcatttctttcttttgtaaatacagccaacaatatagaggtcgttcaatccagattcttggatacagattgtattgtctatattctatcaagatcgaataggctttgcctcagaggttgaagtgtcgtcggccttctccttacctcaaaattcaccatgcttgcggatttgattgattttctaatccaagaaatagggatgagtggccctcttggtacgtgcttattcaattgaatctctcttagcaggagatggctgtgcattgccttctcatcaggcctatgtaagactgttggagacgcaaatgatctggggttctactttaaagaagtagcagacttaaatgccggtgttgtttatatggctgcttcagttcagcttcattctcttgctttcctacaataaccaaggttgatgtcatccagtgatttcgggatagatgattgactgccttgtgatcaacctgaaacaaattttgttacaaaaccgatgtttttaggtattcatccggattccatcatagacttggctaaactgcactatactcagcaggccaaatccacctctcacgatccctcgttgtcatccgggaaatcccctcagaaactcgatgcagcctttctatcgtatctgtgggatgttttgattgaacaggacgatgttcgcgttggacgggaagagtcattttcgccggatggagttgaaattcaaaggacatccgaagatctgcccagcagaggaaagaagcgagcagtaggattgaggcgaagagcgcttgaggatgagagagaagagggtcaagaagaggatcaagaatatgagaatgaggaaaaggttctcagaaatcgacggacgagagcggataagtctgatactcccgtagccgtgcgcgccgctctggttgatttggacgaggaagagcttttttccagtgacctatgggatctgaagaaggaccatggggcgaagctcagaatagcactgtctgaggacaaggcatacttcatcatgacaggcacccatcgaggggtatgtaatcttcaaaagcttattttcggtgcgttcatctaatgcattgctaacggtcctatcctcaattgttttcttcgtctcgattgttttcagaaacttgcgcttggagatcaaatgtatcaggctcttactttaatctcgcagtcgaaaactcagggaattactactatatctcttacggatgtgatgggtcttgacccaaaaaccattcactatttcactaagagtttgcttagctggaatctaatgtaagcttgcttaacttctcccaatttatctgctaccccgaagacaccaattttagagtgacttcttcctcttacaacaatttattcttttgttctttgattgaaagatcaaaatttcaagcctacgctcatggaactcataccgccatccactttcattcgcgctacaccacccagagtgccgaatatctaactcttcgagggactgcctccgctgcagccgctgccacctctttgatttctgcaacagatgtcgtttcagatccaaaaaatgctgacaccgatagcgcgcagcaacctctcgccgacgaactaggggaacttccacaaactatgttcagctatttggatgtcgttcagcatcgaatccttcacgtactagcgagaaattcacaaggaatagcaagaagagaaacgctacttagggatatcgtaagcttctcatacttattcgatccgcatttctatatgtattcaagtcattgcaatctactccctacagggatataaaggagtggttggccgacaacagcagcgtatgcttgctcgctgtatacgtcatattgtcactcggggcgaaatccgacgtgtttaccttcgaaactcgaacccagaaggtaaatttgcgtccctagagcgaggatttcaacttatcaaaaaagctgagaagaatggggagggttccgaagatgtgatgagtgatcatgaggaagaagaagaagacgaagagatgggtgacaccatatcagaagaggacgagaacgcgctggtagctgccattgtcgatggatcggaaccaaatttgatcgttcaggacagtgccgttacagatagtgagttcttgatataagcccgtccaaaacatattttcaagatgaagttgtggcgcatgttcaggctattctcacctccaataccaatgccggcatttttcacgcgtcatcgcttctctacaggaccagcagtcgaggacatacgtaaatttgcttctcccaaacgcttcgaacctatgaacaagatggagccgtccaccagtatcgagtatcagatcatgcgaatgcttcaagtcgctggtgctacaggggttacgtgccaggtatgctctttatgtccctgtatttgacttgttgttcacttcgatatggttttgctgaccttcatctcgagtccctctttctccacattgaatcatgatattagtccatcactcatgaactcaaggttgatcgtaaatttgttgatcatttcctcgaacgattcgccaagcagcctgttcctcccaatctctcccatcgcggtcttgtttcccttgcagatgttttgggaaaagaaaagttaatttacgcattcgacacggaaggctatcttttgcaatgtaaggagcacggatttaccccagacgcgcatgcgtttcctgcacctgatcccgtgcgtgctcgcgggttcttggatcttactccgtacgaattttatgtgtcaaagagtcagcatatcgcgtggaatagttctttcactcaagggcactttggtccgatgatcctccgaatgcctgttcttgcattcttcaacccttgcatcccacctgaagtaatctatatcgaggacgaccaggacgaacggaaaccagtgacgcgtgctaggcaaaagtcttcaggtagaacttccatagtcgctaacagtcctcccaacatctttgtccgtccgaaaaccaaaggatctgggcagcagtacaagcgtgggatcgggaaaagcacttatgcgcagttgcagagaatagctatgggagtagagccattacccatgtcaggctcggaacggagaaggatcattggacgcgctgagtctgaaggagtagacatctcaaaggctgtagctaactggcatcaagcacgtagaggagcaatagcggcacctgatagtgaataccaatcgagctcaagaccgcgtcaatcaaccattcatcgtactactgaggccactcctactgcttcccctgcggtcaggcgaggacgtcctccaaaagccaaatcagaagcctttcaagacctgtctgatatctgtgttacaatgacacctagttcaacaccaactgcacccaggaagcggggccgtaagaagtctttcttggctgctgacgacaatgccgccttgtcagctatgacttccacgccgacactgccaaaacgccggggcagaccaccactgaaagcaaaatcgcataccaccccctctgaaagtccttccgttgaaactccgcaaggctctgtagatgatctcctgattgtcaaccatccctcgccgagtacagtttcgacgagtgtattggtagacgaggggtgtactcctgcttatcgacctcgaaagcgggcacgcttttcagggacggccaatctcaaagttaatcttgagggtactcctaagtcagctcagaaaccatcatccgtcctcatcaacgatctcgaatctcccctttcttccatcgatagtttcacatccacacctcagtcatcacgtcctcttcgaaaatccagtcgcttgtcggctttaccggctgcttctgaagctctcaatcattcttcagtggcgcatccaactgcgtcacctctaccgaccaaggaagtgctagaatctaccccatcggcgactgcattgaatggtgtcgtttcgtcgcattgctccaacaaagccggaatttacgacccagataccaatttgaaatccggttctatcaatacctcaatatcagttggcccactcaagaggagatcgagtgctcctagaacgagcttgcatggccctagccatgctcagaccaaacgtgacaagttttttgtggactggattgagagtctgggaggagtgcacgacataagctctaattctcctctacaccttcagcgatacctggaaaccgctatcgctaatgcttctgcaaagggagtccatctacgactcaacgctactactatgattgacaagaagacttggtctgcttccctagaacgtctcgtcaacaaaaatgttctcaagacacgtactgtagcggtagaggtcaatggctcaatgttgaccatcaagtttgtcttcttgactgatacgccagaaaccaaaatccaagaagaaattcgacgacttgcatctttagcagaggcccgtggtaaaaaggttcttgcttccaaggtcgctgatcagaggaccgctgctcaaagatctcgcccgaaaggtgtcgttgaggctgatatgggcccacagcctctaacagaacgggaacgattgtaccgggctacaatggtgacgatggaaaaagaagctgaagagaaacgagcattctttgccggcaaagcagcccagaagcgcatccagcttggcgatgattggctagcattagctaaaaaacatctcacgagaatgtcggtcacattaactcctactctcgagctcaacatccgggccgtccagcagctggagttagcccaacggtctggagggcgattggatgaaactcatatagcatctttggtacaagagctcttggatcttcctgagggtgatagacctttgccccaggaaacaccgatggggcgacaaaagaaagggactcgtgtcagacgacccaaaatctccgatgtgtatgacagggtgaacgagcttcaacacgataatctctccgagattatggacattcctttctttttacccgtaactgaggaagacgatgatctgattcctgctagtcttagaggacctccagaggagtcaggtaagatattttgacgctgttcgtatcttctacatgtctagtttattgatatccaaattatatcgtccgatcaaattgccagatcctttaggtcctcgtcgtcgaactcgatttacagatgaattagacgatatgattatggatcttggggcaatccttgagactcgaggtcgtgaacacggcttcatgttcacctggaaaccagctaccaaggtcattaccagccttaaccataatattctgcgacaccgttactcggtactccgtgagcgcctagggaagaagacctatatcaatgggttatctgaggcctactcaaggctctggaaggctcatcgaggaactatcaatctaccagaacccgcaggggcaaggtcaaccgagtttgatattgttcatcatgtgaagttcttccgaaaaaacacccaaaaaaaccatctgtatgttttctatcccgtcctggcgtttgactggtttgtttcttatcatcatttgactgttccacaggctcaactcaattgtagaaggccaacttgccgtaactcctactaccgtctccattgttccacctcttccgagcaaagtatctggtttaaaagattggaaatttacctcacctgagcctgagagcaaccattggaattggcttctcgaactcagtgctgcagtcacagctgagtttgcagaaaagaagacgttggaggcgccgttcgccatagagcctctcatatcttcgaaaaaagatttgccggttatatcacggttctcgcgcgagcagggtgtgatcgggtctactatcaaagtacgtcttttgtcactcccgtacactgtgcggcgtttttgaaacgctgtttatgaatgtatttttttaaatttttttttgcttacccttctcaaccatattctctatctaccagatgatcgtgaaccccactactcgaacttcagatcctgatattgctgaaaaaatacttcctcaaacccctcttgtcgacactgtacatgcctcattaatgagaagtggagtgatatccaagattgggaagagcaaagctcctcctactcgatttttcgagataagcgaagggtgcgtttttatatatatatatacacgatttgtctcatgagtgtactccttatgaatcattcatctgataatcgttgttatcgatccttcaaactctagattcatgaagcagagcgagggtccctatgagccaacattcttcgatgaagccggaggcgttcacaatccaaaaaaagatgacaccttgcttttagaagaagaacactcaatttggcctctggttgcatctgaaggagcaactgcaaaactaatcaacatggtttctgacaatagggtttgtcctgattttcatcgattgatagctaacctgatatgtggcttatcaatattgaaataatttcttgatatggactgggtgtgtgtcgctaatttgacttcttcactacattggtcatcaggtggaatttattgtggaccgcgaagagatggaaaatcttgcgggccgaggaatgatagacactaaaaaacttggtgggagcatttcattctcggacttcacacccaaatctgttgacttacatcataattttgggcaacgtagatgacgaggaccttgaatttcatacttatgtccgcatcacccagccagcacaaccggtcaatcttcacacagacatctaccttgctaatccttcgtcagacctcaggcctgcgcacatcgatcctgagaggagaaagcaggccttgataacgcttcaacattctggagcaggggaatgggtggagcccttcgaggaggggttgatgcgggctgggaaggatggactgacatgggaagaattaattgtttgtgctctgccactttctctttgcacttttttacacttaagaactgataacgcatccattgttttttccaggacttgacaagctcttctccagtctccaatattctccattttgcgcattgcttctgcgagacgacaccttcgctatccttctgggctggctatgatgaagcccgtctcgtttcctcggcgttcttctctgattggtcagtcgaaataccgaaggacaatgaacttgtgtacccacggaagtgggtggactttcagggcaagattcttcagaaagaatgggaaaagaacgtgagatgtgtagttgggacgttgatgcatcggccatatgtcaacgaggtaagtcaacggattctttacttgtgttcgtcatcacttgtgatgcagtacatcttgactagtgccacacctttgttgaacgcgacctactacctcccaatctgaactcgcagtggctccttcggaaagtgctcgaccctatccttgatcgaccagaactcaatgatatcctcaggcatcttttcaagagaggatgggctcgacgagtcacgttccatgaggcaacccagctggcacatatctgttcagtcaagcctattggatggctgagtcgggaagaggagaagtgggtagggtggtgtctgatcggggaggattggttggaaaacgccggcactgggataggacaggttcgtcgtataaatgaggttgtgtaggttgtcctatgcgagatgaagcgcatagcacaattttttatccagatctttccgttgtctgctctgtattttcgaacatctttctaccacacattgtaccaacatcatcattctttattcttcgatcaattttcttgtcttaagttattcacctatcattttcttacatctgcgaaatagtcaactttgtgattcaatatttcgacatgcattcgataagctgcctatagactatcgccatgatcaaacaccccaaatgtaccattcagaaaagtttgtttcaaccaaagacgtacagacatccactccttcatcttgcaaacatcgtaccaaaaaaaagacatgagataacccgacgcgggactcgaacccgcagccttcagattagaagtctgacgccctaccattgagctagccaggctgttgatggcagtctgcgactagtgtaacctagtatgttcttgtggttgagcatcttggctgaagaatattactgaaataaaagggtgaaaatggacttttcgttctggcacttgttcccaatcaagtcctcactggtttcccaaaccatatacacaccacccaggtgtttcagtaaaatggattgagaaaccaggaaaacagaagggaaacccgctagaaaatttatagctcttcggaaagagagccttgggactccgcgcaaatagaggcaggcagatgatgtctcaagaagagattacaaataacagatgaaattatgtcaagactgctgaaactccaacattagctttgaatgtgggtttcaagcagtctttgttgtgtttcaagccgttcatgtcgagggtttgtagtatatgttgaggttttgcggcctgcgttgaatgtgatgttgaacgtgacgatctgtatatacactgtagctttcgtcgtctaggtaaccagtggaggacatgacgttattcttttgcctcttccatccgttctacctctcctatcttcctgagcctcttattctttctcgttctcatgatctcgtgtgcacagtagcagatcgtttctgactctggttctgggtctgatacagggaatcagttgctcaaggagggtcagacattgagaggattggagctgcgtccaagtggccacttccgaatgaactagcacaaaaagctctcaatttttccaattggtgctcgttcgttttgaaagattgtttataatgaatcataggcgttcttacgcgccgatgtatttggcagtggccatttggacgcgattctaatagactccatctgccgacgcgtctgaaaatccacaatctttagtccgtaaagttagacccgctcaacgaccctgccacctctttccttgtctctcctcaatccaaccttagacgcctacatgtcttcaagtttggccaaccaattgtagtcggctctcaacctgtccatcgtctcctgatcagatcaacccaacttgcctctcttggtaaagtctcatctatggctgacaagccaatccgaatgcacttcctaaacagaactcatattacgtccgaatcggagacgacaacaaagaggacgaattgcaaaggactcacaattcgaacttcgatacctgtatctacggccttgaaaactaaacattcgataacagctcagagcaacacagatccattaccttcacccttcctttcccataccctttccactgaaggcagctccttactcgtgtctggtcctcgtctatcgtcgacatctccaagctcaccatcgcctgaatcatattcacaatcctcggatgaaactgcttttacagcatttgttgtttcgaccatcatctcctcgttcctatatcttggcccggaaccatcatcggttcaggatgtggaggagctgaagaagataggggtccgtcgtgtattaaatatggctgtggaatgcgaagatgggtttggaatgaaagacaagtttgaggtttaccgtaaacttggaataagagatactgtggaggaacaggtagttgcacaagatctgaacgatgcgtgcgcttacataggttcggattcaccagactgtcaatcgtatgtctctggtcatgaatcattgaccacttctttctgcttacttgtctttcaattcagacgatgccctcctacacggatgtccaatttacattcactgccgtgccggaagatctcgctcggttatggttgtactcgcatatcttatccgacattatcgctggccgctcaagacggcgtacgcgtatgttctcgaacgaagaagaggaatatcacccaatatcggattcatggctgagctcatggcatttgaggagaacgaacttgttaactcagcaccgaccatgaacaaatcagtgaacaaggtataggaaccgggactggatggataaatacatcacaccaccgagcggtcagacaaagagtccatcaacgggattagaggtcaatcccatagacctattgtcccataggccgggtagtatgccctgactacgtactcagaatgaagggtagcaaacctagattcaagtttgaaaggtacacggtcattttggcaggttttttcttgtgaaaaatgccgtgattttattctgaatttacgcaggatcattcctcccgttcgtcgcttgcatttgttctggctcttactacccacaggtggatttgtgagagaacgatatgtatttgataaaatttcaacatctctatcttctttggtcaagaagacgctcgtcttcatctcttgaacttcgtccgtatgattctttagttgaatactactagcttgacttgattctatctcttcttgctgttcagctctgttacattgatccatcaccacatgtattctcgcctgtactctttcgttctctttacgattttcattgtttgatttctccaatctattttcatcgtccgtctgtgtaaaaccttgggtttttatttacaagcatcgaatgaatctactacctgatcggacggctgagaggacccggcgtctcatatccataatcccgtgtcaacgtggaatgactgttgactttagctatcttgaccgagatcattagcaacttagctattttgaattgacaatcgtcccctactattgaggaatgacagcaacggctgtaacactcgcactctttttcctctacacaaagtttagataatcactgtttgatgctttgtgtcagtttcttatttcatttgtggaccgccaattacagcttttattcggttcaggatccaaacatgtctgctgggagagcgcctgtgtcggtgtatctgtcagcgaatcagaaagcgctacgtgatagggcgttcaaattgtttccgaaaccaagatttcaagcctaaattccctgatgtcagtcagaaacgatctgctactgtgcacacgagatcatgagaacgagaaagaataagaggctcaggaagataggagaggtagaacggatggaagaggcaaaagaataacgtcatgtcctccactggttacctagacgacgaaagctacagtgtatatacagatcgtcacgttcaacatcatactcaacaccaatagctccctgactttatgcctgtttcttgacgaccagtactgcagggaaaataagatgagactgagaatttcaagggaaaagatattggaaaaaaaaaacgaccgctgtagggtttgaacctacgccttcagagaagagtagctgatttgatttgaattcaaggctaccgcgttagaccactccgccaaacggcctcattgaagactcagggttcacaaagctctactagttgaaactcagtatcatcagtcgttgggatttcagcagtcttgacattgttacagctattgtttgtttttctattggatatagcagtctataatacaatagggagctcttaataaaattagtgagcactttgggatattctaatggtggagtc

SEQ ID NO: 218 - DNA, 527 bp, Xanthophyllomyces dendrorhous
gagtgccaactttattcattcaaacattgtacctgggtctgactgatacaaaaatgacaggtatgaacattatggatattcaaaaccattaaactcaaatccgtcaatattttccaaacaaccgcattgtaggaccgtagtatgtatgaaacatgacatggcaatatatcacttacgctttctttagtattgatatgttatcataacacatttcagttgctgcatcgtacctcatttgcagcctagatgtgatgctagataagttttgtcaatgtcaggtcgtgcttcaccatgcagcatagcgttgatttctgaaatatcattcgtagccgggcatatgcgtttcatgagctgcccaaatatgacatcacgtcaaattaggccctttgcaaaggacaacagctcttatgtcataccgatgtaacgcactctttgtggcatatagtgctcaatatgattttttcttgtgcacacaagatagtatgttttccactgatcaaacgaagttagatacaatattatcttat

SEQ ID NO: 219 - DNA, 541 bp, Xanthophyllomyces dendrorhous
  misc_feature (225)..(234): n is a, c, g, or t
tcacggtttgttctgcaagaaagaataaatatattctaactcagcacacaaacagtctttgtgtatactaatcatgatataaaataacaaacctgcaagatagaacaaatacattctaactccagaacacaagtaagctatcgatgaacacgatacaaaacaagagagaaagaaaacagaaaaatagatatggaccaacctcaacacacaaacagtctttgtgannnnnnnnnnaagaataaatatattctaactcagcacacaaacagtctttgtgtatactaatcatgatataaaataacaaacctgcaagatagaacaaatacattctaactccagaacacaagtaagctatcgatgaacacgatacaaaacaagagagaaagaaaacagaaaaatagatatggaccaacctcagcacacaaacagtctttgtgaatactgaggaagggaaaaagaaaaagaaaaagaaaggaaacgaaagtgtcgatcgcagatatatgtgagagaacacaacgtgcccaaatgagaagaaagataa

SEQ ID NO: 220 - DNA, 893 bp, Xanthophyllomyces dendrorhous
taaagaaatccagaaggtaattcgaacagatagttcgagaaaaggattcgaacagataattccaacaatgattccaacatatctccccttttctctcccaagcttggaacctcgttaactcctcatagttccgtacagtcatcctcacccttgaacatcctgccatatctcacgacccttccgagagctcaagcgtactgagtaccgtccctgctcagcccccttgccagcgcccctaacattcaacttggtttcagacgcgtctcctctcaccttgtactctcctcgctgtcgtcctctttgttttgtcttcttcctcttcctcttcctcttcctcctcctcctgctcctccttcacaaggcttatcctctatgtatcactctttccacctgcctttctcgaccttcattccaccctttttgtaacgagccatcctttcttctactctcaccgtatgaagcccctcttatttttcaatcttacgtccacagtcctttctcgctgcccttacgctacatccaatgatttgctccctcctgggagtttgagtgtaataaagacgtctgcgccttgatcttacctgctccgcttggtagaaaagcgtccagctcccagcaaccaacggaccatgatatatgctagagagtagaagcaaagaggaaagaaaagaacaagcagaaaggaaagcagagtcgtcaaccgacaccggaactgatgcttggttgcctgcgtgtgaggcagaagaaagcggtgataaacaaccatagcatcatccagaatcaacgatggatcatacttcattgaagctttcgaggatggacacggcgaaacgcatataggcttccctagtctaccggcccccttccccttcttctcttgagtatgagatctc

SEQ ID NO: 221 - DNA, 76896 bp, Xanthophyllomyces dendrorhous
ctcgtcacacaatgtccttctccgtgttttcttatctcactcggtcatccagaaaagtaagaaacagctcatcaaagccgcggcttgtcatacagcacgttggctccagagcttcaaccgtcaagccaaaccgccattcagaacactatcatcacgttccttctcccacttgatcgcgcaacgcgcgctgagaccatgctcctctgttctgccgctctttctcggccacccacctgagctgaggggattcgttcaggtcgacggcgctccacttgtcgggccgtctggctctcgccatgatcgcagtggttgcttcttgttcacatcatcgccgccatcgggcagtggtcctgacgattgacccgctttgtggttgactgtgtggctagccggctgtgctgagagactcagctttgttcctcttactacctctgttcttcagcgagcttttgctgatcgacaacgaatgatcttcactcttgatctgtatcgtatactctcagccggacacgatctggcctgttgatcagagtcaggacggcgctgtattttatctgtggttgtcgccttcttctactgcttttaacgatggagtgctcgactctgcctggcaagcacttgaatgctggatgcgctggcgtaaagaagggtgctaaatcacacttccgatgatgacttgcatcaaaatacatccataagattgtatgtcacgccccgcagacgaaggctaacgaagatcatgctaacctcagactgagctggcgaaatgaggaaaaaaaagtcacagatatctttctacgacaaccccaatagtggtcgatgtctaatcattaaccttgattccgttgagagccgttcaattggtcaacagatggctctctagaagattttcttgaactttggaaacgtatatggttttcaaatctgattagaatcgggtttctgtagaagagaacgatgatggcggtgagcttgactgcattcttctccgaaaggttcatgacgggcgaactacaatgaagaaacaggcataggaagagtatgtgaaaacattagaatgcatgtccaggcaaacctttagatttggtattccttgatggtcaggtaataaacctcattgtgtcgtagccactgagagcagagattttgaacttaatttgcatcatatcatgctgcttcttgtttacttgaaaccgtactcgcagaatctccccttccggctcgttctaaactttcatcctccaacatccatgcagggctatacatcgccccgcgacgaactgacgactgcttttcacgctccgttgttgggttatttggtttacgcgagggagagtgttgtcgagaggtagtcggaattaagagagaaggattgggatgagtattgacaagagatccaagggaggtatagctagaagagaggggtgagtgagtgagtggaaaacacaagtaagcgtaataaatccgaagaggcgtttgatgtagatattgacactcaagacagacatgtagtgaatcgaagccaaacatttatatcgagagggaggagcgaaagacgtacccttcatcatatagaacacaccatggaacatgatattctcgcaagtagtcccacacatccctatacgaccagttcaatattggatgtatgcgaagaaatgatggccaggtcggatcggtcggctgggtcaaagatagtgatgctggtagagcaaaaagaacatcttgaggtaagggttcaaagcttattgagcgtaaaaactgatgagaactgacaaccatgcggatcccctcgtctggttccaactagaactccttttacgcctttgcctcttccccaatcaggctcgccatttcgattgtctccctcacccagatagacaccaagagcagccttcattcctccacttatcctaactaaatccagaccgtatgctttcacggagtaatcgacaaatttctctacttcgggaaacggcgctggcaatgtgatatatacggacttgatgcgtggaagggctgagggagaggaagacgtcggggctcgaacgggaggatgagagggtggactcgagagtggacttgataacacgttataaagtagatgaagaagaagtgtacctattaatgaggcaaacaggacttagtatgttgatgaccaggacggctcgtgaagataaacgcaactcacaatcttttccgccgttgaagctcaaggcgagagcatccagactaactcccaataaagacgatcgagcgatggttgaggtcaacgcaggggtggatcagccgcctcttctcataactaagagatggaaaaaaatcacgggcttacccaaatgtgtctagtgcatctctgatgaccgagtgcgcttcgttcactttgttgatcagttcggttcttctctgagatgagatcggaggggtcgaggtacgagtgataaagctgagatcgtccgacaaatgcacttttataggcgaaggagacatcattggaaaatgataatttagacgggtctatgagcttctagagctagaaagctgaggggaggctgagcgggaagcgataatccgtgagccgcaacgctgaagaatgtaagatggatgagtgggagtgaaagaagagaaaggaggaagatgttgttttggtatgctgtcgtctctcattacgatcaaggctgtgcaacactacaatgtttaaggagtctttcctaatcgaatggaaagctgtgacgaggcgagcacgacctttaaccattcattagtcgttgataaccctccaccatcactcatctgacgtcgagctcattcttgttctctgcggatttacttcttgtttatctgtgttgtgagctcttgtcctgcccactagacgatttactcaaggaacttactcgagcttgaactttgcagattagggatgccccgcctaaatagcaaccctgatcccagaatacctcttcggcaacttccgctacgagccactcgtccgtcatccatgcgaccatcaccagcatcagccccttcttcgagctctaaatcactcggcgggaacctcaagtcaacttatggatggaatcgatcgaatcgagataacgacggaggagatgaggaggaacaggccttgcttgatggagtagctagggatcatggtgagggggacttggagatgggtagaacgtcggaagaaagaatgccaggtgatgagatcgatatgaaggtaagcacgatccatctataatcgaacgccttataataatatttattctcttatgtttcttatgtttcagaccatccggtcaaaaatgaagaaagtatctcgagacgcatcgcgaacaatctcgtttcatgcatcgagtacgttgataacgttttcgcctctcctgtttggaattttggctgatacaacttcaatcttcgtgacttcatccaatcgacataggcaagttcaagagcagctttccggcaaacctcatccgcaaccagaaatataacattgcatctttcctccctcttgtcttttacgagcaattcaagttcttcttcaatttatacttccttttggtcgcgctcagccaatttattcctgcattgaagattggttggttgaacgtttttagtctacatcttatatgggttcaatcttaacgctgatctctggtttatactcgcgaattatgcaggcttcatcgtgacatacgttgctccgttggcgttcgtattagcagtcacgatgggaaaggaggccttcgacgactaccttcgacacttgcgagacacagaggccaattcggcccgatatcttattctagatcggaacacaggtccatcaaccatccctccgacaagagcagttccatcatcgaggcttcaggtcggtgatctcgtcgtcttggagaaaaatcagagagttccggcagatatggttctgctaagaacaagcgacaagagtggtactgcattcgtcagaacagaccaattagacggggagactgactggaagctcagagttgcggtcgcaagcttccagtccatgacggataaagagcttctagcggtccaaggagacgtttatggtgagtgtttcgcttcgacaacaccactcttcatatttcaaaagttgatacctaattatgttaacttttcaacctcagccgatccacctatcaaagatatccacaccttcgttggaacggtgtcgcactctccgtttgatgaaacgtcagacagagcagtcccaacttcgtcctctcctcaagcatccctcctaaccacgtctcagcctccaaaggttgacccgttgacggccgagaatattctgtgggctaatacagtgcttgctgcaggatctgcagtaggatttgtagtgtacacaggggaagaaacaagggcggtgatgaacacgtcaaagtctgagacaaaagttgggctattggatttagagatcaaccggatggctaaggttagatatcttcatgtatctcttgtgtataaatacaactcgtggtactgacagctggtgtatacacccggatagattctgtgtgctgtgaccttcgtcttatccgtcttgttggtggctttgaacggattcagaggtcaatggtacatatacgtgttccgattcttgatcttgttctcctctatcattcctatcaggtcagtaatctgctcttttgtaatgtcagtatccacaatcttaggtactaagaactgagcttttgtaacgtttccacagcttgcgagtcaatcttgacatgggcaaaacagtatatgcccataacattcaaactgatccagaaatccctgggactattgtccgaacttcaacgttacccgaagaacttggcagaatagagtacctacttagcgataaaactgggacattgactcagaatggtttgtgtagctttttctctatggttttcttttcgttcactcattgactttcatccggtcaacgtctgttgtccgtgcattctgcacattgatagaaatggaaatgaagaagcttcatctaggaacgatgtcctatgggtatgactcgatgaacgaggtggcgcatcagttggcaatctctttcggtggtaagttgcaacacaactaccatgtttctgaaattctttggcgggtttaacaaagccatatctgactgtattcgttgtacgtcatctaggtacacacgcgaggcatgggtccgggttagtgaccggtgctgtattagcttctagaggcaggagagacatggcctcgaaggtgaacgacgccgttttagcattagctgtctgccataatgtgagtgctatcctctacatttggttttggctaggttcgtgtctgattatcataggctcgtcttcaaaggttactcctgtcgaaggcgatggcgaaatcacataccaagcatcgtctcccgacgaagtcgctatcgtgaaatggaccgaatctattggcctgtctctcatatcgcgagaacggacatctatgacggttcgcattcctgacggctctaccaaaaggtttaacatccttgatatcttccctttcacttcggagtccaagcgaatgggaattatcgttcgggatgatcaaggcgagacaaccttctatcagaaaggtgcggatgtagttatggcaaagattgttcagaagaatgactggctggaagaagagtgtggaaacatggctcgggagggcttgcgaacgctcgtggttggaaagaagaaactttcagaggcggcatacaaagactttgaccgtaggtatcacgttgctcgaacgcagaccgaaggtagaaatgaggccatgactagagtggtggaagatctggagcgagatcttgagttgttggctctaacaggagttgaagataagcttcaagaggacgtccgacctacactggagttgcttcgaaatgctggtataaagatttggatgttgacgggtgacaagatcgaaacagctacctgtattgccatctcaactaaacttgtctctcgaggacaatatatacaccaggttgctaaacgtgagcgtttcttctcccgatttgaacacatacgtgctattcgaaggttttactaacaaacttgtacaaaacccactagtacggactgctgaagaggcacaatatcaattggatttcatccgaagcaaactggactgttgtctagttatcgatggagagtcattacagctttgtctcgatctttacaaggatgagtttatcgagctggcaactcagctctcatgcgtcgctgcctgtcgatgttcacctactcagaaggcggatgtagcgcgtttgatccgacaccacactaagaaaagagtctgttgtatcggagatggaggaaatgatgtgagcatgatccaggcagctgatgttggtatgtagatcctttatatactatcatagcatgtcctctcttaagtctgtgagctgacgttcgtaatcattatcatcacaggggtgggtattgtcggaaaagaagggaaacaagcatcgttggccgccgacttctcaatcaaccagtttagttacctgaccaagcttctcgtttggcatggaagaaactcttacaaacgatcggccaaattggctcaatttgttatccaccgaggactaatcatttctggtgagttcactcgtagtgcgttaagcatcatgtatgtgcgattgagtcttacactcattgtatacacagtcatgcaagccgtcttttctgctattttcttctttgcccccatcgctttgtatcaaggttggcttcaggtcgggtatgccaccgtgtatacgatggcaccggtgttctctcttgttctcgatcgagatgtcaacgaagacgtggctttactgtaccctgagctttacaaggaactcaccaaggtaaaatgttgatgctctttgtttcgctataaccttgactgactttgtgcctggtccactcgtattgaacagggacgttcactctcttacaaaaccttcttcgcttggacactcatatcagtctatcagggtatgctaatctttttgtcaacctcttaagtacctgtcatggaataaaattttgacctcttgtgttggtccaggcggcgcgatcatgattatgtcgctacttctgttcgaaaccgacttcctaaacatcgtcgccatctcgttcactgcattaattctgaacgagctaatcatggtggctttggaaatcaccacgtggtaagatcgatgttctgtcggtcatcattatgctgcccaattaactcactcctttactttttaaaaggcatttttacatggcggtctccttgattgttacactcctcttttacggaatttccatggcgttcttgcctgaatacttcagtcagtctcaatttgatacttcgcacatcggaacgaacaactgatgaacgttagattctgatatctgcacagatcttaattttgtgctctccgttcgtttcatttggaaggtggccatgattgtagcagttaggtgagtctcatgtcattcattgagtcgttctacttgaagtttccatagctcacgccagtatcgagtcgacactatctcgttctagttctctaccattatacatggttaggatcactcaacgatactttcgtccagccacatatgccaagttgatctcatgatcgatctgatatggtcggcgaagattgttagaccggacttcactcttataccctgcttaaatacaatgataccatcacatgtagacacaagacagaggatagcaatgttgttttgtgcttggaaagagagcaaacatggtgataacaccaaatgtcagataacgtctcacttatatacagactcaatgcagcagcgttttgagatcttattaccagccatcatactattctagatctcctccaatccactttagctcgcttcttcaaacaccgtaataagtccagttcacttgttctcattcagagagtgtctttcctgctcgagacgtagtagtttaagcggcaaagcaattagagtcgtagaggaaagcaagagtgttctacctgtcttaccgctcttgactgatcttgtggtcattggagattatcctgctcgccgtccacaatacttctctccatccagatatgaacacttcagtatcaccttcgtctctatctacgccgacaatgacattatcaagtctcgctacgactatcgtactcagccgtaccctgactgctagtccttcggcaacatcgacggtttccaatgacagattagatgttcttccggggaaccccttggtgaatatatactatcttcaaacttcacctgttgaaggactagtacattaacactttctgtgtgatcatcgatcataacaaccaggccaatttcattctgggactattggtcataactctcgctagcgtgatgaactctttcggattaaatatgatgaagctcgatcatgtaagtatccattccgtaactttgttctggcaggacgagataatcaagtatacgagaggcatggccatgaatcaaacagaactcatagtagagggtcatacttgttcgttgctaatggtgctccttgttggatgctcgtggcaactttctttcgctcgtcatggcagatcaagacggccctgataccgtccggtcagaaacgtcccgagtggctgcgcccgacttggctgctaggttttggatcttgtaggttctatctctctatctgtaaggacggaaaaacgacttcagacaaagctgaattaagaggtttgaggaacagatgtgatatcgcagttggtgggatccacgttggctctgagatacttgcgagctgagttcgtagccccgttaggaagtagctcgctcgtgttcaacttcttgttcgcaagatggctggtgagatatctgtgttattggttcattatcccaaacctatcaagttaacaaaagaagaagaacgctgaggccctcggatattctattttgtattcggaatatctaggttggcactcgtgagttactcctcatgtttgatgttcgcttgaagttgaagtgtgaactaacatcgttatcctacgcatatggatcttctcagcggtcacacagaaagacatacatggcacaatgcttattattacaggagtcattttgatccttgtttttgccagcattaattccgggctctccaatactctttcagttcgtacaatatacaagtattttcatcctgattgacaatgtgttcattgacagtatctttgatctacgtatacggcttcaaagcttgatagactgtatgtgctttggggtcgaggaggattccttttctacttctttctacagatattagtcctgtttagcgcatgggaaactgtgcatatgctcgctctcatcttgagaaaccaaacaagtaacgaggatgagatcgagcagcatctatcggtgtgttatgtctctttctcatgctaacaagtgaatgccatactgtttgccttaccttctctaaatcatgaatgcacgtctatggggtgtgcgatgagcagacaggaccgcacaagcatattcccaagtttttccatcctgtccaggcgtatcataaatcagcgcaacgattcctttcagtcaaattatcagtgttgttggggagatcttctgagaaacatttagcgttctgtaccggaattgggtgggcgagcgtggggggagcaatggctggtgcgagtctagtgtttgctaaggccaccgtgatgatcgggatgggagaaggaaacgttgtgagtctttctatgtcatgttgtatctcgcttgaacccttgtatttaagttgatgtcaggaaatggtcatattgctctcttcttgcttgtagtacatccactttttacccatgataatgattgctttcctcgcattaagtgctgtgctccagatgattgctctaaacagaggtttaaagtttgtctctgtatcgtcctcatcacatctatgctcagaccttggcctgactacctatatcacgaaaaaccagagcttatgattctacactagtcgttcctgtattctacgtgagttgtgctactttctcatcgctcctcaaactttatgttgttaaaactacgtttctgtttcgttgttcatgttctctttggcttgcttgatggggtcgcgcatggtaggctggatacactctccttggctttgttaactcgatggtcttcttggaccaagttggtgcatacagttggacggtgttgttctgtattgcggtcggagtaactgttttgttgagcggagtggttagtttgttctacctccgttctgctttctttcttcttggctgatactggtttgatatgacggtacgttacggctcttgctctcttcaggttcttctgtcctctatcaagaaggaacctgtgcttgaaactcctagcgcagacgtccaggaagaccatgaacggcatttgaatgctattgagcatccggatcatggtcgaactcgaactgaaagccatggaatcgaagaacggcgtgcgttgtttgacgctgaagaggatgctgaggaggaggattctgatgatcggttcaaacgtcagtcgacgcagaagagagaggatgaattagctagtggggcaaagtgggaggttggaagtgtaagtgatgatgaggaggaagaagggtcaaaatgggaaggtcagctgagtgcgcatgtttcgtagtcacatggactgtatcatcttgctcttgccttatgagatccggttaatatctttctctgctgggtagtggatcacttctgttatatatctgatactcggtaatggacgcttgctcgattataacgaccgatggatgcgacaatccatatggtttgttctcgtctgacaaggaaaaggatctgaaagcgcttcattcattcattatggaagcgacatacataaacaatgccgatggacagaagaaaggagaaaagaggggtgatggctggagagtagacagcgcagggatgtgtccttccgttttaagattgatgaacaaggaaccacgaccaacctttattaaggctttcggaatccgccctttccatcagtgatggtaagaatctcggaaaccaaaccggttccgatggtctttccaccctctcgaagggagaatcgagatccaacctccatgggagtatcatgggtaaggtcacagatcatgtcaacgttgtctccaggcatgaccatcttctcctcaggagactcggttccctcagggaaggtcaagtggcaggtcacatcggcagttcggaagtacatctgaggagcgtacttctgaacgaagggagtgtatcggccaccctcctccttggtaaggatctgcgcgatgaaaacatgattcaaatgtcctaatcatcagtgatatgtttttagatggtagggctgaggacaagacaaagacatacgtaaagagaggctcggaacttcttgacagactcgatggttccaggaacaacaatgacctgacctcgctggacttgctctcgcttgacacctcgaagaagacaacccatgttgtctccggcttctccctatgaagcacacaaaacgcatacgttggatgagctttgcttgggaaagaacaacacgagatatgtactgatactgaagagaaaggaataaatacccgctcaagctccttgtggaacatctcgataccagtaaggatggtcttaaatcgggatccgcttccaataatctcgatttcagcacccttctggatggttcctcgctcgactcgaccggtaacgaccgttcctcgtccaggaatggaaaagacgtctagatgttatccgacacaagtatttctatggtcagtgttgctatctctagaccacagaatgcccaggccagatcaagcttaccctcaacgggcaacaagaagggcttatcaagatctcggacgggggcatcgagccactcatcacagttcttcatgagctcctcgaccttctcagctccaatcttggggtctcggccctcaagcgcggcaagcgcacttcccatgatgatcggggtgttctctccatcgaatccgtactgggaaagcaaatctcgcatttccatgtcgacaagctcgagcatctcctcgtcgtcaatttgatcgaccttgttgacgaaaacgcagagtttcttgataccgacctgtcgggcgagcaacaaatgctctcgagtctgaggcatctgaccgtcggtagcagcaacgacaatgattgcggcatcaagctgggcagctccggtgatcatgttcttgatgtctataagagagcgcagagagtcagcatggcattgacgtatgtgctatcagtacgctggatgtttgacatacaatcagcgtgaccggggcaatcaatgtgggcgtagtgcctcaaatcagtctcgtactcgacgtgggaggtagcgatggtgattcctcgagccttctcttcaggcgccttgtcaatctgagagtaatcaatgaactttgtcgatccagacttctcagcgaggtgcttggtgatagcagcggtcaaagtggtctctaaatcatgaattcgggttgaaggtcaaagcttacttcacgttagaaaaggactcgatgctttaccaaacaaaaggagcgaatgaaggactaacttccgtgatcgacgtgctagatcgtggttgaccaaggaaagaataagggaatcagttcaatttctgacaagaaatggagaaacattgtcttacaccgatggtaccgatgctgtgatttaacgaaggaaagaatggtcaatgacttttccatcttcaagaggctggctaaatcttacgcaagtcggcgacttacttgaagtggggcttggctcgggaaaagaactcggcgtaagatcgctgggcctctacagatatacatgagacaaaaagaaattcagcgcagggcacctcaaaactaagatgataaagagcaacactgacctcgggtgatcacaggagcgactgcaggagcggcgaaagcggaagagagcctggatcgggagccgataagggtcgactgggaccgaatctgagtagcaaccgagagaggccgggcaagtgaggcagctttagagaaggatgaacagataaccaggcgtcagaccattggttcttctccttccgaggtgtaagagagaagaagtcctgctagatggcgttaggttgtaaatgagagcgagatgagagaaacttggctgttccgttggttcattaacattatcccagctcttcaggctgatccacagtcaaggcctccgagacctctaccttctcattgaatgtggagtatgtatcgatcaggaactctgatatccttcatcacattcccgccactgttccatcgttgattcagtccgtctcagcgatactagattcttgtctaacggcccgatttaaggcacggtgacgagactaggttccatagagtatatagctctgatcgaaactagtttccttccgtcctatctacgatctacgagtctgatcgtactattcttgcggtcttcgttctataaacgaaatgagagagagggaacggacgagaaaagaacacggatagaagaggaaagggaaggcactaaccccgctgagctccctgtcgagcggtgagagcagtaagcccggatcgagcgcaagtcttggtagcgagcatgtttgagggcgagctttgagaggatgtgtgtgtgcttctaactgttagagagacgacggaggagcgaggtaaaaaagaacggggcgaaaaagaaaagaatcggacggtgagaggcggcggaaaaagtgtaacaatgcagtaattcaaatattatatattgtaaccagctcaactaagtgttccagacccagcagatggttccttgttgaatcctctcgtttgcccacactcaccgtctttgtcgccttctctattcctctctctctctgttctttttctcatcgcttccccttgattctatccagcatgtcgtaagtcagagcctttttgaatgtgtgttctcttagcagaggtgtctgactgttcgattctcgtgattgtctgcctgtgtcgccatgctcttctccgccttgatggaaacacagcgacctcgttcaccttccaaagtccgagcttaacgaagcccaggtccgacagctcgaagagtatgaaacctcacagggaccgctctctgttcttcagcagtctgtcagaaacaacactcaggttttgatctcgctcagaaacaacaagaaacttcttgctcgagtcaaggcattcgacagacatagcaacatggtatggtcgtttttccctccttcatctttttcttccttttctctctacatatctacgtggtatccttgcatctagagcattcctcgtgagcttctatacatcgttctgctccagtcgcctcctgctttcgaaagaggtcgtacagactgcacaagcagatgagcagtgaagagattgccagcgacatctatctacgcgtctctctcaaaagtcttcagatttaaccttccgtttctttctttccttctcacgtttctaggtcctcgagaacgtcaaggaggtttgtattccttctctgctctctcatctcttgtctcatcctcttcagcttttgatgacatatattcgtcttgttcgcgatcgagcagatgtggaccgaacagccgtctagcaaaaataaaaagcctgccaacaaggatcgatttatctccaagatgttcctccggttcgtgttcttctttccgtcctctcgttgagagtctacctatccgatgatcaagagtgcgctcctggtgaactaacgctgtgcttttgttaaatatacttggtgaaacaatttgcttgttggaaatctgaatgttggtttgcgacgcggtgctgcgtttcggatacatgatgggcggatggattacttcttcgggcaacggctgatttctgaccggttgcttgggtttctttgtagaggtgactctgttgtgatcggtatgtctcattcatcctttgattctccttgtacttccagagctcatcctgaccttccttttgctcttctgtccgttcatccctgaatatgtatagtccttcgagtggctccgtagatcctctccaacctctcctacaaatgaagacagcttccagggttcttctcctttccttccctctcttcatctctttcaataacccgtcaaatacaaaaatgagcatgaacttcttgtactctatctctcaaacgtatgctagagaatgaatcaagacgagcagaccctctgctgtgctgttccagagcgttatcttctcgacgcctcaaacggccgcgtgcgtcaattattcaactccaagcatgagagcagatcatccaacctcatctttccgatgagatcaacatcatagtggtctgttgatctggcctgttggctatcagaactacatttcaatagaaagaaacggccatttgcccaattcagataagatgactaaaaaagaagagaaactgatctattatgtaaaaaaaggagagataacaaacgtttgtcggagagtgaatgagaagtggaatgagtgaaaagaacccttcatctctgagcggcaaacacctggacacaacatggacgccaagagatgaaggcttatattttctgcaggaaaactcgacgattcgttaatcctattcaacttctatctagttggccaatcccacctcctgtgtgaacggattgacgaaaacaaagtcaaagacagattgtgagtgattacaaactagaggaacaagattcaagcggcaacagagatgcacaaaatttaaaggatatgagggagaagaacacataggaggaatccttacattttgaaggaggaatccgactcttctctgactttttggtgcagttcgaccaccagtggtcctcatctcctgacacacgaagctgtccggcggtccgagccactcgttcaacctgtatctctcctcattgtcgtcctcgtcatcagcgcccccaaagttgtcgtactcgtgttcttgtccaaacagatccctggcgagttgggtatgagacactccgccgtacgtggtcacacaccgagggtttaccaaaatcctcgccgccgtgaacgcagagtttggtcggaggaactggacgtctccaccagggatgtcttccgtatcgagcggaggaggtgcctgcgaatcctccgcgtctgtcatggcgtccgcatccgaaccggcgtggatatcgtattcttcggccggatctgcctgcttgtgatggaaaactggggcggctcctggctcctcatcctcaccaccttcggcaccggcaccaacgacggcggctgccactggcttgaccttagctatttcgacatcagcatcggcgtcggcttccaaatcgatgggttcaggcatcaccggagcgttctccgcagccgatacatcctcatcctcatccccgtcgtcctgctgtctcttgatgactcgagcttcaacctgcttcgccatctcccgcttgacgaaagccttctcggaattgttgatcactcgcttaccgtactttccggtcgcacccatagtatcgtcaacccacttgacgttcctcgagttcttcactccgtccttggcagcatcggtccagagatctcggcagaaccacatctgagtagagtccatgcattgaatatctgggtccatctcaaggggctgggcactggtcgataggttctgggccagtccagatgctcggtacttaagacctttgtagtacgattggaatgggtctactacgtgtgaaccggattcacagcagaacacctggaacggcagatgagcagcatatctctctgtgcccactcgatctcggggagggccactaatcaataacaaaagtttaatattgggtcggcttctttccaggtaaattagagacaaaggtaagcaaacttactcctcaggcttggcactcgactttgcctgacggaacaagttgccctcgatgtctcgcgttctccatctatatccgacattgtaaaacctcctgtcagactttaattcggcggtatgtttccgtcaaaaaatggcgggagattttagatatagacttaccgatcggagaagatgaagaataagttatgttctgcccaatccataccacacaccaaactagcgtcattggccttgctgactcgcaagttctccagcacgtcggtcgggcaggtaaatcctttgagccagacaacccggtggaacttgatctgtctcttctcggccaattcaaacaaaggatctagcgccaaatttcgggctgtcgcctcctcgagagggtagtaagctgccgaagggttgaccgtcattgggggaactcgtcgaattctgaaggcaattcctagcatggttagtacggcttcacacaagtcggacagcgtcggagtagaatcggtcgagtctgagtcaagcatcgatacgaagacattcttgtgaccgagtctagaagaatttgggccgacaaccacagatccataaggtcagttggttgagaagtgaggaagtgggccggatacaacagaaggaagtatctcgaaaagagataggaaaagaaaggataatcatgatgaggtactcaccgtttggccagttgaacgataacagcaagttgatccaccaagaagtgatcggctgaatggacgacaatagcgatgtagtataagtggcctcctttggcaagatcttcgtattgatcatctcttttgttctgtccgaacggtcgagagagtgtagggcaggcagcctaggtcattcgcgcccatcatacacgtatcatccggaaattgaacgaggacgggtaacagggagtcttgcgatcagctttgctgctagttgtatcgcgaatatgaaggatagacgtacagcaacccatccattgaacttgaggagttcatcaattgcattccggacgacctgagcatcccgatgagcggtgtctgcgccagtgatccatggcttttgatatcgctcccagtagtcactcacaccgagggagatctgctcgtcaaacatatcagactcatcgtcacgacctgaaggatgattcaaaaaagtacaaggtgtgaatacacatcttcatgagtctatcttgatgtaaatagaaatcaagtaggttatgaggtgagtagaaaagaacgagaagaaccaagatagcaagcaagacaaacagcgctcggtctcgcctctcccggaaatctttgatcccgggaggtctaaagacgctaaggaatggaggaagaacaagaaatcttccagagagagagaaacgaccagcttggctgacaaaacgctagctagaaaacatacctaatcgactctgcaagaaaccatacttgtgaacatccaagttcttgtctcctcgtattcggtcgatcacaccgtgggccttgatctgggattgattcgatactctaacctcgggagagctgaaaaacagccaacggatagtaaaaaaggcgagaagtccgtagactgtacgttggcacagccttacctgtgcggctgtgagagccatacttcgaagggggaagggagaagagaaaagcgagagattgggtgatggttgatgggaacgggtttcgtactagggatccataaaatacaaggcaaaaagaaggttgtcactttcgcgcagtcgccccgagatgctcgtccagtgcttattcagcacagatagcatcgaatgaagaacgacacatcgtatatcatacattgtgcacataaagctcactcatccagctcatctctcagaaacccagtgagaccctcgatctgtttttctatctggctgccgccgaaaccaaagagaaaactctggctgccgtcaaattcaacctcacttatcgttctctccttcccagaggtcatacctcggaccgaccgaccgagagcgctggccgatgatgatgatgatgatgaccgagtgctcaggctcatgagtcctctccgtttgagattggctgctgtcactgttttcgtcgtctttacagtggaaggactaccgacgcgttgagaatttgaacggagcgaaggtgattcggaggccagaggggaggttggttgagcaatcggtcgaggtttcgaagtaacgggcagggaaacaaccatgtttgtatgatggattggatccggtattatgggtggaggagcacatcgtttagagttaggagttgaactagagagatcgctcggaaatgaagggggataaaactagagaagatatgcgaatgagatatacatcccaaatcgatcagccagtctacggaacaaagtagctcagagggaggaactagaagcggatagacaggacatactagatcgaatgccgactgatctaatagattttcccatcgacgcttcttgagcaccgtcgaattgtcctcttccggctccatgtcctctagtaagctctttccagcgtcctcttccagtgccctctcgaccgacagaacactggtattctcctcattctccttggtgccctctgctgcgccgatcagtgtactctctctgactctttccctcctgagttgtcgagcgggtttcttgcccgtgaaacgtgctgcgttcgctgatgacaacgaccgccgcttagtttgtttaaatgtcaacagacattgatcggatgagactcccagttgaatgtctgatggttcatcgcgcatatgctcctctcgggtcattctagccagctttttggtgttacggaagattttcttcgcccgatcggaagaaggaggcgtgggctcttgggagccaatattcacattcgacattgaggagagagggagaggaagaggagaagatgagagtgaagctgaaatggatcttgtggtaccattctggccggaaagcgccgaggctgccaaagatgtcagcggggccagagaagaagtcgggacgtgttgcacagctagcgtcgcatcggccggtcgaggtgaagacgagcgagtgttagagcttggaagcttgcgtcttttaataggcactgtcggatatgagacagaaaccacctgggtagcggactgcctccatgcgaggtattcggtctcatttctagaatggaaaaacaacggccggttaaggggaagtcgtcattagaaaacagaacgggaaataagcctcaacgaaaaggccagccaaactggtcaagaatatgaatgacaagagagttcacgaacctgggtaaacccctagagaagttcatgtgtctctctgagcgttccttctcatctattggtatagatcccagcttccgcccaacctctccccctccggctgcccagagccattcatcgccagctggatccttgtatgtgtgatacctgaccgaggtcaggtacaacatctcgggagactctcgtgcgatattggcaagctgtttgacgcgacggtcaaactcgggattcaatggtggggcagtgaatggatatggactatatcgaatgacaggaggaagcatcgacagaagggatcaacctcgaggcagaacgagcgaacgtaacagatcccacttacggcacgctagcaaaagattcaagtctctgcgtaagctcctcaagcgatagatctctcaacgagcggatggatgtcatgaagaattgacgatgtgatatgctcgatgggtcaatcgatcaagaccgaaagaagagaacgttgtatcccaacagttggttgacagttgatggaacggattttcccagttaaggtttactcgaatccatcatcactcaacctcaaccatcatacccgcatctctctcatacaacttggtatcgatacaatgtctagcaagaacactcagcctgctcaacctcagtataacaatgccggaggtccttctggtctgaaccagtcaccgttggttggggaatctgctcctccccctgcctgtaagcttccatcgttctcttggagatgcggtggctattctccaaaactagtggttcttgtacaagtggaaagctcattcctttgtcgtccatttggacagacgccccgtctccttacttccaagggcttcctacattcaatgctccggagctgtctactccgttcgtcgctcctacagctcacgtagccacccagcgagctagagctaggttcttcaaggcgcttgtggtggcgttcatcctctgggttttcctagggtccgtgtcgtttccaccattgtctttctattctttttctaggctttgacagttccttgaatctcctgcctttgtttcaatacgatctgttctgcagtgctgtcttcggaggtagcgttttcgaggatgtctcaagggacggcagtcatcgaggctcaggtcgacacccgcatgtctacagtggctctgacacctgggattctacaggaaccgaagttactctcgaccatgttgctcatacttctcccgagttgacaacgtttagagagacaaaagtagtccctgaggttgcgtctgtcgaggaagccaaatcggattaaagaaggattaatatttgctacataggtcatctcttggctatctctcgctctgcctttctcttcctcttcttcttcttcctcctcgtcttcttttcccttccttgtttttgcttcttctgattctatggacttatctctatgcatggcgtgctttgtggacatgaggacaacaccattgcgtatatccaatcattcgtcgttgatccttctgtgcttccaataggcgaaacagaacggtacgcacccgcgacgtcatcagcgccgatagccggggcctcttctctttttctctcttctttatcctccccctctttctttctgcccatttcgtccgtcaacgaccaccaacacatatcgttgccagccaatacagcaaagctttttagacagatatggccggccttcttgcatcctaccaatcgtttctctcgaggaatcctctcttgggaaactcggtctctgctgccgtgcgtcctctctgcttacctgcctcgctggttatatttctgaagacaggcccaagtagattcgcctctctaatggttgcttgtcctttatcttgtgtactacttattaggctttgtttgccactggtgatggaattgctcaacaatatgtcgagaagaaggtagagatgcttatatccaccgtacttttacttcttttaaccatctgaagatgtactaacttttcggagggactggctcgcgccgggcatgcgatgttatagggaagggaccatgactggattcgaacagggtaggtcatctcgacttctagtcaggtttaacagttctcgtctgatctgtttgctcattggtatctcgatcaaactgataggaggatcgttctctggggaggaggattgtacgtctgtgtatccattgactctctttccgaccccttgcaaacgaatgagagctgatcacggtacgggtataccaacaacggacgatccggtggctggttcctcgattcaaacatctcagatttgctcctgttgtgacccgttcgttcagttaatcgaagtagaccttgttgatgctaagcactcggtcatactgatgcttgtttcgtccgtgaatctgtctcttttcgaaacagaatggtttaagattctcgaaaaggttcattttctgatcgccacggcttctctgcacatgcatgctctgggctgaactactgcgaaatcttgatcgtacaggtccccatcaagaataaagttgctgctaccgcgaccagggtacgtgcatggttacttggcagtttggacattggtagagcagacaaggagctgattcctcatccggacaaatctcggtgtcttaggttgggttggatcaatttgtacgtatgccactccgtttatttctcaaaacactgatgttccctcctgctctctctgtcgatgggcttttgaaactgatcactggctcttgttaatggcaacatacaggtttttgcacctatagtgttgacgacgttcttcagcttcatgggactgctcgagggtaaagagaaagagaacgtccaagagaagctgaaaaacgacctagtccctactttgaaagcaaactggttcgtatctcttcctggttttcaccatcgttctcgcctgtttgaagaggcggttatactcacgctatgccatgcttgtatactcgaaggatggtatttattcctacgcaagcagtaaacatggcattgatcccattgcagtaccgactgcttactatgtaagctttggtctgggcatgtcttcccctttggacgcggtcgatgactctgctgaccagcctgtcccgcttaatgccatgtttcctgctgaacatgtcttcgtttcaatagtaacctggtaagttcagcgtgctttacatctttcatcattcagttcggcatatcaggctctgattctcaatcattcgttcggtatatatccggcttaggtcaacatcccgtggaatacgtatctttcaattcaggccaacaaagattcgaagtctgtccttaaagaataaatagattactctgcactagatattttgtaggaacgttcgcgagcaaattctcaatgatgtgtagaacgtagaacgtagaacgtagaatgtagaatgtagaatgtagaagggatatgaatgagatatacaatcgatgctactagtcatgacgaaggtgtacagatgggtgtctgtaatcgatcaagtaatttttgtgtaatggccgactacaactttcgcataatcatctgattgccattgtcatcagttcgccaacgacgaccatcaagtgaacacacactcaccatggctccctcgagagcaaacccaaggggtgtttatagtcagttcccatgctttgtttgctttgctatctactttacttaaatcgatctgaccgttgttcgctctggcctctgggttggactttagttagcaatgtaccctagtaagcccatcgtgttcaagcaacatccagcacaagacgcacctagatttgacgtccacaccatccatctatgcgtttctaatcttcatcgtccactcttctcccttatcttacttatttttctggctcgatagtgatatgacagaggaacaattggctcatgtgatgagcgaggccggaccggtcgcgaagactaggtgagtgagactctctatgacatcttcacttttatccttctttcaacctctgctctgtctgtcagaatacatcctcaaaacaatcatgtttcttccttttcttctttcttccgccctatatggacttgctggtcattctggacagacttgcattccatcctgatactggacgggctaaaggttttggattcgtcgacttttgtaggtctagtcgcgtcttctccttcgttctgtttgtatggtgagtaggcagtgtgctgattgtcagactttgcttcttccgtctcatgacatgcagatggtaagtcttctatagaacccacattgagccgttccacccaatgctttcttactctcatatccctctctcggcattattcatagattccgaaacagctgcctcggctgtcagaaacctaaacggttatctgatcaatggtcgtccgctctcggtgacttttcagatggacactgatcacaacgtccatctctcagcctccgttgaccccaactcgcctcaagcgttgttacagaaccctccaagaggtagggagcttgaccggggagctctcgcgacagacgcaatcactcaaactttagcagctatccctgccggtcagttggaagaggtgttgggccggatgaaggtttgcctagccatttctctctccctcttcctcttgcttgaactgatcattcatgacttgtttatatgtgttcactctttctggactgcagggtctcgttcagacatctccggcggatgcccgacagatcctgatgtctaatcctcagctctcctacgcactttttcaagcaatgctcatgatgaaccttgtcgatccaaccgtgatctctcgtatgactgccggtcagccagcctttccgccatccgtcccaccctcatctacgccggtccatacaacctcagccggtcttcctccaccatcgtatcctccggctgcttcgcatcagccacattatcctccccaacagccggtcagagggtatccctcgtacccaccgacgtatgctcaaggagggcctccgccaccacctacgttgccatctcatcaccaacctgcctcggccggtccgccgtctctagcgccgcaacaacagggagcacccggaagatctcctctaccacctccaccgcaacaacagccaccgcaagcggcgaacgcgatgccaccttcgttggctcatcttccaccggatcaacaggcaatgctacttcaggtgttgcagatgccaaaagagcaggtcgacgcacttcctcccgaccaaagaacaagcatcatgcagctcgttagttctttcacttcgttcttccgccttctggtattcgccctttgttttatgtatggtacaagtgactaatcatttgggaccttccttttctctctctctctctctttttcatatggctgggggttaaatcgaactcagagagctcaatttgggtcaatttaaacatggcggtgacgaaagagacggagaaaagagaaggaagaaactttgaagagaaaaagacagagaatctgtcattcgatatttgagatgctatctgatgaacacgatcggaaaaaagaaaaaagaaaaagaaaaaatcgaaagtccgacgaaagaagagaggatacatccatagagaagtgggaaaataaagatggaaagttctaatccgtcttgacgtgcctgactaggacgatgtgacatcccagagggctgtttatgtcaaatcttgattccttcaacgatcactaacagcactgattctcgatggaaagacacaatctctgacagtcaacagtctatcaggaggaatagaaactccacacattctacaatcgagactcgcgtaggcacacacacatttatcaaacatcaaagtggagaaagtagaagaaagacatctgaggctatagagaaacatccctggcagatgatgatcgacaagaacgatgatacggtttgctggcaacttcttttttcttcctcatattggaggaagaagtaaagagtgtgtataaccaagagacagaacgatcaataggagagactaagaaggcgtcaacaaccctaggtcaagaaggaaacaaatcatgagactcgagaagaacgtagtttgagttaaccaagaaaagggtttcaggaaggtacttggatcgacatctatggggaaaggtcaaaacagagaacaaaacgagaggggaaaagagaaacgcgagctggtgggcacgcaacaagggaggggggggaaaaataaatgttggaatcatatataaccacggcgtccatatgttagcagaagaatatgggtttgatggcaaaagagaaaaagaaaaagaaaagatttaaataaacaccggaacagaagcgcgatggagaaagcagagaaggatgagatgatgatagaaagccgagtatgaaagagaaagagggaagaataacaaaatgaataaagataggacaagccattgaagcacacaaaaacacaatgatgtacaagcacatgaccggctttgaaagggaagggaagaaaagatataaagaaatctcaggaggaagaaaaggagtagatcagaaaagaatgaggggggaaagagttgtgaacaactatggaggacgaacaaaggaagagagactagagatagaggagcagcgtcatcctcaaggcttctttcctccagagttttctgagccactacccattccccacaacacacccaaaagatctctggcggtagcgacaactcctccgccggacggcgatgtcacctggccatcttgcttctttgactgacctagccctagacctaaaccttgtccgatcgcagagccggagccaggagagaatgagctagaggcgatgttctgagcagagaatgctgaactacgttgatcaatcgacggacctgaccccttggagctagggggggaggaagaggaggacgcattggccagggtgggaacggccgaggatgaagaggatggggatggtttcttgggtgccgaatgagcgtgaggaagagacgaggctgacgtgctctgaccagatctaggaagagggcgcatctgtatctgctttgtatttcgcaatttgagaaaaggtaggatgaacaggatgaaaagccagtagaacgtatcgttcgatgtgcacatcagattgagttctcagagtacatccgaatcgaaaggcagagaagaaatcacttacagtaggggacgatgtaggagtcgggttggtgctagccataaacttgtatccttctccctcctcattgtcttcatctgcctctacctcttgagactctttcttatcgtcatcgtcatcatcatcaacttgttctctgaccgtgtcggattcttctggttctcggttagatctgttatcttccctctttgtcgcaacctcatccttcggtacatcccctacgtcgcccttctggaagtgatcaccaaccattccacttccggggatcgaaagtttccccttttttgcctcttgttccacatggctcactccttctcctccgccttgtccgtccttcggtccggcggtcggtacgtgcttcttggactcgttcgaatctttctggtcctcattttgagtgtgggtagcccagtagtcgtcgattcgcattccgttgtcgcctgacggagatcgaggagacaatccattatcttcatcttcctcgccaaacgagggctcctgtgccccggcttttccggtagcaggctgagtgttgatgcttggcggcttggcgcctctaggtccagcccctgccgaagagttggatgccttcgtcacaggagtcgttgatgggtgaacagctcctgtcggggacgtgactccacctggtgcggacgttggccacccaccggtggaagagatgggcgaaccaggaattccagaagaggatgttcccctagaagccggtcgatcatgtaacgatgttgcactcgagtttctaaccaccgatcggcctcgagtaggagccacgtctggagaggaaacaactttgtcgtctccaccggtcgacgccaaggatgaagaagtggcggcagaagaggtgttcgtggaagcaggggaaggagaggcgggagcagcggttgggacgttgcccggtccagagactgcttggaagacacctcctgctccaataccctcgtctcgagaaatctcaggtgtcgctgtgccggaagaagaggcggtcgaggtagaaggaggaaagtaagatcctgctttatcacctgaagacgacttgccgcttcctccgctggatccagctttgttccttaggatggatcggccagctgacacattgggcgagggcggtgttgtggatggggttgaagaatccttggacgaagtaccagaggtgtttgtggcggaagcaggtgaggaagtgtcccgaatgatcttcacttcagagtttcctaccttgtcttgaacggaaggaacagaggcatatgcaggaggcgtagtagatccgacagaagcccctctacgaactgttggggtcgaagttccagatgagttggcggatgacgtttgagaggtcgactttccttcataatggccgacactaccgactcgaccgccatggctgcttcgaccaggaccggacgaagagccgctgtgggggaagattgagaaaagagaagaaaaggattggagaatacaaacttagctctgccctatgaatgggaacggtagatggatacacatggagaggcaaagaaggaaacggaaggtactgacccttgttgaccccctcggaagtagtcgtactcatcgtcgtcttcatcccactgagcggcatcgatgggacttggaaaatcgccctcggccctggcctgggatgaggcgatactctcctttcgctggacgccggcatcctggttattggcagccgctgagccggcattcgggacgtagacaatggcgggtgcgggagcaggcaggacctcgttgtttttgagaagggcaggggcgatatgggcgatggtgaagtgctcagtggaggactgtctgctaccagaaggccggacggcgtaagaagacgagctcgatccggtgcttctcatttcgagatgttcatcctcgtctgacgaatcgatcccgccgtcttcgcttgaactgctatccggccggtcgggtgggattgatgtcggctcgctcaacgagatgcattgttcgacgaatgtgttgaacgagatatgtctctttgctccgtcccttccttctctgcctccgtggtcaccagtatcagatggggtggcccctccagggaagggggtcaaggccgagccagctcctccggccggattggtcgcggcggcataggagatattcatcgatggaagctggaacctcggaggagagtttcctcgtctgccggtgctgcgacggaggatatttgtgtcgctcctggtctgatgtaggccgggtcgggacctgccttcggtctctgagaattcatcttcttcgtcttctgggtagagagattcgaggatgggcgaggctgagccacccatctgagctcgctcgttgttaggcccggtgagaatctcagagatagttcgatgcttgagaatcggtttcgcacgctttccagacgatagatctaggtgatcttcggtagtcgagatccgaggaggaggtacggcttcaacattggtatggagagggccgtagagccatgtgacgtccgagtctttgagcctaaagagttgagaacgggacggttagccgagttgaaatgatgatgaacaggtgttttgcggtatgagaagaaaatgtatgagagagagacagcggaagagataaagagatgatgatgatgatgatgatgatgatgataggggaaaggaaagttgagatagtcaagagatcgcaggagagtaaaggggaaaaaaggttttcttctatcttttctttttcttcaagaatagagatgacccggtacgacgtccgttgaatcactgcagatcatgatggatgagacttggagtctgattgccgggtatattccaatgaggacacaaggagccagagaacagagatggagaaagagagaaggaaactcatcgaggctaaaagagaagggtatgcactcaccaattgagagtctccgggctgatcgtcttgagtttgttccgctgtttccaccaggtccgccaactggcgttctctagtctgactccgttggcgacctcgttctttgttctcgtcatcgtcctccacgaagaccagatgtcttcctcggtccaatcatgggacaaatagtccacacagatcgagggcaacctggtctggacgtctccgtcgtctgggttatgaacgacagaaccggtaccgttcataggcgaagcgatggccggtgcgggaaagtattgagccatagtttggttgagtagaaacggcggacgggagaaagggaaggaggtgtcaaagagtacgtgaaacgatgatcctcaagttgagaaggaaaagaatggagagaaggcaaggacgaaggaaaagaaaaatggggaaggaagtcgagtgacttgtagccgagatccacagtttacacggccggggtcaaaaaaacgacagatgctttgacggactgatacgaaggattcttaattagatgttttctctccaaatcaagaaagaacaagaacggcaactatcacgctgaataaatgatgggaagagtgtgtgagcgagtatgagagagagtgggagtgtgggtgtaaggatggcaagttgggttgggaaagagaagaagaggcagaggaagactaagagtgtgtgcaagaaggaaggagagggcagagggcagggggctgcttggttacaggcatgtttacgttcatgtgtaaccataagtgatgatgcgttgtaactgagcgtaagtaagtgcgtgctaccgggcagagacagagagaaacatccgatcgatagtgagacagagtgtgaccatcttggggcgaagggggtgtacgtaagcagagtgctgattcatgtgatcgtaaccaatatgattaaagtttcaggtacgcctcattagatagatgattgtgttcctttttctccgttcaaacagtccttagtggaaccctggagatcggagggaaacccatgccagtctctttagagaataccaccatctgagtacccctcaagatcactgctttcacatatccctgttgaaagcccggagcgatgagattcttgttcagatgggagtgaatacatgaacagagtcaaaccttctatacgcaccagactgatgaggttacacacgatgcactctgcgtcatcgatatccagcgagtcatcttccgtcccgaatcggagtgccgtcaggaagaacgaaagcggaagagccaccctgtcagactgaccacttgacggttgttggagacatgatcgatagatcagtagcctggtggtggatgaagagaacgaaatgtcagctcgtaattctaacctttggcctctgtccgaagggtagctaggcagatacacagaaaggggattactgacgttcgtcgaaggagacttctccatacaaggatcacgcctttctctctcaacacgcctaacacctttttccgtctgaaccattccattcggtcgacccgttcattgcccccagtctctccaagcccacgccgccagctcctaagatctccgtatcgaattccgcaaacaagcgggccaaactgatccgtcagctgaaagtgatcgagcaacttcccggtcggaagcgtgccgagaaggatcgacgttgttaaaagagacaccaggatcaaccgacggttatggaacatcgcaagcgtattcgagggacagctcagaaatgctctgtgtaaggaggtgtgagcctagaagacagtggtgaaccatgcaggatgagtaaaacagaagcttcctctttcgttcatcagacactacccgaagccaaagacacttgttcagacagacctgtggaattcttcggtcacccaaaagccaagtgccttgggcctgctcgaatctgaccttgaccgcacgttcgacccatccttccttttctagcagccctagggaaggccggacaacttgtaggatctgcgcaccaagcttatgagtgtccaatctcgcatacactctaaataagatttcggccagcggaaacagtgcttgttttttcgacgggaccgatggtgacggatcccttgatgagagcgagagcgcatctcggatgggttggaagtattgttggattgccagatggatcagatgtggagttgatagctttatggtgcatgtgagcaagaataccggatgggctgctttagatattgatccggaaactctctcaactagacaaataagacacttactctcgtcgaagacaggtatagtttgtacgtcaaccgagagaataagacggcatatcttccaccttccgatgattgaaatactgaatggagagctctaagaatcgcaaacggctaacgagatcagcatcttcctagactatgtttctcctcctcttaagccgctccttagcttatatacttatgaaagcttacccttacttccaagatctaaaacaaagttcccatagaccccactcttcctccatctttgatccttccgagtttgtcccttgaatttcgtccagataggcttcccagaaatcttggacgtccttcgatggtgtcaggtggggaggaagcgagccaaaaatccctcggacgatagtaaccgaaagtgctgatttctgtaccatgtaagcgcgacggatcccgatgagccatatactctactgcgttgtatacaccattaatgtggttcttacaagttgatctcggacggcttgaatgatgaccggattagtgcatacatttgccagttgtagcgtggattgggctgttggagggacaaccgcttgggattgaacgatcgttccaaagaacagtttggcagaagcctgagtcgaggtctgcatgctttttgtttttcgtattgtccaatctgcctataatgggtcttccctctttctttctttttcttacaactaaagcgtatgcgatggagaacgatgggaaaaggagaagagctggtttaagaagagcgttgatggagttttgtcggtcaatgcaagtacacgcaatgtaaccttttcaagtaaggattccgtcgaatgcgcgtgttagggttaccgaaatgtttcagacgcgttcaacccatctgagacgcgtcacgcgttgcgcgtcgcgtctgttctcgatcttcaaacatctcctttcctgtctatcccctttcatctctcctatcgaccatcattccacacgtcccaaatatcgttctctctatcttgccttttgtgttgattgcctagcaagatactcgattatgtcggatagcgaatctactcctccgcctgatgcgcctaggcgaagtggcagacaaaccagaaaatcttcccagacaggtaggtccctcttccttcattctccaagaagcacctcgtttcgacggatctggcaggttgtccccgtgtgtgtgtgctgagattgttagcatacaactctgtttctgtcgcgtgcgctgttaattttgcatataagaaccaccccttcctgctcctcgagctacagtaaagaggacaggtgtagccggatcaaagcccatcaagtcgaaaacgaagccgaagagaggtctgaacaaagggtcggaagacgagtcgatggattcggaacagtctttgtctggctctgaagaagaagatcttaaagaatcagatgaagaagactcatactcggatcctgtgagttgatatctgttgacaggaggttgaataaagattaactgactcaacctctccaacgattcgtgtcttgtctccacgtctacttttcctgtcacacctccctttgaccatcttgtctatagtcttcaggtgaggaattcggaaagtccgccaacgcaaaaaactcgaaatcttccagagctcgaaagtctcatgttaatgacgatccagacgcgactccaaaggctaaaggaaagacgggggctcaaaagagacgcgctaggggctcaagagctagtggcaaaggagccggtgggtccaccaagaagccaagagttagcaagagcggagctgggaatgatactgcaacgactggagggatcagaaaggtatcagcaaatacagaagtggagagggatagcgttttctttagtaagctttcttcgtcaatagtggcatcatgtcctggtttcggctgatccagtttaatgctgaaaatttcctatatcttatgtttgtagacgcgttgattgatggccgtgcatttgaacctgtgatcgagaactgggcggaaacctacgaagaggaacaggaccaggcgttaggcgacttagtcattttcctaattagagttagtctctttcttttatcaaatccggtttggcgagagaagaagtttgatctagaggtcgtacccttcgcataaaggctgctggatcatcgtcaactgtaacacctgatgaggccgtcgatctagatggagtcgttagcagagtagacgatttagagaaagatgtgagtactctagacgtaaatcttccttgcgctgatatctgctgagctcagtcgaacgattcccttttgtaactcatacagaaatcccttggatcgtaccctctggtctcaagggataggaccttcaagcgtttccgaccttcccttgcgtctttcatttcagcttttgtactcaatctatctcagacccccattttgtactcgtccaccacgcacaagtctgaaccatcaccgatgatcgaggtcctacaatcatggctcttcacgctctcacactcgccgcttcgaagctttcgacacactggtactgtcatcgcgcttgagaccatgtcagctctatgtatcgttgcctctgaagtgagagaggagctcagcgtggctagtagacagcgtgaacaggagaagcgtaaagctggaaaagcgaccggtccggcgggcaaggctgccaaggagcgtttagtcgagttggagcgaaaagtaaaggaggtccattggaagaaaggcaaggttgacggataccttaacgagctcttcaatacgtacgtcgatgctctagggcttgtcgcttgattaggacatcacactaattgtggaccatgaatgtctttcttcggcatacagcgtctttgtgatgcgatacagagacttggatccaaacatccgtaccgagtgtgtgaagcaactgggaacttggatgacgactcttccagatgtgtatcttgaatcggcttacttcaaatacattggatggatgttggacgacatcgtaagtctatctttgaccggcatgcatgtttccaggaacttatttacaactcaacaaacatgtctcattctctctttaccaatcgatgtacaaagaacgctacaacccgacttgagaccgttcgagctctctctgttctttactcggacgaatcacatgcggcaagcctcagcacattcaccgagagattcaaatcccgaattcttgaaatggcattccatgatgtagaactctccgtccgaacgacctcaatcgagatcttgaaccacatcgagcgatcaggtatgcttgaggacgagaaacgacggcaagtcggtttactcgtatttgatgccgaacctagagtccgaaaggctgttgctgggttcttcgaagctcgatggatggaggagcgagatgaaacgattgaggagattgaagctgggcgccgaagggagaagaacctgtctctcgatgaagaggatgataccgaagaatctcaaagggtgttccaaacaagggtcggttggaaatcgctcgcctcgatgtttgttagattttctcaggccttagaggatgcctcaatttcgcctgagcgagacccaccagatgattccgatgccgcggatggtgctaaactcgttcgagacctaggagtcggagatattagcggaaaaggacgggtcgcgctcgccgtagagagcttgtgggacaaggtaggaagcttgagagactgggaagggttgacagaattcttgtgtctggaccattcacagaaagacagtcagcaggaggctagtcttgacagtggtgtggcggaggaggggtggaagttggaagaagaagaggaaggatgtctcttggaaatcttggtcactgggttgaagaaaaccaggcaggaagccgttcgcttggtcagtgtttcccttatcgttctagacactggatcgagaaatgcaaccactaacctttatatcttgtttcaatggaacaccctcctcacaggccaatgaggaatccactgttctgactgatatgactcgactcttaatcaacttcctaccaaagttgattgccaagtatcagagtgacaaccagcacttagtgtttgttctagcgattcctcttgtaatgaacctcgatatgtatcttgatctccgaatcactaccgttagttttctttctgttgtgaatcgtttgctatctgtctattgactctctgtgcgttgacctcccctgtcaaggcttacgaggccctctggaccgatctcattcgactgatcctcaagaattcggatttggccgtcttggatgcatcaatctcggcccttcaagcgatgttagcaacagaacctctagctaataccaacagtttgaagatcgccgagctagaggaggctctttttgctgctcttcgagcgatcgtcgcaggacgagacgtatacaccgccgcgttcacagacgaggaagtgggaagcttagagagttgttgcttaagaatcaagctattgcttggacagagagacttgaccgaggcaatggatgaggatgaaggaggaaaccagagcaatggttgggccgttttactagccttggtttcgagaggaacgctaggttacaaagaagagcgcaaggtgggttttcgctcttcaagctaagagcaatatcagctttgatgctcacctccttggcttctatctatacagctggtcgtcaatgctcttgaagcgttggctcggaatatattctggcgaacctcgaaggcgttagagaatgaggcactgcaacccacacttctcgagaagcgctcagcgcttcttgagttggtggaggagtgtgctatcggtacacagtctaatgccgttcaactcgttcgggctgctgtaagtgtacaactgaatttctctcaatcaggaagcaaacaaatgtccgttatagatggagataagtatctgatcacaagagacgttcttttaaatacaggctttcgatctgttacttcggttccacatcttgtacaaccatcaacccaatttgactcccgcagaacggaaaggagttgtgtatacggtgcctaaaccactgcaattatctctctccagtgaagcccaagccaagtgtgctgactacgttcgattagagatcgagcggtatatcgaggaccgctccgagctcgtcgctactcagaaggacgctgatgagtctagcgatgatggagacagtgatctggacgaggatgaaactggtctttcagactctaagaagattgcacgaaaggccaagagggtcaagcgtagcagagatgatggttcgtactacgttttaagtggtgaaagaaaaggcgatcaagctcaaactgatctctgctttttacatgtcttttctttctctgtttgtcattctctctatactcaacagacatcacgctcactagcgaagcagttcttgtccaggagcatcagttcatctcccttatcgccgcgttcgtgacggcacttaaaacggatgttctcgacattcagcatgcttccatcgtctttagccattacggtcgctttggaactgaatatgatatcctttgccgctcgcttgtggatgatgttcgttccattgcttgctatggagaaggccagcaagacaaaattgaaaaacttgtcctccaatcgctagagaatgtgagtatctttttatttacgctgaatggatctcgaagaataataagttcatttttttcaatccgtctttcacagtgctttgagctcttcctcgacgatcagattgatgaggcaactttcgtctcgcttgctaagctcctcacgagcagccttgtcgtttatggaacccagttcaagatcttaaagcatgttgatcccaaaacgcttacaagtgttcacaccactctgctcgatactttcttccgacgcttgggccagtttcagaagaacggaaacaagtccaaggccagaaaagtctactcttatttccgggcgttgattcccctttctgtcggaatgcagggcagagatgcgttgaagatgttagtctcgtcatctgttccatggttctatttttctctgacctttgatggctgatcttctcctatggcctttttttctcattctagtaaaatgtacttgcatgagatacttaccaagcttgagattgaggtgacttccaataaggtctgggacagctacaggacttacgagaagaaggtcagtttttcgtgccttttccctatcatgtcaacagctatagctcatctccaatggcttttcgctttgttcgacacagttgacgacgacgatgtccaaagattccagaattgcctctggcgctcggcttcaagtggcccaagcgacatcggataatgaagatgctaccaaaaaacgtccggccgccccgtcgcgcgatgtcgcgaagcgtaagcgaacatcatctaggatgattgataactccgattctgagcccgacgaggctgatgttggtaaagaggatgatgagcggaccaaaaagaaggctagacctaagccaaaggttcgaacagccaaccgaagtgcctcttctgacgatgaagaaagggctggtgggaacgaggaggtgtttgatgaggaagagttggtgatggatgctccatcgccggcttcgtccgaactctctgatcaagattccgagccgtcggctggttctaaattggcctctgttccgatcgcatccgagaacacagatgtagacgaggagatgctggacatgacccaagatgtggaaggtacgcttttatctatttctatttcctgatgtctgatagatgagctaaagttgttatcatgctgtcttgggttgtggctgtagaggaggaaatcatcgtgaagcccggaaagaggaccagaacaaagagatagtttcagatatcctatcgttacgagttgttcgtatttgtgtctatttccccttcattatatatacctggcacgcttttcgtttcaatctacatttggtagttgctttcgtgctcggttactactcagaattgactctcgtatggctcgatcaatagcacgattgtttttgtgtttatatttatacttccctcttctcgttctttaaatcaactttcatgattctttacgcagtatcgttctcttgatctattaaccgaagtcgtctccatgttgttttgtatgactgtatgctggcgatatctgcaacacaagacacttgaaccagttgttcggtcggtctaacaggtctttttcattgttgccagcaatcaaacgaacggccacaccgcttgatcgttgtctctttgagatggctccttcggcttcccctctaaaccgaaaaacacatattccgtccccatgccctctctatcaaccaatctctccgcgccctgtctgattctcttaccagtttcgtctggtttccctcttaccagaccatctaccctaggtatcaaacccatctgttcaagaaagtcggcctgagatatgggacccagcggtcttatttgggagccgaacggagaggccagcagagcagtacggaggtgagaaaagttgacatttgtagtcagatcagatagaccaggagtaagaaatggggacaaagcggcatgtgctttgaaagcctgcgtttacaagatagggaagggaaggagaagaaatggaaaagttgaggttacaaaagagggtcagatagagtaagcaggatacatttaggggaaacagggggacagcataccctgaagctttcactataaaatccatcctttccatagtcgatcactagaccgcttcctccaccagcatttttgccttcaaagagtagcgctcctaagcgtctcataattccaaacccaaccgccccgacctcgattctctgcccgatctcgaccttctcgaactcggcgcttgttgtggggatatatgttgaatatggggtcggctcgacagagagggtgaagtggaaagcaggcgaaggcggagtgtaagttacgaggagttcatggaagtgaggttttgaaagatcagtattctctggagaaggcgaggtcgttacaggagaaggctctggctcaagaggaggaggaacgcgctcgaggagatgaatgggtagagcatcgaaaaactcgtgtgcgctgaagagggtatatgcatcggctttgaatggtagatgcataaggtagatgagagagaaatcagaacggtcagtgtataagattatcagcgcgaggccagttgacgattaaactggagtttcacaaaaggactcacacactggaacttcctcgatccgatcaaaccacctgatctgaacatggctgccatccttcctctttagatatggttccaaagctttcttctgggcctctctcatgacaggagatgattcgactagatcgactgtttgaatcgtttcggccatgaatgaaaattgcttgaacgtctattccgagagaatgagatgagacgaggacaacgcctgaacgaggaggcacgatgcaggacaaggatacactcactcgaaggatatcggccatcaatgttcctctccctggtcctaattccaatagtctaacacttgaaggcgatccattggcttgccatcgagtgatcagccagatggcaattaactgtatgtattgggatgcaatcaggtacatcggtcaacgccgctgatgctgcttaaatgagctcaacacacaagtcaagagggatcaagtgttacctctccaaaaacttgcgagatttctgggctagtgatgaaatctcctttctctccaaggacgtcttccttggtggtatagtatccatgttctggatgtccgaggcagagtgtcatgtatcttgctagaggcattggaccagccgcctatcggatagaaacaaagtacaacagcagatttaagcttacggagagagatgaagctctagattaaaggaagcttacatcgatcgtcttgcgaaggatagatcccaaaggggtatcatcttcgggtataggcgtcggaggaggtttctgaaacgaccgagtagtatctacatcgagcgccgatgcggctgattttgagaacgagttgaaagaggagacatccgaagacgaaggaagcgaagagtacgatctgacaagattgcaaagtactctgctcggcctggatgatttctgtgaccggaggatagtgaacatcgtatgcgagtacgtgtatgtatgtacgtgtgtccaacgatcaagagatggaaactcgaagaggataggcgatcgcttacgtaagtcagttccacttgatttccatacttcgtcctcatctattcgctcactcgacgcactctgtacaaccacttcgttgatcgtcttactccatctgccgttctttccaacaatggtgagctcaggaatgagatcagggatatgaacgaatgtgcttctggtcaacagctgacttgtttgcctactctcttttgctcttctcattagtccacagcctgtcgtcgacgacttattcgagatttcaagcggctctcgtcagatccaccgtttggagtctctggtgccccctgtgcagataacttgatgttgtggaacgctgtaatctttggtccaggtacgtttcgtctaattatggagaacatgacttcaatttagccatagtctggctctggttattttgatgattgaagaccgtccacgagagagaacgaacattcctgtcccttgcacccatcgaggcacgagaacactgacatgtagtttccataccgaacacacagccgaaactccttttgaagatgggacgttccggttgattctatcgttcgaagaaagttaccctaacaaaccgccgacggtcaagttcttgtccaagatgttccatcccaacgtgtatgccaacggagagctttgcttggatattcttcagaatagatggtcgccaacatatgatgtggctgctatcttgactagtatccagagtcttttcaacgaccctaacccaaacaggtaagtcacagcatgatacgaaccaaccttcttgcgtacagaaatccatcgacaactgcttacttggacgcgtcacactatcatcgtatgttccccaatcagtcccgccaacgctgaagctgctcagctctatcgagacagtatgaaggagtatgtccggcgagtcaagcagacagttgaggcatcttggatggaagggtctgacttgaccggtgatgatgacgaggatgaagacgaggacgacgacgaagagggagaggcagaggaggagaatggagaaataggcgaggcagcaatgagtggagtagaaggcactcgttagtctccaggcaagtccaatatctattccttcagacatctgcttccatggtctcacgattatgtctgtccgtctcactaacgtctattttgatttcaggatgcagaacgattttttttaaaacttccctctcgtttgctctctgttcattcaactgaggtttcttcttctcttcttctctgccctgacgttcatttccgtctcacgaccatattcgcatacatcggactcggttgtcgtcgagttcgcttgtcgcattgttcaaaccatcacatcacgccctcatcatcgagtctttctctacttaattcattacttgatcgctaccatgttccttactctacctaagcttttcgttgtttctcgcgcccttctttctctcgtcctattcagcgtacgagcttatttgttgtaactctgtccgactttccttcattatgtctctttttcttcttcgctgcgatatgtgtgcatatatgtgtcgtgcagtgagatcttaggcttcgtgcgttgtagccaacgcatgtttacataatcggagcgaactttctttgtctcgtcaccttctttgtctttcaacagtttatcatcgtcctcctatatcatctcgattaccttcgaagttcttcacgcaacgttcagctgctatcatgcagggcacgcccactccgagcacacggcctaagaagcgatcccttctctcccaggcggtcggttctccaagcacatcctcttccacccctgtctcgacaggaacatctccttttatccggtctcaccaccttccagataccgagtctcccttacgagcatactcttcttcgtcttctttgtcatctaactcaacatcgaattcgaatcaggctcacatcccggcagtccatgcctcgtcaccgaggtgctcctcagcctcagcagtccaaacacctaccagacggccgatctttcaacctcctacccctgccagtctcaccagaggaggctcgaccgttccttttgactttgaaggaagcaggagagctgcaaagaaggcgctggctaaagaaagcccggcagcaaggggatcgagagattcggtcggtggaactccgagtggacaaaaaccaaaaagatttgtgagaaagagacctttgatggacaggtgcgtgaaactctccttggccttgtacttgaaaccgatggttattctttcctaccttgctgattttgaaaatttctcgtggaccaaccatcggcgctccgtcagaattcaagacttgcctcatgacgccctcaatcggatccaagcttcctttccagactttataaggattgcccgaccactaggcctcattctaacattcttccagttcttgctaagggcgcctctgttctcaagttctcaatacaggaaaccaaacattcttagaaacagatcgataggggatagaccactgggaggaaggtacgatgctgatttggagcctgccactggtagatcatggggctggggtcattgggtatgttgcctttctcaacactcttcgaggtttcgatctatatgttgatagtgctttcgtagtccacttggctatcaattttgttcttcattgtgggagctctaaatgccatgtatctattcacccgaacaagatcatatcgaatgcatctccgtacggtaagcatcagacaccattctacattctctgagacttctgccgtacctatgccgaccaccgcacgcatctttctcaatgctgcacgcgcatcttcttaccaggacccgatctcgagtccgaatgctaaggctgtggaggaagatgaggtcatggaggattccgaaggaatcagccatcttaaatccgctcaattcacagatccggctttgtatcgagccggacttatttggatcctgtcagtttcctcgtttcttgtgtgggcactatctggcaaacttgggcactgaagtttgtttggctgattcatccgaaaacacatgttgacgtgtgtcctttaggaaacggctgaacccgattcctctacttcgattcttgatttctctaccagcggcttcggatacggataaacatcagtcgcaaaggaggcgaaggatggtccaacagttggatatctggtcgcctccggatttcaatctccagttcttttcgttcgtcgttctatctctctcagtgtctacaacctcgatctatcagtttatcttttcttcttcatgggcatgtatatctataggacatacactccaccggcctctttactgcttcacctggtgaccccctacgcgcctttctctgctcttcttgccgcattcacagtcaattttacagtctatctactggtggccaagtatacggagatggttaaggacagagaagtcattcatagtgaggtgatgcgcgagtacgatcagcgtgtgagttcctttcttctcccacttcttgtttggttcgagccgaacacggttcttatcaaagggatttttcttggacatatgggtggtagttcgtatacccttcgcttttcaaacaaagaaaagaaatcggcgtgatgacacatcaggcagagattgtttggtagttgcaagccagcgagttttctctatcttgaccacatcttgaaaatcgcctttttgctatatagatattttagctcaaggcatagtgcgcatcttcgcttcttacaaactttgcctaattgacatgtataacaagggtcgagctatggacagtgagatagatgaagagtgtggcataagcaaaaaagaaaaagaagaaaagaaaaaacggaaaatatatgtaaatgagagattctatgaatccccgcgtctgtctttttcattcctacaacctacgccatcacctctccctcctttagcaagcacgtttccttttttcctaattttcctatcggacgatcaaggacggtctcggcacataaaatatgatacctacgttctccaggttgaaacctttaccgttccttcctcgaacgatcaagcaactcctccagacgagcttccccccggctgttcagccgacgcggccgacaggcgatcaaccttcttccgttctttcgacttcaccgtcgccgatactagcatcagcatcaacgccgctgtcagcccagagcgacacaacgacagtacatggatgggtgtctaacattcaagtcaagaaacatgtggcgtttttgaaaattagagacggaacttcggatgaggctctacaagtcgtcgtgtcggggaagaaggatgatctgtcgtctggtggggaccttcgaaggttcattctcgttcgcctctatctatctatctattcattcgtacttcgatggctattttgtatattatttggggctcagaactgatcgcttaatcattatatctgacaggacggtcgaatcattaacaagaggatcgtctgtcaagatacaaggggagctgatcccttctcccggagctggacaacctgtagagctccaggccaagatcttgacggtgttgggcgaatgtgatagccaggtaaactcaaatctcggtttgaactctgaacgactggccatctttgatctgagctgataggagggcgatcttctgctttcaatttcttgttgtgtgtgtgtttaaacatgcttaatccaagacatatttaattgagccatcggtagtaccgagttctaccaaagaccgatcaagaccggtcaagacaactaaccgaccgacggttcatcttcgggagctcgctcatctgaggatgagggaaagggaaaacgcagctgtcgtcagagtgagagatcgggtagcgagggagtggagatcgttccttgaggtgggtgagtctctctgacaaattcctctccgctcttaattgctgaagaagggacggagtgaaaagagggactaatgtcctatgatgttctcttttgggcgcgagggtttgtgaaggaaaatgactttgtgcatatacatacaccattaatcactagtattgattgtgaaggaggcggcgagatcttccgggtaaccgcgccttctttgaacgagaccgtcagaacggataagccgccggaggcgttctttccggaaccaccgggtgcgagcctgacggtctctgctcaacttcacctcgagacgtacttgccggtctgtccaagggcgtacacactctcgacatccttccgggccgagccttcacgatcgagtaggcatctggcagagtttacaatgctcgaggtcgagctcgcttttgtcaatcgggtggacgagttaatggatttcaccgagcaaggcgtcaagagcgtgcttcgaggtctctcgagaggactcagtttaggcgacggacaaacggaggaaatggcgaagaagatagaaaaggaagaagacccggacgctggtgccgggataggggtattctgggcaaagccgggaacgacagagaagattcgatcggcaatagagaaaccgttcgggagactgtcatacacggaggcgattgagctgctgaaacgcgctcacgcggagattccgtttgagcttgagcctgtggacggacagacccttcaaacagagcacgagcagtggctggcctcgagagaaggtgggccagtattcgtatacgattacccggccagtttcaaggcattctacatgttaccgaacgaagacaacaaagcgggcacggtggcctgtttcgatctgttggtaccaggggtgggcgagttggcgggcggaagtctgcgtgagcatcgactggatccattgttggatgtgatgcggtgtgtacttttctttcatacgatagttttcttctctcgagtctttagttcctactgtatctgacgacatgtgtcaacgtgcttgttcttgcagacaaagaaacatgtcgaccgaaccgttagaatggtacctcgatcaacggcgttacggctctgtcccccacggtggatttggtcttgggttcgatagaatggtctcctgggtcacaggagtgagtaacctgaaggatattgttggatttcctcggttcaagggaggatgtgtctgttgaggaacgaatgaaatgggtagaccgggtagaccgaatagactgaatggacagaactaaagcgtgtttgaaaacgtgaatatcaacatgagtatgatgcgcagataatcggtatcggggcgaaagcaagataacgagtgggcggataagtagacgatcagaatgaacaacacagctgattagaataaacactagaaatttcattacactaaattccccgcgcaaggccgatggatgaatgatggctatctgctcccttcaccttctcggtgcgataatcctcggtgcgatcgacatttttttctccctcttaaacaggccagcctgggatagaacgtcttctttccttttccctcttctctcttaccatcgattacctcttctcctctccctctctctcctccttcgatgctctcctcatccaggctctcggccgtcgttcggcggtcagccaaacagcaaagtcatcctctcgccctggttagcaagtctcttcaggcacgctcactttccatcaagagcacctctcctgttctttcttccaagagaacggtctcccagacgagtccggctcttccttatgccactcctgtggactcgtgagtgggcaaggtgctctcgatcttatccattgtgcaaccctaacaattcggcctatctttttccaaaaacacgtctttctccatccccctcatacagtatctttgctccgcttgaccttcaccccgagaggcacatcggtcccgatgcacacgagactgagcaaatgctcgctcggttgggctacgattcgatggacgctttcatcgccgcttccgttcccgaatccattcgaatcaacccgtctatcgtgtcggacgagaccatccagccttactcggattccgagttttctaagcgggcgagagaagtcgctggaatgaataaggtcttcaagagttacatcggaatgggttaccatgaagccgtcgttcctggagtgattctcagaaacgtaaatcaaacttcaccgctctctctctatatgcgcataaagcctaccgatcttggttaagagctgatcacctgcccgctttaccatttgctctcatcatttaaacatccgaaggttaccgaaaaccctgcgtggtacacttcctacacaccttaccagccagagatcgcccagggtcgattggagtccttggtcaactatcagaccatggttacctctcttaccggccttgagtttgccaatgccagtttacttgatgaaggaacggccgcggccgaaggtttgtctcccatccacctttgccctgttcaattcaactcagataacgcagtgactgactgaccgaatgattgtctgcctcaatcaatcaagccatgattatgtcaatgaacgctgccaagggaaaaaagacctatatcgtcggctctggtgtggtgtgtacccacgattatgagtgaatcgcagcttttgaacgcccttcagctgaccagtcttatctattcgataccttcttagctccctcaaacattatctgtcatccgaactcgagccaagggttttggtgtcaagattattgttggttcgcccgatgagcttctcgagaagcccgagatcgccaaggacctctgcggtatccttgtccagtatccagacgtcaacggagaaatccgaaactgggaaagcaccgctaagaaagtccacgagctgggcggaaaggtctcggtcgctaccgatctgttggcgttgactttgctcaaggtttgtctgcttttttcactctgctctcagataaaacttaacttcttgctgatactcatgcggctgctcatgtacctgattctatagcctccgggcgaatggggagccgacatggtccttggaaactcggctcgattcggagttccggccggatacggtggacctcatgccgcgtttttctcttgcaaggatgctttgaagagaaagatgcctggacgaattattggtcttagcaagggttccaacggagagagagcctatcgactggctttgcagactcgagagcaacacatccgacgagagaaggctaccagtaatatctgtaccgctcaggctttgctcgccaacatggcggctatgtacgccgtttatcacggaccggaaggactcaagcgaattgccaccaaagttcacgggctgactcatattttgagagagattctggtctccttcccctcatcgccttatcagatcgttaacaaacacttctttgataccctcaccatctcggtctcttccgacctgggcgctgaggccctgcatgccattgctgccgactcgtcgatcaaccttagaaggatcgacgagcagacggttggtgtgacccttgacgagagtgttggattggttgacctcatgaagttggtcaacgtgttcgcaaaggctgccggtacagagcagtttaaggctcaacagctcatcaacaaggcaaacgaagtcggagcaaccggaattgctggcgaggttttcatggacgagcagttcagacggtcgagcccatttttgaccaaccccgttttcaatactcaccactcggagacggagatgctccgatacctctacttcttacaaggaaaggatctatccctggtccactcgatgatccctcttggaagttgtaccatgaagctgaacagtaatgcatccatggttcccttgacgcttcccggctttggaggtatccatcctttcgcccctgcagaccagaccaagggttaccaggagcttatcaaggaactcgagcatgaccttgccatcgtcactggttatcatgctgtttcccttcagcccaactcaggagctcagggagagtttgccggacttttggtcatcaaggcctactttgattctatcggacagagccagagagatatctgcctggttcccgtcagtgcgcacggtactaacccagcttctgccgttatggctggaatgaaggtcgtttctgtcaaagttttggccaacggtgagcttgatatggccgacctccgagccaaggttgaacagcacaaggataggttggctgcattcatggtcacctacccgtctacttttggtgtgtttgagcaaggtgttcaggaggcctgtcagattgtgcacgacaacggtggacaagtttacttggatggtgccaacttgaacgctcagatgggtctcacaaaccctgtcgcttgtggaagtgatgtatctcatcttaaccttcacaagacctttggaattccccacggaggaggaggaccaggagtcggacctatcggtgtgcgagagcacttggctccgttcttacccggccacgccatcgtcaagaccggtggatcccaggccattgattccgtctcttccgctccctggggaagtgcgtccatccttcctatctcctgggcatttattaagatgcttggaggaactggattgaccaactcggccaagacatctattttgtctgccaactacatcgccaagcgattggaaggcgcttacaaactgagattcagcaatgagaatgggctggttgctcacgagcttttgttggacctggccgagtttgagccaacgacaggcttgaaggtcatggactttgctaagcgtcttcaagactttggaattcacccgcctacctgctcctggccgatctctactggaatgctcatcgaaccaaccgagtcagagagcctcaccgagattgaccgattctgtgatgcgatgctccagattcgaaaagaagttcaggcgattgctgacggaaagcagccaaagggaaacaacgtgatctctcacgcgcctcacaccgtcgccgtgctgacgttgcccgacgacaagtggaatcgaccttacacccgagaggaagccgtttacccgcttccttcgctgaggaccaacaagttctggcccacggttggccgaatcgatgacgcctttggggacatgaacctggtctgcaattgtcctacagttgaagaattggcgatcgatatcgatgcctagatttagcccagctcggtttcctcatcccatactttcttctaccttggtcactcttagcttgtgattcctttttttcttcttcctcttcctttttatgctttcgtcggtattgtttcttctttcggtttcttaggttcggatatagactagatttcggttcagggtcctcattctttacatttatcatctttctcctctgcattcaactcttactcgtttcaacaatcgagatctgttggctcgctttaatttttttatcttctcggcttatctctatttgcatttcgcgtcgttctcctttttcactcttgtatatgcattctgttcatccagacaaaccgaacgccgatctcatacgcgcgatgccttgttcgtctccaggcacgtcttccagaaccgatcctcccaccaatcaccctcgaccttcttcgggcgcactctaccgctccgtttacctttcctcacatgagttgtagaggtgttgtcatcctcactctcgaccgatgacgacgaggacgagtctagatcgtctaaagagagataccaaagttcagaaatgtcatgtgcgcgcaagtagtcgtgtaacttgtgatagttcaggccgacggcctgaggtccatgggagtcatctgagagacacagtcgacctttagcagagacaaccaacttttaaagaagtcggacaggtatagatgttagttttgtactcgaaagatggagaaggagaagagaaggggggattgaaagatgtacctcaagaatctcccaactcgggtatgcctcattccatcctttcctgaatgcggcagcgttcaactcaaacaacgcgccataatcgacagcctccttgacgtttcttttgactttcgaccagatggatccctttccaagcgtacgaaggctccatgaaggattccatagtttgataaggtcgaaatggccgataacctctggtcggattgttcgcatgagctcaaactgcccgtccagataggcttcgatcaagtcgacgattcgctcatcttctgtgacagtatcaggatcggacccagatggaacacatgagcgaacggcatgtaggaaagtgggctcatcaaagtcgatagggatctgatgaacgtggtgtagactgccaacgacatagtcgattcgagacgcttgtgcctcgagtagagcggataggccagtcaggtctaacggagtgatcaaatcggtttcaattcctatgagaagagtgatttctgaagagtagattgctcgaagtcggtgcgcttcgtcaagaaacgaaagatagatttcgtgcaaggctgtcggactcaagtcggactggacgagttgaagaatagcagaaagccggggtcagtagcgcgagacgatacgttgtatgcagagaaattaacagagctctgacttcttcaggatagagatcctgctgacgatatctatggagagagcagagaaagcacagatagattctgacatcagtctttcatttcagaagaagagaagaaagaaacatctggacgaacctgggtgcatgctccgataggccgaaagtggtgaacccctgcttgatggcctcttgaacaacttgttcgagtgtacctttggcgtgtctacaaaactgacctgagtctaaatttcaagaaatgagacctgaccgaacaacacgaacgtggacaaggggagaagactgactaacgagaatgatgagattgaggcattgctgaactagctgactgaccggctggctgatggtagtcggcagttgatggacgagatcaaatccggctcactttctcccatctccatcatcgtcatcagctatcgatatcatcttatccacagcgacatacgcaacggaaccagcagacacacatatacacatatatacagactactctgatggataccctcaaggctatccagacctatctggatcggatgctcacagaggtctctgggatgaaggttcttctgcttgatgcccatacggtcagctgcgaaccctcttgatctcttctctatattgccgtcgacgaacagttgattcaagatgtctccctttctggacctacatagactcctatcctctcactggtggccactcagtcgtctctattatctcatgaggtttatctcacagaccggattgacaagtacgcattcaagtctgtctatccggagtgttgtcggagtctaaccgcggtttctatccctttatcccggatccaaatcaattgtttaacagcccaaaacgagacaggatgcctcatctgaagtgtatcatgttcatctcccctgatccagaaaccttagaatgggccaaggaggaactggctcagccgaggtatggtaactactggctatgtgagtgcttccgttgcattcattcatgattcactgaggatatacaacatggtcgcgaccgctgacgctctcagatatatgttgtgcttgatgggtgggtagacttttcgaatgtgctgacaaagtcatcgattgaactgctggctcaagccgatgagttcgaagtcgtcaaggaagtccaggtgcgtgtagccatgttgggttctccccttccatgctctctatttgattgcctcgtggttaatcgcttctctgcaactccctccttcaggaatattttgccgactatctctccatccttccgaacctattcaccttgtctgcacctccattatcttcctcaccacatgtgtgtcctacctccactcatctcatcttatgtttgaccctatggcttaatcatctcttacctttcactgtctactagtcttccctaccgcctgttccgctttactcgtccactcctcacatcttcaatcctccaatgctggacattcatctacaaggcctgctatctcttcttctatcgctgaaaaagaaaccggtaattcggtgggagcgcatgagcggtgtcgcgaaaaagctagcggaggaagttggctcggccatcacagaccagtcaggaggggtgtatggagatttgtttggattcaaaggaacgagcgggccagcgcctgtactgataatgttaggtaagtacttgtgaaatttcttcctcttttccgtatgccgagtctcagcgatgttctaagcgcatgttgttttcatcccgtgtggtcgtctggcgaacgaacgtctgtacagatcggagaaacgatcctgtcacgccgctcctatcccaatggacatatcaagctatggttcatgagcttgtaggaattgttaacggtcgagtccgtttagaggatgaaactagaccggaacttaaggttcgagaattctcctcatatttgaacttctatctcttgttctgcccctatttaaacaactttcccctacgtattttatgcaggaagtcatcctctccccctctcaagatcccttcttttcgacccacctgttttccaactttggtgatctgggtgcttcccttgcgacttacgtttctgagtttcagaaacggtcgaccgtggcatccaatccaggctctatcgagaccgtggctgatatgaaacgttttgtggaggagtatccagagttccgaaagttaggaggaaatgtcagcaagcatgttgcactcgtgggcgagcttagtcggattgtagaaagggatgggctacttggaatcagtgagctggaacagagcttagcgagtaatgagagtcatacggcggatctcaaggttggttttcttgttgccctgtatgagtagtgtcttgtttttgactctagtgcttctgcctatcaattgttatgttatccctcagaatgttcttaacctgctctcgactccatctatcccttcgggaaacaaactgcggctcgctattctttacgcgctcagatatcaacggttctcggccaacgcaattcctcatgtggtcgatacgttgattaataatggattgaacccggacagagctcgtgtatgttatctctcttctcccttttatgtgttgtatctcagctcatatttctctgttcacctgatcccttcgctctctctacagttagtgtatgctatgctcaactttgcgggagcagaccaacggcaggacgatctgttcatgaacgagaaccttttctctagaggaaaaagtctcgttaaagggttgcaggttcgtttggtttatatatacattttcttcttcgttcttcactttcgatgatctcatatttacatcgagttttctctttgattctcatcgacagggcgtggagaatgtgtacacccagcacaaaccacatctccttcaaacagtagatttgctcttgaaaggccgactcaaggaaacaagctatccatacttagaagtggaagaaagtggaatctctgcgagtgttgctcgaactcaacggtccgttgtttccttgacacttggtttaatttcttttattcgcgagtagagatgaacgaagcaatcctgacgctcctggatggtcattttggtgaagagtagacctcaggatattatcctcttcatggtaggcggaacgacatacgaggaagcccgggctgtggcgttactgaaccagcaacttcaagctagtgcaaacgctacctctggtaacccaagctcagctcctcggatcttgctcggtggaacatgtgttcacaattcgaagaggtcagtctcaattttcttctttcatttggctctttcacttcttttccgatgtttcactgactagaaatatttctttgtgttgatctacgacaatagtttccttgatatggtcgaagaatcagctactcgatttcctccttcgttttattctcccccttccacaatgacttctgttcctacgcctctcggtcttgggcttcctcaattatctcatcttcttccatcttcttccaatggatcatctccttccttgcctcaaaactccactggcaacaacctgaacacatcctctctcaaccctacattaccgacaacaacaacaacgacgaacgcctcaactccgacagtaacgagttcagctccatctacgaacacatcctcaacattcctagcaggcgcaccggcgatcaacctccgtctaggaaaatacgaagtcggtacagccggcgtgtaccgaacttctggtggttcatcgtcgtcttctggcggtctacagattgatggaaacagggtcaaagaagggttgaccaatggtctagccggagccagagatctgggagggagtatcttgggaagagtcaggcaggaggttgaagccagacgaggaggcgcgacgtaaattgatatgggttaatgtcacttcgcacaagtatctccctcaacgcttgatcttcagatcgagaagtaagcgaatttttactaagagtaagagaaatgtaaagagaatgcatcatcacatatcgtaagagccataagatgagagtgtcaacatgcgaaaaagaggaacgggaagattgtaggaggaaagagtttaacggatgaggaaactcatgcaaaattgcggagaaagatcattataaacatcgtaaaaatcaagagaatttgaaaaattgagaggccaagaaaaagcttacatcaatgtttatgaaggagaaaaagtgcaacttagctggcaaagatgtaaagtacacatccgcagaaagaggatgtaaaaaaaacatgtcggaaacctgaagacagagcgaaagaggattttgaagttgaacgggtgcgctaaccctgtgatgacagacaatccaaggctgcgtcgttatcaagcaaaactgcgggctgatcctaggactgagattggtgttggcggtaccacttcgatagatacaggggttggtctcaaagtagggatgctctcatttgattcccgaaccgaacctgtaggtagagtcttggtcggcgatattaaagatgtcgatgatgtaggtaagactggtgctggtgcaggcgaggaagagagttccaaagatgggagtggcgaaaaggagagtttcactccgaggaaatcctcagggaacggatccagccgttctgctgatgtcgttgtcgtcgtcaaggatgaaggttcttcggatgtttttggcgctaatatggagttgctagaggttgtatattcttctgatgagtcagcattaagacgtgaagacggaatagtcaactcagccgggatctgtgacgatggcggcggcgacgtttccagcgagacagaaggaggaggaagatcaggcgatagggacggcgacgctgatgaggctgaagacggaactgggggagcatcgagaccgtcgattccagaggtggagggtccttcagatgtaatgtcgaacgctggaggtggaacatcgggctctatcgatcgtcgacggtcaaaagaggctctcgaggctgattcgccaaatggtatagctagtaaatagtagaacaaaaaaaaagcgaatggtgagaaggtcagatcgaaagaaaagaaaaaacaaaagaaggaaatctggaagcctaccatatttgttgagattctcggtagaactatcattgcggatttcagacggaaagactttgctcagcgcgtgtctctttgttgcgatgaaggaaaaaaacgagtactgcccgcctaacttacctgatgaatttcatctctatttcaaggaggaacatcgcatagcaacaaaatagtttagacgtgtttgagaggattatacgaaagccacgaaacccccaatgaagggatacggaagagatggaactcacgatcttgcgttaatcccgacctcggaacctcgtacactgatcctctcaccacactttctggtaacggcgccgaaatacttaaagtacttgggctcgtcagcctggtcctcatatcgatagatgacctgctcgtcgtcgggtgcaagaggagtgagatattcgatgatctgaatggattcgctgatcctcctccggtatctatagaagaagccgagtttctacttcgatgttgctggtaaggttgtctattttgttgatgatccggccgagtttcaactcgtgccccactcgggcctgaactcgcgcgcgcatcatctactgagagcgtctgatgatcgctcgcttgtcttgctgttcttccgacgccggctctcgagaaaaatgctctgtacccagactgtcgtctcggttgatctgagtcggccgtatttgccgctgtagttgcgttcagaagttcaactgtacctgagtgagcgggagcagaagaatcatctgactggagagctgtaggaggtacgccttgttcggtatagagtggtgcctcgccccaaccgtttgttaggatcaaccgttgagtactcgtcgagcctcctatttgaccttctgaatgactctcatcgctcgctatcgtaatatccgtcaatacggtagagacagagtggcctctgttcctacctactactagatctccagctagatgctcggccggaagagctatgtgattcgaaagaggagattcatcagaatttgacggaagcgagtcgacagaagctcgacggtatgtgtcggtggtagtgatatcttcttcgtctgctgcttctcctctaaagtaagattgaaaaggataaacaagatacatcaggtcaaaacgttacaacactgtgtgcgcttgatgcatggaagacgattagacctacttcatcaaagccctggttaacccattcaaggttgagaaaacaacacacatgatcagcctcagatatatcacctcactcaaattcagtcagaagggaacaggatcggtgagaagaagaaacgtacatctcgctttcatctaaatcttctctatatcgcggcaaagtccttacactccttaacgaaccgtgcgtcctccttctttctctctccgccgctaaatttctcctcgcatccctcaagtttatctccgcctgtgtcaatactgtaggtcctgatgattcggcagttccgcttactgcttgtctagatctagtcgtgacactcataggtgttgatgattcgtcggttcctacaggggcggatgcacgtccagagaacagttggcgaacgaacgcattccatttcggacggcgctggacttgaacgactttagttgttccagaagatcaagaatagaagaaattccagccaggcagatgatcagctcacgaaaagctttaaaatctcacaataagaaaatcgtgagcaaggagaaagacgaaaggaggccaaaccaagaatgatgacgacaaagagcgagacgacgaccacaggaataactatgctgattatgctgaccgtgcccgagttggagtcatctctacgctgaatgtgatgtgctgccgttcctatctcgagatcttttgggcacgacgagtccaacgatgatcttgacgaagaacgagacatttcgccccatagcacaggtctagcagccgacgttctcatccctagagaccctacaaacccccagacggaccgacggacaacttggcttatcatttcaatcgactctgacgacgattcggactctgacaggttataacttccttgttcctgctcaacgtgttcgcgttcgtgcagttctttcttaaatttgtgttctttgacgatcgcattggagatggtgaccactcgggacgagattgctaaagggaatgctcattaggtaatcactgcgcatgacaacacacgtgaattgattgtcgtagaacagcctctttgtgttccttctcgcttagatgtgtccgacaaggaagaaacataaagatcaatgaagagaggaaagaggccaacccctaggccccaaaatgggatgaagatagaacccgaccatgaagaatgagagcgattacaaaaaaaagaatgcaaggagggtgggagggccgacgtctaatgaattggaaccccagagcccattctaaagcgacccactaaggaaaagaaggaaacgaaatacgatcgaatagagtcggcccaaggaaaccaagcctgggttttaccttgtgccagagagccagaaagagaaggaacagagaagtagatgaaagattacaaaaagagacgataaagaaagcttaagagcagagatatatatagagaaccttgaatgaggacatcggacagcctactgaggccatccggatccaatctggtggacactgaaaccgatctttcgaagggcaggagcatccaagatgagtcgtccgtcgaagacgaaagcaggcttgctcatcttctcgtagaccgaactccagtcaagagtcttgaactcgtcccactcggtggcgatgacaatagcggcagctccttcacaggcatcaagtgccgacttggagatggtaaccttcttcttgtacttggtaaggtcgtttcctccctcctcgagatcctgccaaatctgggcctcaccaacctgaggatcgtacaccgaaacgttggcggactcgtccacaaagttgtggatgagcttgatggaggcagactctcgggtgtctccagtgtccttcttgaaggcgaatccaagaacggcaatctttttgttggtgacggtagagaacaaggtcttgacgatgtttccagagaacctgttcttctggtactcgttcatgtcaaccacagccttccagtaagcggcaacctcaggaaggtgcaagctctcagaaaggtaaaccaagttaaggatactagtgacagattcaagaacaaggtcagtctcttcgcaaccaagctcatacaagggagacatatcaaaggaaatgaacttactctttctggaagcacgatcctccgaaaccgacggaagccttaaggaacttggctccgattcgggtgtcctttccgacggcgaaggcaacctcgtcaatgttggctccagtggcctcacagatggcggaaagggcgttgacggaggaaattcgctgagcaagcatggcgttggcagcaagcttggaaagctcggaagaccagagaccaacagtcaaaattcgctccttgctgtaagaggcaccggtgcaacgacagatcgttagaaaggaagcgttggctgcaagaaaaagctctgaaaactcacggaacccagttggcgtaaacatcggcaagagcctcgcaagctcggagaccactctcggtctggagggatccgatgagaactctgtcaggagcaaagagatcggcgatggcggttccctcggcaaggaactcggggttggaaagaatgtcaaagttcactccaggcttagcgttggcgtcgaggatggctcgcatcgactcagcggttcggcaagggacagtggacttctcaacaacgatcttgttggaggtggcaattcgagcaatctgtcgggtggcaagctcaatgtagctgagaagcgagatggaaaggcggtgataagtatgcgatgggaaggtgagaatccggaaataatatgtactcacttgagatcggcagcgaatcccttaccaactccgctcttcttggtgggagtctacatagtccaatataaagttaggaccaaaagtcaagataaggattggcgtggagagtactaacgttaacagactatgaaatcacaaagaaggaagcgaaaatctgattagtccacgttacaaacgacaaataataaacggctgtatacataccacaaagatcaagtcagcctcggcgatagccttgtcgacatcggtggagaagaacaagtttcggcctcggcatcccttgataacatcaacaagcccaggctcgtagataggaagatcgaacgactccgagttccaggcgtccactcgggcctggttgagatcaacgatggtaacctgactgcatttatggaagagaaagagaaagagcgggagcgaaagggattgtaaagtaaaatcaaagagaaacaaggagaacaggcgagaaagttgcagatgaagataaagattaaaataaaaacagaagaaaaaaacaagaacagtcagacgccggtagagtggggaaagcggagaattaaaaaaagaaggataatttgagattaaatgatctgacttacacgtgaggggccttgagcgcgatggtagcagcagtgggtccacctatatgcacaagacattcagtatagaaggaaaaccggtaagtaccaagcgacagagaagcgagaggatacaagatcacagaagagaaaaaagttcccgaagaaaggcgaacgcgggaagagcacagagatggataaactgaccgacgtaaccggcaccaactaagaggggaagaaagtcaaacaaaataggtcagtcaggaaatccataagacacatgtcggctttaaagactacaagctagatgacggattttcaatgtatacgatacaagaaaagcgggaagaacaacagtgaagattgacacaagaagcggaaaagaaaaacaaggtgggaaagaatcccaaaaacacgaaatcctgcgggaacttactgcagcagatcttcttaacaacagtctgggaaggcatgttatgaatgagagtgggtgttaaagagaaagaagagaacgataaagggaaggaaaagatagaagaggatgggagttgatggttgatgggtgggaagggaagggaagggaagaacaaagaaaaaggagaaattccgactttaagaggtggcccgtgcttaagtctcgctcgggatttgcctaggggatttggtgcgcagttttgtctcgcgtcctgatcgtctgaaccgctagcggcaggatgctcgggccaaatggtgtgattaggtaaggagaacgcgtcgcgtcgtttggcgtcgcgtctttcgcagatcacgtgattcaaactcatttaatatacccaatcttctttctctcactttcctccgtgtttcagcatatgcacacacacttgctctctaaacctttcgcaaatggatcgagcatgtcctacagacagaccgttcatcagagtgtataaccctcatcaagtcacgtctgatatctctcaggtaacccaaactgttcatctgcatcgtgaggtctaccgcgatgatcgcaacctccgtacttgtgccaaaaacaaggataagtgcaaaggcaaagagcgagcacagaccgaagatcaaccctatccagtaacgtatgctctacgaaggatatcttcgccgccttcgcgctcgatatacagatacctacctcaggtgcccatccccacgtggggtctatccgcccagctgggagaagagatcaaatctccattagccgaggaagagcgctggtggttcgagcaacatggtcatcattcctggttgaccgccggtgagaaaagaaaacgtcaacgttctccctcgttgctgtcttcaccgccgaataaaaagagatggagacatgactggtccgttatcgggcgtgcttttgatctcgttgatttggtacgtgtacatctctctggttcttcctcttcgtcgtgtccgtcacgttgatctgtcctcttcgtattcctttatatttttctttcccttcgcacgtcctccctgaacttgatctagcctcatgtgttctacccgagaacacacacatttcctccggtttccgatattcttatctctccctttccaacatacaaaacctatccaccctctgacccgtccctacccctgtcactcgtctcatctgggccgtctagatatggggagaaacgagtaaaatggctggtaccgatccacggaccagtttggggtcttcctaatgatgatactgccagccaaggccggttggttgttgacactctagacggcgataacgatcaagtcggagaaaagttaaggaaaatccatcaaaagatgtttcgtcgaatcaaaacgttctcctcatttcatcccgtaacaacttctgatattgaacccagtcggtcatcacatcatcgttcagaaccaccaccgccctcacttgattggactccgacgattctttcttcgttccatactgcacttcagaaactaagtgagaaaaaccagcttggcccaatctcggtcgtcctccatcattcgacatttccatctaccttcacacatccttatcctcgttctcgttcccatacacgttcttctactcgctctcattcttgtgcttcttcgcttccttcggcctcaacctcatcgtcaacctcatccttgacagagccgtcacctcagcaaacgattcatatcggggaccactaccggatctacgttgacctcacatatgcatctcatgttcgatccattcttgatagcgtcgatcttcgattcggtccggattccagtaaagaccgctgtttgttcttcaagggtgccagacttgtcttggtggatgacgtcgggactctactctgtctggcttgagatcattcatactcggggagggatctcctctttctcctttccctttcccttccattccctcttcttttcgttcttcctcttttaggtcgctctttcggctttagcatgaatcaagtctagaggcatgatgtttgtcatcaaagtgtatgcagtagaattgtatgaaaagaaattaaaattcccaactctttgagaagaacactattcaaatttgactccagtcaccctctcgaacgcctctctgtatcgtccggcagtccggctgacgatatcctccggcaacgtcactccatcgacacccttctttccctcggcaaccagccagtccctaaggaactgcttgtcgaaactctcttgaggtccaccaggcgcgtaggcggcaagagaccagtatcgggatgaatcaggagtcagaacctcgtcgatcaagatcaactgcccaggactggagggatcagctgggttgggcaagagtccaaactcgaactttgtgtcggccaagatcagcccaacagactcggcgtgcttggccgccgtggctgattgaggggatcatcggtgtgatatctgatcaacgtcgattctcaaaaatcagtgtcaaaaggggagtaggcagatactcactgtacagagcaacggcaacacgctcaatttcggctgccaactgaggtccgtacatctctgtcactattggatgttgaggatatggaagaaaaattactctactcaatccgtgtacaagttcccctaatccgcgagagatgagaaggagaaaaggagaagacatgagaccaacctttgctagggtggatgttctcatcgtgatcaccctgatcagccttcgttgaaggagtgaaaagcgcctcagggagcttttgagactcgactaagcccttggggagctggataccatgaactgttccagacttcttgtactctgcccatccggagcctgtagaagaaggttatttcgttttccatacatgcagaaacaggttggataacttagctgggccctagcttcagtgaggaagaaacgtcactcaccggtgatgtatcctcgaacaatggcctcaatcttgatgacctcgcacttttttacaatcatactccttccctcgagctgatccctgtacttctggacggaagccgggaagtcatcaaacgaaccagagctaggagcagctgacggtcgaggaagcacaagatggttcgggatgatggacccaagcttgtcaaaccagaataacgacaagttcgtcaacagcttgcccttctccgggatcgactgctcgtcaaagacacacgttggattgggatgatgagaagaattcaagcaaaagaggaagaggtaaaaagtcaagagcacatcagcaactccgcagccaaaaccctcagttcaagtcaactactcaaaggaaccaagagatatgtacatacgttcccgagaataacatcgtaggcactgattctatcagtagcgacaaagagaagcgtcgaatcatcatcaggaatggaatagatatcccggactttaccccgagcaataagcgtcaggtctggacagttggtttcaatcattgtggtaatctagtacgaacgaaaaccctcaagatattgaggacatgtggccgaaagacatgagcatataatgtatgatgcttacccaaagaagtgtgtttcgagatggataatgagcgaactcgacctgaaattgaaattcccaagaacggacgaggtctgtgcattcagggccagactcactaaccctaacacatctatgtcgtctgggacgacatcttatatcgtgttgaggagaactacgtgtccatcttattcaacgtaactgtgcctatcaccaagcttgtgcctgtatctttcatcgtgtactgatcaggaccaaactgatccgataaacacgggcggacagagatcttgttggccgtgtctgtcgctgatggttcttccgattgttgtatgtatgcagcgtcgctcaccgaactgacactcgctccttctagtgcttggtggtctgaacacaaaagtaccctgatggctcgatacttctactctttggtctcgccatcttctgtgctccataaaatgactatcagactgattggattagcgttcactgcttgtttgaaccgctaccgctgctgccgttaccgctgatctacataccagatatagagagtccaggaacaaaccgaggtctgctggtgcttggatgtcggccgcgatacctcgcgggtgtggtgctcagtcgagaatgggccgtcggtcaggcacgatgattaagggctaattcaggagtttcggtgttcccatcaggtcggctgtcgttcctgatcgtgcagagcgttgccatgctatcttctctgtttctttcctccttctttcttcttttctttcgctagtctcgtgatcccttttattttacagcatgctatcatcctatcggtatcatccagtgatagttcggttgacttgcttctcagtgaatgatgacggctgatatgtcatatcttgtctgacggctagccgtccggccggttactccttttccggacgcgccggctactcctaatttttgtgacctttttcccttgtccgtgttgatcgttctctgattcctccggtgctagttcgtgctctccaagcggcctgtcgactgacttctacccgtcaacactaccatcaggcgggatgttatgcaagtactctacccgttagcctacctacctgtctatccgtgcgtgcgctcgaccgtttacgatatttctgtcgaaatataaaaggaatgttatcattcttcaccccaacacgctttggactatcacccgccacctgtcacctgctgtatccattccacgtattatattataagttaacctacctacactactcacgaccattacctctatcaatcctaggcggttgttcatgtctaaaaccactaactctgcttgtctttcacgcatatctcgtcctttgacgccatatcgactcaagatgtctaccgcatctggcgcatcgactgctctcgcagccgtgtcaactatgtcggtcgttgaccgaacacccgctcctcagagactgcaccgaatctcgaggaaggcccctcccaaactggacctgaaagatctggaggcagccgaggccgagcaacgacgtgtgatgggcactaccgaacaatccattaactcttctcacttagtcgcgcgatcgacttctccggtcattcctgtcgttcctaccaatcccactacgtccgctatccggaccgtttgcaccattcctacgatatttgacgcattcggtgcgcctgtcgagtgtctcgacttgccttcatggattgcgaggatgactgaggcccagatcgccgccttgcctacaattccgacgcttccaacgttacgcactgttgctggcatccctaccattcctaacgctccgaccctctccaccgtctcaatcgtaccgacaatttttgacgcgttcaacgtagctcccgagtgcctcgatctaccttcctggatggagaaaacactcaaaagccaagttccctctaacctcagggttcttaccatcccttctaaatccgttgcgcctatattgaagggtccagggcggttaagacaaatggtgactgtcaaggaagatgggaaacctgatgttgactatgtgagttgcttttaacattcttgtcctcgttttctttgatctgatttggctgttctttgctctctcccacattttttcctttccttgttttatcgtacagatattcggcaacaagattggaaggggacagttcggtgtggtctatcgggcgctcaacatcgacaccggtgagacggctgccattaaacagattcagcttgatggtctcggagaggaggagatcgatcggctgatgaaggaggttgatattctccgacggctggaccatcctgctatcgttaaggtcaatagcttcttcttcccattcttgtcacttggcatgcccaactgatttagctctctattttccctctcttctctcttcatcctcccgattcttccgaacagtactcgggggtagtccggaaccgggatactctcaacataatcctcgagtaaataccctttcatacattctcttcttcgcttctctcggctttctctgttctcttcctctctccgcccctcttcgttttctttgactggggctgacgttgccttctgctgtcgacagatatgccgagaatggatcgctcggttcgactattcggacatttggaaagctcagcgagaagcttgttgcttctaatgtaatgcgaattcttgaggggctgcactacttgcacgaccaaaaggtctgtctttatattatctcatctgagctacttcgacccggtcactcaaacatacacttttgtataccctcttctccaacacaggtcgtccattgtgatctcaaggcagccaacatcctgacgactaagacaggcaacatcaagctgactgacttcggtgtctccctcagcttgacggccgtagagaagactaggaggaacgaaatggctggaacgcccaactggagtgagtccatacttcttttttcgtttgtctcttgtttacttttccatgcttttcttgccgttcgatacgttgtgtcttaattgacttcctttcttctctctttgcccctaatttttacttcagtggctcgtgaagtaatcaacctagagggtgcctctccggcttctgatatctggtcgcttggatgcacgatcatcgagcttttaaccgggcgacctccgttccctgcaatcaagactagcatgggtggtacgtcttgttcctatatatcagccctctttctctttgagaacgtcctcttgcagctttgcctggtgatatttctcttacatcttccttcattgttttattcttgtagtcctccgtcatattgcggcaggaggattgcccgagattccgagtgactgttcacactccttgcaggccttcttgtctcagtgctttgagcgagacccaatcatgcggccatcggccgaggttctatttgagcatgcgtggctgcaagagaacgctgagtatcccaaggtgcgctttccctccttctcctttcttttttatcttctctgttgatgcctcaggccgactgtcttcttctgctccttgtctcttccgcttctcgacagtcataccagaaggacagcattccttatcttcgtcggctcagcctggaaggtctagatgacctcagacaagctggttctgtgagctgtatgctatcggacgagtgtcttccggcattgtcgtctcttctaccggccagtccgccccgacgaggctcgcctggtagacgacttattcactgggtccgttcgcgttctcaagcactttctgtgctttcctcgagacggtcggctcggtcgtctctcgagcttgctcgatcgtctgctagtttcatccggtcattcgaacaggagttggaggttgcctcgagctccgttgctgagtcgagctacaacccgagcgagattaggacgaaggatcggcagaaccagcatggcgggacggatctgacggcctgtcccagatcaagttgctttggtgcgccgggctcgtttgtcttcaacgagaccgccttaagtaaggagtttggaagggatagctgttgaggaagatgcaaacacactgggcgatggtgggacagttggcgtgctacaacgatgacgcttagtatagctttttgcgatgtcttatgtcttggttcttggttcttgattcttatttctctttcctttctctgccttttgtattctcttccattctttcttgcttcgattatgactggcgctttttcatttttttttccttccttctgtctcctttctgcctctgcctcattctctcagcttattgtatctctaaatatgggttttctttcactctctcctcattttttaatggtataaccagtacgctccctttggtggccgtcatcctcatgtctgccttatcgtttgaaaagtcctgcgggatgtgttcgttcaagaggcttatacataattagcagtgtatcaaacaccacagatagaaccatgatctctttcttttgtttagaggaggaagcgcccaaaaaccccccgaggaaccagcacaccgtcgctcaagtttttgattctacagattcgtcagagaagagatgtgtttgtattggatcggtttgggattctaggagagcatgatcctgggtaggtcgctcggcttgtacaagttttcgaatccggtcgagctctgagtgaaaagaataggtaggaaagaataagaaggtcggtcggtcggtcggtcggtcagccagccggaggttggtcaaagtggaggaagagagatcatcaggatccaagcgggacgaacctcgagtaatttcatgaacctctttccgtaagacatcatcttctccttcagaccgagcaagcgaggaccggacctcatccagagacaagctgaggatgtcctcgaacgagtcatctatctcagcgcgatcttttctgatgcgctctgtagactcttgggcagatctagagacaagatcagatgagaaacccaaatcagtaggctgtcgtcgtacgatgctcggtcgggaaccgaccagtggatcggtgcgtactttagctcttcttctgcggtcctttttaatgaccgttttctgtctaactctaaactctgcgcctcgatctggacagcacactctgccttgacgccttctagctcttttgtccaggccgctttgagaccgtcggtcgctgaccggagagatgtatattcgttttctgatcgaagcgcccgcgcttctgctcttgccaaggaggttttgagagtagccgtgttggcaagctagagggccaatttcagggttcgtacggatcgatcagagggaacaagaagaaggaagacgatggacgttagatcggttgctgccggagaaacgaaagtcttctttctagagatttctctcttcgagtgatctctcacctcttctgagcgagctctcttcaggttgatagcctctaactctgctgtatgcactctctccaacgtctacaagatgcatgtgttgagtatgatggaaaccttctgccgggggaacaccccaaggataaatgagaagagggacttgcctcttgaagctgacgttctttccgggccaccacagagttcaacccatctgtctcgaccttgtatcggtctcgctttcgagatcccaacgaaataaataaataaacaaataaaatcgcaaggagccgtagttatctcatcagacaaccggcgcaagaaaacgccctatgctgaaggcagaagttagaaagcaagagaaagaaagaaagaaagaaccaaccgaacgttccatcccatccagcttgttctcaagcgactttatcgtactctcctttgctctcaactctgctttcagcttttcgtaccctatcttccaatcatcgacctcgccttggagtccggcgatgacccggccggagacttgtctcgaacggacgctcaccggagaatctggatcttgagggacccccgatgagatcctagggtatcctttactttgttctgctctgaacccgaacggtgagggcgaatagacagttctggcggcggtggtagtgatgatgtgtgttgaattggatcccgttggggaacacggcgtaggagatgcagaagatcctcttgtagtccgactttgcccatcaccgacatcgccatctgtaaaggaaagagagaaagaacccatcaataaaccattatactcaaccgacgagctttctaaggaaaaaaaaaagagacccttactcgagtttgagtttcgtgctcctgtagacctcggtgtattctcgtcctcgcccgccggcgtcaacgaatcatcaatcgaaccaactggacggcccccccgcagatcttcatcctggttctgtgagacctggtttgaatccgagttgggagatttgataggtgtggacgcttggctggcgagatcagaactggcggacgtgcgtcggatattggaagccgtatgggttggaagcagagatcttcgatgactttctttcgtggtagtcgacagagacggccgacgtgacatacttgcacgtgagcacgaacacggacaaaaacacgaacacgaacacggacacggatagaagaaggagaggtaaagagatgatcagagcttaacaacggtctgctgtggtgttgatcgttcgagagaggatgaccatcatcagacgatgtgcgtcccagagcaaggaaagggcgatgttgactagagtcagatcaaattgcctttgcaggccaaataagaaggaaaaaagagacggcctcgggcttgcttttgcatttctctgttccgacaagaatgcttgaaagacgccgacgacggtgacgacaaataagagagacacaataaacccatattttataaattcgcaaaggtaactaggaaagagggaaagactaagaacaagataggaacgcgcgaggcggtaaaagaaaagattgatgccgaaagagaacgtgggagtatgaatagcagagcaagggaaaagatgaagaagaaaagacaaagtaagggaaagaccagaacgaaagggataagaaggtctgttttaggtagaagcaaagagagcaaaaagggggcaaaagagaaggaataggaattagtgtttggggggggggaggggttgcagtcatcaaggaaaccaagccagacgggaaattcatggtagtgttgggattagacgaccggagagtttatctgggctcctcctccctatcggccaacatacttcaactccaagtatcgcgcgacaggatagacgacaccggcaaaccctccggagagttcgaacccgatgtcagctccgtagcctggttctccgatgagtcctccgatcggaccgacaaaccagacctgggacattccgagggctgcaccggcagctccagcgcagaacgcagcgagcgcggcgtatccaacgggtagtaatgccgggcagttccacgactcggcggcgttgtagttggcaaagcttccctttcggaagataaagtgctcttcgaacacgaccatggcaaagatagagagccagtatccaaggacgttcatgaagttctcaagcgcggaggcaaaggagtcggctccggcgatggcgattccgatgtagataccagtgatcacaacaggccagacgattcgtgggactcgggcgatgtaccggtggacgacagagatggagagaccgagactgaatgggttcgtggaaggaacggaagaataagcctgttggactgttgggtgtatacacaagagagagaagataaaaagaaaagaacaggcaagactaacgagtaaacgttgatgatgttgttgctgacgacggaaaggacaagaaggaacaagaagaagccggttccaccttgacctaggtggtctctgaagacggcgccgacgagaccgccgagttcgtttgagagatactccgtgtaccaagtaccctcttggttggccaaggccccacacatgatagccgctccgagccactcgacgaggacgagagggaagatgagaccaccgtaggtccaagagaagaccctcaggctggaggtctcagcagactggtagacgttgtaatcactggcaagactgacccaacccatggcgaaaccaaagatggtaccgatgaaggaaaggcaacctccaatcgcggcctccccagtcgccatgggcacattagagagtcctttggctccacagccgagaaggacgatgaaggtgatagcggtagggatccaggaatatcgctcgtctgtccagggaaaataaaaggtttcacgatatgagattcaaatgttagcgtgcgatgcttctttcctcctcctgagagctatgagaaacatattcaagagtaagacatacatcggtgaacccatttgtagccgagcagtccaacgacgagagtgatgaaggcaatgatgatgattccggcagcgtgagacttgagaagaacaccgcattggtttagtgctttggccgcatctagaaacagactgtatggcaagaacaggaagacgtaggcttacgattttgtcatcggcgacgactctgagagcctgggcaccggcaatggtgttgatagcagaccatccgacctggattgtggccaacgggaatagagagaggaagcaagcaacgagctcgagtcagaacatcctttgacttggcctggacggaagaaacgccatgaacaagagatacatacacatgcgatacagttcaaaagagccacgatctttgcaccatgccaaccccaagcgtatcgggctgaagtcatctgtcggagaccgagcttgggtccaaaagtagcggcgtaagcggggacgatggcggtggcggcgttagtgaaaaagatgcagagtaaggaatctccgagaccaagaccaaagatggcgggtccgctgttgggaatgaatatggtgagtgagcatataggacctaggtgaggtggctccatggagagaacaaaaatgtgcttacagaataccgataccgaaggttgacaacacgcaattggcagcgagccaaatggtggcggagccagaaatatcattgtctgttcgctgatcctcttggactgaatgaatcgaggcgtgacaagagcttgaatgtcagatggaatgtggaacggctaggaaggcgcaagcaaggggaaagaaaaagaagaagcgaaagaaagaaaagttcgaggctaacctcgttcaattcctcggacttccatgcccaatctgtttcgggtagaaagaaagcgagcggattgtcagccgcttgtgctgataattaccaacgtagcgtgcttgcgctctcgctctgggcatggttctgtgggacatgacttctggctcgaccgtagctatcggaagatgaaggagaaagaaggggaaacgaaagtaacacaaactttgattcaagcttggtactcgcaacgttcattcggtcgaggaacctaagaaatgagttgctctctgggaagaaaggacatagtcagctttttttttcttccatacggacgcatggaaagaagcaagggaaagaaaaaaaaaggaacacaccctcatgctctgccactcttaccgggtggtcgatggagtttggtttagagtcagagtagactcccttctctatatcgtccatacgggcagcggtattaactgaaggtgaatacgacggaggctcggcttcaacagcggtgtctatgggtttcccaaggggtacagtcgaggtaggaagaggactgggagtgatttcgggagagtacatctttttttcttttctatgtgcttattgcgaggtctatataaccctggcaaacggtgtccgacgggctttcgggtcgagaggctggaaggaaggtaacgtggtctggaatcgaacagatagtggatacgataggatcgagagataggcaatgacggcttcagttgggttctttcctccggctaatcttctgggtttcctgttctgcctgaccgataaggcttcctggcttcctggctgtcctttgtctgagcggggtgtggtgggagactggagtatgcgtgtgctggctgaatgtatgc

SEQ ID NO: 222 - DNA, 17372 bp, Xanthophyllomyces dendrorhous
ataaaagacagtgaaaaaattaaactcttggaaaaacattaggaaatcgagagacaaaactactagggaatccggacagagactacaaaataggtgggagcgcagccggttccgcagccgcaggtcccggggtaaaccgaatggttggtgaaattccggggtctatagataagaaagacttcaggcacaaagtaagctaaaattagaaaaagagccatgagttatgcgcccacaagtcttctgggagataacggacgagcccaggatcgagaactcttgccgcgcatacatctcgcggtgtgtaccgtcgggtttagagtacaacacatagggtgtcgatctcatctactcagtatccgctgctggtgctggttctggtgctggtgctgctgatgctgctgatgctgctgatgctgctgatgctgctgatgctgctgatgctgctgctgtcgttgttgttgttcttgttgttattattatctacatcattatcatcaccattatcgttatcattatcaccatcgctattctttctacatgattcttggcagatccatcgtccgtccggatcggatctcctcctccaaggacatcttgtctagtcggttcccgtccttataattctccattcggccccgacccggacggctttcggttgaccagccggtccatcgtgcccttcactccaccgtcgagccaggccggataagtgatagcaagtatgtatgaatctctggaggcgatccctctttcatactgaccgtcacccggtcggccgggcagcgtgccttccttatccggtaaaagtgcccgttgcagtcgaatcctctctggggtttcctggataaatcccagtcggagagccgctttgacagatggcaagtttgatgcatgagctgttcaaacaagatgcatgaaagaaggaaagaaaaagaagaaatctcgtttcagcgctcaaagcttgttttatctattcaaatcctctaggactcatttctcgaaccttgccattgaactcggcgcaacccatgtccaccctcggacgggagatcgaacgaatggtctagcatgagagataccgtatgtgtcaacacatgacttctttgtgcgtgaggcagactttgtgttcaatacaacggagagagagagagaaaaaaagtctggatcagacctgatcaagatagacaactagaatgccagaaagaaagaaacaaacaaaaacaagaagaagaagaagaagaagaagaaaactctgatacacacatcagtacaaagctcagctcagtcactaggtcgaccgcgctcgagttcatataggccaccattccagctaaaaggcccgttcgcttatccacaatcgcgtacaacagcctggtctatttcgttttatttttttccattcccatcaatcacaaagcagaaagtacagattaagaatataactagtgaaggaaaggaagagagagaagaagaagaagaagaagaaaagacgaacaggatcagaccgaacggcctcttccagccaaaccaaaacatctcccaaggtcttccatggcttaatcggcatgtaccgaaagacctctgggcggtcgacaacagcgtcgagaagagcctgcgcgtattcgctaggcttttcagtataaagaacacgccatttcaagaagcaaaccccgtcggaaaagaaaaaaaaaaggtcatggtcaacctacgctctcacatgttccttccttaaccttctcgaatgagactcacaactagaggtacaagcctgacgtctctgcctgatccttcgagcacccgaataggctgtgtcaataaacaataattaaagtcgtattcctctctggtggtatattgataaacgtccctcggcgtctttgccggttgagggggtgcgtatgcgttcttgaaaaaggctatacacataaagcgagcgctttggagatgtgagttgactcgacttgacttgactcgacttgacttgactcgacttgacttgatctgggcacatggcacatgcgcgaaaaagacggtgttgtcctacataactatgtggttgttgaatagctatgtggttatgcgcagccgcccttaattcctaaacctcccccccatctcttaatccttcggcgtcattctcccctcgctgttcgttcatcactccttccgagagaagcaaagacagacaagcatcaatcaacgtaccaccatggcaaagtttttaaagaccaaagaggacatgaagtccatgcgtgcgttcctcccttccttccttaaacagcctcgtcttccagaagtagaccatcactggaaccattcgtgggctgaacgaatcattcggtctttctttccttctttcttcttttctttccttcttcgattcattcagtcgatcagtttgataccattttgctcgattgcgatggtgtacgtcctttcttgctttaaacctgtctgctacagacagaaccaaaaagacgatctgcacgctcacaactgtaacacatgcgtcactcttccatccttctgcctcgtcgacaggtcatctggcatggaaacgagttggttcctgatgtcaaggaggctctggaatacttccgtacattaagtcagtcaactccttgccgttggaatgcgctattgcagttctcaaggatcagccggctgatcaacagaactcgcaattatctccatctgccttcgctggcaacttcacagagaaggacattgtctttgttagcaacaacgcgacaaagtctcgaccacaatacaagcaaaagttcgataagctaggaatccaggcttccgaggttggtataccaaaagttttttttatcagcagagcacatcagattctcactcccttctctgttgccttttcccattcgttgtatacgctcgggcacatcattcataggacgagatctttggttcagcctacgcctctgcagtgtacttttctcaaatcctcaagttcccaaaggacaagaaggtgtttgtcattggagaaaagggattggaagacgagcttcacagcgagggtatcaacacatgtggaggatcggtcagttgggaacagttctcgttctaccgatcaagtcttgcttgcaccggtcgtcctgacgtcctcactctttgggctttcgattcttgtctctcccctcccgttttgtgccggtgaaacgtaaaaacaggacccagaatccaacaaaccgttgcctagtcaggattttagctcgataaagcatgattccgagatcggtgccgtcctctgcgggtaggctgtctctttctttctctcgaatagtgattgcatcccacgctttccaatttactaaatcgaaaaaccatcttctccttctctgtttctctggcatctctctctctctctccttcgttgtgcgcgaattagctttgacactcatatcaactacgccaagctcgcccgagctcacctcgcgctcactttggacaagtcgacagagttcgtcatcacaaacgatgactcgacgttcccttcgaacggcgtactctaccctggctcaggttccctctcggccccgttgaggtactcgaccggacgggacccgatcgtcgtcggaaagccaaacaagagcatgatggattgcatcgtggccaagtgggtagttttctttgtttcttgtttccttacctaaatttgttttgttttgttttgttttttcttcttcctcgttattctttgggagagtgaacctcatgggaaactaaacatgaattatattgcaatcactcaacaggcgacactttgaccgatcgagaaccctcatggttggagatcgactcaacaccgatatcgaagtaagggccttccccttctcatccgcgcgtcgctcgtccaagcccgctgaccatgcttttaactcttgccgctcgttcagtttggtatcaaaggaggaacgtccaccatgctcgtcctcaccggtgtcaacaaggtggatgacatcgagagcagtggtacgacccctagttacatcgtcaacagtctgggtgactttagagctctggcggaggaataagtagagttcggattagaggcatcacgtcggatcaggattagactcgttctttctatcattttctctaaagggaacgacatgtgtttattcaaagagtaaatccttgaaccggggacttgttcgttgaacatgaagcgactgagcaaacgaacacgtcaagactgtgttttatctttgctttttgtttcgtttcgtagttggtgcaaacctgagaaaacaaagaggggaatccgtccaacacgtggatatagatatcgagatccagccagaaacaagcaaacaaaaaaaagaccatccttaagctcaaggatagaaagcgtaggaatattatcacccccccccccccccccgccagaaactgattttgcgaggtctgctcctaacctgatgtacgagatcatgttggtttttaaaacatagccatattgccatgggcattctctcttttctcgtatgtgtgtgtgtgtgtgttcggatcatttggaaacctcatgtcatgcatatccatttggaaaccagacaaggacaaaactcgtgaggaaaggacaacaaacgcagcggtcgagtgaacgatgccacgagagggggttgaagaaaagggtttttaggcgagggagtttaatcgaaaagtccgaaacccatctgatcgttcggatagtcaacgggtttagggagcaaaaggaaataaagctttggtcagaaatgggaaccttgaaacactacgagaaagtcggcaagcactcacgtcgtcgtcagactcctccttgtcctcagccttctcctccttcttctcctcagcgggggcagaggcgtcagcggaagctccaccggcgacggcggcggcgggggcagctgtagagattccagcaaggacgaaaacggagaaccgtaaataaagatccgatcgaatgccagcagataaaaatcactaacctcctccggctccggatccgacgttggaaagcaactccttgacgttctttccctcgagggccttggcaaggagagtggcccagatgggctcaagctcaaccttggcggcggtggtgagagtgacgagcttctcagaggtgatctcaataccctcgtcggcgaggataagagcggcgtaggaggcggcgagttcagactgtgaacggtaagaaaagaagtcgtccatgtaagtctcaatgctgtgaatgtactaccgagtcgctttctaccaacgccttgttctacgttctgaccgctagaccgtgcttccttcttctcatctcccccttttctccctccacgacgctttgtctaccaaagtaccactgctcctctcattgcaagttatgaaaatcctgatgaacgcaccattgtacgaatcgatttaagccggagctgactagtacttgatgtcctaatcgaaaagtggggatggatggacgcggcaaaagttagtttttctcttgtttctcatctttacgacccagacatcccaaccctcatcttttccgactcgacaacgagcccctatgcacacaaaaattacaagcacgtacgagttgtgtggggatcaagagaaaaaggccaggctccggatatcggctgagctcacctagattcgctcggcaaactgctcttgtctgacttttgtctcaagtcagatgggtgacaaagatcacgtgacgtaaatcaactattggctagctaaatggctttggctaatagaaagcaaccctaaccgacggcggtccatacatggcccctttggactggggtgcccttagaccatgaactaccgaatccccatgggtcatgggcttaatgtgtgccagctccagcctcagccctactagcgacagcgtcaaagcccggcattcttgcctcctggttctcctcccggtgaagggctaggtgcagcgtgttgcgcgacgcgttcacatctctgttctatcaagtctgagagtaagcatcaaagagacagaaagacagaaagacagaaagacaaaggaacagcgaggcaccgtcagcttcctcgctctgtctgtgaactcagagacttcctctctcgtggtggctggagatgctttgagagaacgtcatcagggcaagatgttgatcgcttgtgtgcctgctcgagttttgccctgaattctgtcctgaactcaaccggctgtgcctgcgaacctccctttgacggctgaacacctgtcgaccgctgttcctgtttctttcctgtcaacgctcgtctatataacgttcttcacaatatatggctttcctttgtcttcttcatctcatcacatctgcaagtacatatattatcatcatatgaaatgtcccacactcgaaacaaagcacaagtccctccgagtgacgtgtgcttctttatgaggtctagcacacttgaggtatcaactgggtcgagcagtgtcgatagacaattttcgactctaacccagagcgttgagatcagcagccagtaatcgactttcatggttgtcgagtatgtatcatcccatgcgcattcatgggatgatcgtagccacctgcgagacactctcatccaaagaagtaccaacaacataccgatcacagtcatcactatcagtcctgagcgaatgactcgtcgagaggacgagatcgacaagattctgtatttcttttctcagcatgacatttcctggtggtccttcggcatccaagataaggatcaacccggactcagagcgcggctagtccctgtcagcgcgcatgtacccgttgtacggcaacagatgttgcatgggcgcttgataacatcgggagcgtccaaatatatgatctgttttcagcgtacggtagcgtcatacaagaagctatcaaacgtgttctcaagtgtgaacgacaactcacctgagggccacgaggatgaggacgacgacgctgaccttaaagttgaagttgaagttgaagataaagatgatttcgagtacgaacatgaagacgagagtgatgaagtccctcttctcatcccactggccccttcggtcccgttccctcctcccaacggtccacttcaacttgccgcaacatccaaattgtaccagttccagagtttcgtccagcatcatatcgaagctcgccaaatcgagcgcgtcgtcgtgctcggccgaacatctaaattttcagatagtcgaacatcgttggacgcccaagtaggtcttctacaacatatgctaggcgacttcaaaggagatacctatgtgctggagtgcaatggaatctctgcatacaaggataatcatctgctcaaagcatgcaaaggaaacaagaaggtatgtttttgcctgtcctacctttatccgagtctaagtgtcatgctgatctaccttccacttgatgtcgtaatccagactctggtccttgcgacctcggttgacagggtttgccgcaacccagctcttatcgaagatatcctcggaacactcgatgtgatgacattcgtccattgtgataccggggcgaactgtcgaatgctcgcggatgagtggctgaacactctagatgaaatcgaccaacaaacctggaggcccatcctcgagaggcaattgtctcacaccacctcggcaaagacagcagggatcactttcccatatctctggaatacaccatctgtcagccttagggagcaactcaagtctagggtaaccaaagactcagcgttctgttcctcacgaggaacctcacatcatttctcaaagcctcctctccttcctggcttggccagctacactggacgcaggattggcttcgatgatcatagggtggaactgtggaaacagatctatcaggagtacacaggatgcgtactcgacgtacactacaagaacaaaggatggacttgcgcatgccatggagatgtctgcagagacgattgcctttgtgattgcggtccttgtcaaaaacgagccacaacgggatgtgtctgtcgtcttcaagagcgttgcgattgttggatcttcgagttctgtcgatgtccaatttgtgacccggagatagagaagtggaagcttgaggcacaggagcagatagagcagaggaggcagaaggcagagcagaagaggctgaaggcagaggagaaagcagaacagagaaggctgaaggcagaacagaggaagccgaaggcaggtgagtggaagcttgaggcagagaggatgcggagggaattaaagaagcagtttcaggcgcagaagtattccggggtccaacaactgatggcagctgcaaagctagccgaccaacaacaggtagcggcagatatagacgcagtcgtcacggaagctgcaggtaaagtatcggccatagtgggacgcaatgaaatatacaatgcggtctatcagaggacggccatagtcgcacggcagaagatctacgagggaatatcttgtcggataaagactttcgcagagagggctgcccaacgaacgtcggatccggtcgtgcgacggcaagggattgcagtcgtgcgggacaggacgatcttagagactcccatgcggctgagtctggaggctctgaagcaggagacattggagcgaaagagactgtggagtgagatgggatggatggagaaacatatgacgtcagatgagttggatggaagatggacagagggacaacgactgaccaggctggtagcttgtgtagagatcaagcagttgctggatgagaagggatggagggtcgaagagacgcagttgagaggggtacgtgacttttggggggcagcagacgccaagtcggaggcggattcgaccaatgtgatgctgaaagagaaagggcgagagctgcacttgatgtcgatcaagtacagggaggaagaagagaaacggactagggagaaacggcagagagaagattacgtccagatcgcttcattccttctactgacttgacggctgtcttttccttactcttcctacgcaggttggatgagcagctgcgtgagtctccttggtggcggtctctacgacagaagaccacagcggaatgtcttgagcctgaattgtaaagtatgccggagatttgatttgatgagtgataaagtctttgaacgaggcaaactgggatcagcaagaatcgagtcagtcatgacatgtttcggaaacaacgagacatctagccgagcgtcttagatcaggagaagcagaaataatatcgatagccgtagtctaggtggtttgtgtaaaacatttcatcgtgagggtgtcgaaagacttgaatcgtctgttagaaaaccaaggtgaggttgtgatgaactcgatgaggttggactacatttgaagtggaaccgacattctggtctagtctggcacaacgggtcaacttctcttgtctttagccggacacttcatctggatagtttactttaatctttgtcgcctatttactgtcagcactggcaaaggattgctcgatagttgagaggaaagcggaaacgcgtcgctcgaacccactataatcaaagagagaggaagagagtgaggtgatgatggtcgatgggtttggttgatcacatctataagttcactatagttcaataattccagactatatgaagatttcgtgggttcgtggtctgagggcacccaagtccagaagggccatgtatcgactgccatcggctgaagtaactctcaccatgcctaaggcatctgatgaatgtttctctaatggatctcgagttaattcctaataccataaaataaaaagacttcaaatatttctcagaaatattcgagcaaaagtcagatagagttgagaaaagtcagataacctttctccgctcacgagtgggccaacattacacgaaatctccccgtcctagtgagaaactgagtgaagcccaggacaccgtcaagacaattcgtgtgggtatcgtcgccttgtttattttcttttcttctttgcacgacagaatctctatcctttaggtccggcttgttctctcgcacgtcatttcccaatcatcttcagccgtttcgttccgttttcgacatcaattttggcccggtaattgaggattggcggagggttgtcctttttcctccctaaataagcaaagagaaaaaaaagaaagaaaaaaggactactcctcggtcgtccgaggttgcagggtgcatgtagcgaaacccaggttgaaggagaacttatgacggaaacacgatgtttagagaaagatttgaaggaataggagtatagactatgccggatcaacagggatgcaggctggaatttgagctttggaaggagtgccggatacaagggataccaggatcaaccgacaaactctagaaacgacaactacagccattcactcagtatcctccctctcgtagagaccctgttgctcgctctccgctccctgtcgtaatcctcctacatccagaccctctgatccgttcgccaaagcctgcctacacaaatcctgtctttttagcagtttttccaatcagacgaataacttaccataagctcgtcttttttcgactccttcctcctatagtaaaatggcccagcgagttactctccgaacccgaaagtcctacaacaccaagtccgccaggaacaaggtcgtcaagacccctggaggaaagttggttgttcacaacttgaagaaggtcgctaccgcccccaagtgtggtaagtcttctgtcatatgcccagttttcctatggtggcctcggaattaacggggcaatattaatcttcttccattaaatttcctgcttctcaggtgattgcggaactgctcttcccggtgtatgttgaacatccacagatcttttctcagacctctcgttttcctcaaccaaccaacctctttcttctttttgtcccactatcgtgttcctctaggtccccgccctccgaccccgagagtacgccaccctttccaagcgacagaagaccgtctcccgagcttacggtggatcccgatgtgctacctgcacccgaacccgaatcctccgagctttccttatcgaggaggccaaggttcgtactctctcatttctaccacacagttccctcaagtccgaccgtttctcatttgttctgcatcaccctgttcggtcgcttgtctactgcaaatacagattgtcaagaaggtcgtcaagtcccagcttgctgcccgaaagtaaacgtgctggctgttctttgatgagagtttcggtcatgacatgcgcttttctctaatcttccgtgcacattctttcgctctacgcatcttgagacaatacgacggatctggaagctttcttagccgattacgaatcgctaacgacttggtgaatggtcattggaatacacgattgggattctttgggacatgaggttaatcagagatagaggcaaggaaagtgccttcatgagaaatcggatataatcatgaagtcatcgtcataaagatacacattgcacaagtcgccaagggagccgttttgaaaagccattaatcttcctcttccgagtccatcacgactttcttcttagatgtaaccttgcgactggaagccggtccttcgtcttcctcatccgaatcgttctgataatccttctcggcttccgactcggatcggaaagtaggactggcttcggcagtcgccgtctcttcgtctgtttttgatcgagcggatgacttctttgttcgagccttcggtttcctccgaggtttcgctacggacgcgtcagagtcttctccttggtcctcatcgtccatgtcctcgtcgtcttcgtccccggaatctgctgatgagctggttgcacgcttgggtttcttttttcctttgttgactgacgaagaacgcccgtcctcccgagaaggttttcgtttcttgactctcgaggaaagcagggcgaaatcggatggttcctcgatcggggcctctggcaaagcagccgtgccctttcttgcccgctgaaagaaagtgtgtttcgcgtccgatgtcatcagtcaacgagagagagagagaagagaatgcgcaagataaatgaggaaggcagaacactcaccagggcttcctcagccgcatagaaggcttcgtctcctgcttcatcgtcagagtcctatttattttaaaaaaatattcgacaaacagaacggtttccatccggattcaacactttcagtttgtcagggttttccgtaggaacggatacggcagactgagataactgacctcgatgaattgagtcgacttgtattgaatcctttcctctgcaactttctcctttctcttcctctcagctcgagggagctctagatcgtcctcatcctcaaccggtgctctttgctttcgaggcgcgcgcttcgcctttttcttcagctggttcacagccggttctgcgtcaaacttcagtcattttagaacgcgaaaacgaagagaacatatatctcaagatcagtcactatccagtccgtcggtctggaggaagataaatacgacatggaagatgcttacgtcgagaggctctctgataaactgagttaccatatccgcctgccgatcaagttctgtaggatgctgacgagcgggtatttcccatcgaggatcttcggctagagcaatcaaagatgcataatgagcgtttgtcctgtggttaagagagaagggggtgcttggatatgagacagaactataccttcgtcgtcatgttggaagtccagaagagtaaggatcagtcgaacgtgagggtcggtcgagacagccgttttcttgtcatctgtatcaggatcgagggctgtgagaacgtacgaatcgaagagacatacaaaaagattagattatccttctcaagaacgacgtcagaccggtttgagaaagaaagacagagagacgggtccttacggtgaggtgtaaacttggccaaggcttctttggaaatttcctttctagcggcctgagcgcgtatgtcatcatccgtcatgtcctcaccatatatcgtaggtccatcggtattcatgacaatctcgtgccttgcagcagcggcatctcgtaggacctaggtagccagttgatgacagatacatcgcatgctggtcaataatcgaaccacctggtggcgctacagcaagatacaaggataccgcaaaagaagaattcagactcaccgatatgaaccatgtgatgaacgaaatcttgccttcttcaagaagaacagagaccgcaattccaagctgttgactctgagttaacgtcttgtccctaatctgaacatcggctttccgcttgatcttcttgagcttgggtttatcgtcatcatccgttgagtcatcccctgtaggtctacttgaaaactttttccatccggtccggtttttggggaagaaagcttctaccatgaggaatggatgttctgccagtcttttgaagaatttccgaagaataaagtggatgagcgcaagaagatctttactcgaagggtctttgggtagactaagttcgttgtccaggatttgctggaacaggtccagaactgaaacctgctcggcgaccagcccgcacaagagaaaggagaagtatactggttcatcagtacatgtggacatacgctcacttgaaagaggggacacagaatgtaggcgactgagggcttatacgatacgaaacgaaccttgaagaaaatcccctcggcctgtaccttgacggccagccgatggagtagactgacgacccgcttcatcttctccggcgatttaaactcggagtaaccttgcagatacgttagcaaggtatgcagcacgtcttcattcgccagtttcttttagggcgaatcccattcgacatacagcgcgacatcaatatgacagcatgagaacaggcaagcgatcagcagagatcactcaggatttgagacgaaaagcgaatgccatgaagcttaccatctcaaattcagtgaattggaaggcatgttctgcaaatttagaagcaggatgaagagcctcttcttcatcatcgttctcttccccttcttcgccctcttttccagcagccgctaatcaccattcagattccaatgaggtaagtatcaggatatcagaccatttgaggactgcaccaacgcttggagcgaagagttaatatgaatttatacgaatgaccaacctctctttcttttagctctctgcgctttcttctttcggaaaaacatgtaagcgttccccttagagtatttttccaacattcttagcagcacacatgcaaagtgaatgaccgagtcgagataactgagagacagagaaccgttgtgaccgagatagaaaggacgaggcgatcagttcttgaggaatcaagcagagatagaaactaaagaaaaaaagaaaaaagagaagtcgaacgaactctcgagattggagcctgtaccctgccatgagtttgatcgacagttctaggatatctccgttatagtaaatctggttctgcaagatctctgctgcctctactggttcttcctctctactggttgacatggcgtccaccaataagagctagatatgaacccaaagatcataccgtaagtctagcggccaagttgatcatgttatagaatatgagaagaggagctcactatctgggtgaagcagtttaagccagcccgaagttcgacccatcctggaggctatgacattgagtgttcaatgacaagcgtatcctacaaaaatatcagcgcaactgcgacaatcaaacaaacagtcatcgaggagcacgtacagtatcctccaggacaagtctcatccgagcaacaacccatctaacagcatcgatctcgcagaaatcggctacatacccgaaatcccatgcggtcttgactggctttttgtcttcgtcaggctgtactccaacagacttacggtgggcttgtatgtctagagttctggaagagaggaaaaaatcgaggaagaatgtactgaggaagagcgttcgaagattgtctgcttctgtcaccttttgacgttccatacgtatgtcctttaggacagaagcgaagaagacttaaaacccaacaagaggaggaaggcgttgtgagccaattgagaaagaggatcgagactgagggagatgaaatggaacggactattgaatgctacttcaagaaattctcgagagaactgctgaagaacggtcatagcttctggagtcaaacatgatcgaaggcctgcttcatcctgaatagattggaaaaacataatgagaacgtcagcttttcggcaagatgtgcactgtctgtatatcatgttaagcgtcgaacctgctctcttgttctccctgatcttcttttcttcttattcttgtctagtagagcaattgcgtttccgtttatagctccagatttatgaacaacaacctgttgacccttcagtccagctgactgtatggcgattgttgatccaaaccgagaatgcctcgaggtagattgtctagaagcagctgctgattgaagagattcctgctccaggagagaagatagtgagtctctgattgcctgtggtggagaaaaaggcgcgcgggattcaacagctcaaattagtttcagaagaggaggacaagaagattgaactagaatggaggaaacgaacgactgtttgatctttgaccaacgtagatacgtcgacacctctaaacatgagatgtaagacatccaggaccaacatattaaaagagttaaattctttagttgctgctgatgaggccaaggtgatgaatagttggaggaagtgtgaatcatcgagttgaacgatcaagcgagactagttcatgacacaagataaagatgaagaaaggagcgcgcagcgttagaaagagagacagacggaagagcgtgtggagtgaaggaactgaggcaatgcaaaagaagactaatcccacctgtagagtggatttctcgtagctgtccgcggtagcatgcgttgaactgacagagtccttgatggacagaagatttcgaattaaggagagaaccaatttgataatccgttcatctctttcagttctctcactgcaccacacgatcaagagacacaagcgaagagaatttcagaaacttcaacatcatccaaatcaactcgataatcaacctcgcagaacggataatgaacgtactcgatggatttagccagataagggaggaccagactcattattctttccatgaagactcccgaccgcaagatggccgctttatactctatctgggctttcaggatggatgaataatcggtattagtgtccggctcgtcctctagctcctttagctcggcggccatatcgattggccatgtcaaggaagcaatgagctcggctgaaagtcaacaaataaagtcaatattccaaagcgaggttcattttagatatgattgaaatggaagacagaggatgtccagcttgaaagaatcgaacaactaacctgccattaaaccgactttccgaccgaaatcacctcgttcgctcacttcctcaacaatcgtcacgagttctcttataagacccgttttagcaaagattcgggcgaccgttcgttcgacatcctcatcgtcgtgtcgccatatacgtttaagatccttgagacatccgagaatcgagtctcctggtcggtaaactttcgtgatttctcccgtaggcgaatcaacatcctgtcgaggagaaattcgtagtgagatctgtcttgtgagtcaaagaatataggggaatgaagaaggtccgaataaaaatgagcagtgctcacctcccaaccacctagggcagcaagcaatgtctggatgaccggcgtcaacacggcttctctatcttcttcttcctcattctctcctccttcatggtcgtgttctgggtattcatcgtcctgagtgttcttgagcttgtttttacgcctagcctccagcagttgaatccgttcaagctcctctatttgaatgtgttaccaactgtcctaccatcagcaagaacagacacggaccgagacaaacaagctagaatgcatacctttatgtccataccctcccattgtcatatcctctaggtcgagctccatgatggctatcgctcctagaagtgtgtgtgagtataagtgtgattgtgagtgtgagcgtgagcgtgtttgtgggggagaacggttgaaagatctttaatgacgcgttaaacacgcgacgcgttagctgacgtaagccaatcaaccctagccaccaccttctactcccatctttcccttctccacgtatcctgaccagaccaaggcacaaagacaagtataccagcatacatcttatacacacacacacacacacacacacacacacacacacac

SEQ ID NO: 223 - DNA, 4836 bp, Xanthophyllomyces dendrorhous
ctctctctctctctctctctctctctctctccgttcttgaccatgtctacatctcctgaaaactccactattctctacaagatcctcaccgagaaggagtttgatgctctctacgagaccgcgcccatcaaaggagactactggctcgggacttcccttgatctgaatgacaagtttattcacacctcttcttctcaccaagttcgtcttgctctttggtcgacgcgtcgaatagtcctttcatgttccaaatgctttctacgatgatagtgtcttatacgttctgttcaaactcaactttctaaagctcgagggtacacttgaccgattctttaaggacgtagagctcattcatctcttggcgattcctcggtcgaacgagcgaatcgaaaagactcttaaatttgacgaggctggcaacggagaaaagtatggccatttgtgagttctttctctttctctctctctctctactcatcgtatgtgacttgggaaggttcttggtagcttggttaactcatttcttctttatcaaatttctaggtacgagggactggatctggttgctgaagtctcaaagaggagtcgagtaagaaaggagaacggaaaatggcagctgggcgaccttgagttctagtttgctatcaaatgactgatggatcactggtacccaaaaccagccacattggagagagcgagcgaaaggaacagagttcattggggtggttagtcaccattcgtttgacgtggcacagacgaacttcttgaatccatcatccttaccatcaccatcattatcactatcatcatcatcaccaataggcaggctccgatgtcatgcctgccacctatagcatccgattccatgcttctggtttctggctctgcttacttctcgtcttgtccatctttctcgtgatcagtccggtcttatcgtcttcccttccctttccaaagtcatcgtcattaccgtcgcctcctccgtcatcgtcgccatggtcttctcccgattcatccttgctcgcaccatacacgcctttttcccctcacttgagatcgagcgacattcatgtttctcctttggtcctcgtctcgaccataaacggtgatttacacgcgctcaatcgagtaacaggggagaaactatggactgttcagggagagggttctatggttggttccgagcgaccgagacgacggagaagcaaatatcaaagaaacccagagcaggttgagtctaacgaaagattcctggtagatcccagaaaaggcgaaatctggcttggttctttggatcaaagcgcgtccgacgagaaagacagaggttggaggttcaaaaaaatgggagtgacggtaccggatctgttcgtctttgttcttctcttgtttctttcaatatcttcagtgtcatgagctaccaaacctgacacctagttgcgttgttacttacgtctttgtgaattaccactgaacacagggtacatgcttcgttccattcgttacccgttcacttccgacaagacccaaacccctctcgcgtattcagcggaaagatcgacacatctctcatagcgatcaacttgatgactggcaaggtcgttaagttcggagacgaggctggttctgcagctacgtacttgggcgaacattctttggttggtagtctcgagggtcaatctgaggagcgagatcgattaatggatctgttggacgagcttgagggagaggaggaggagaaaggagatgtaggagagctattatacctaacacgaacaggtccgtaaatattcaaactttctcctttcccccgttgtctcttctgtatgctcttagttctgctaacaatacgtacctaacacatggtttccataatgaacgatgcgtggccacttggaacaataagattacacgctcagaatacatcacccacctacccccgactcggttactaccctcaaatattcgacgtattcacctccgccttcatcgctcgacccactgctatcgagcgcgatctggggacatggtcgaacggccgacggactttacgctatgtttgcagctggcactcagggagcgctacaagccgagaaagatgggggtgtcgttctgggttttagagaagtcgatcagaaaaaaactgctggagcaggaacagggggagggctagaaggcgtctgggctgtcaacatggatagtttaccgttcgtctgtctttctcatcgttgttcccttcaaattgttctcatcgagcatttgctgatctctcttcatccgtcttttggaacatggatcatgcatcaaacagaatcgccttctacgacattctctcgatcactaacatcgatgctcccccatttattcttcctcaaccgatcccatctctctccaccctgttctccacgccccatggaccaccttctcgactccctcaaatcctctttattggacagacaacttcccacaacacaagttcctccctctttgccctatcaagagacaaccatccattgatcggatactttcagcctctcagcagttcagcccgaacgagcgagctcgaaggatatcacgtactcgatggagtagatctcattgatgaagaactatctctccgaatgccttcttcctcctcctcgacagagaaaggtgtgaaagaaggatggaaagagaaacaagagagaattgggattgaaggcccacccgaatgggcgcaatcaaacggaagggatcttgtaggagagaggcaacgatggtggcatagtagatggattggtgtactagggacaagtgcaataggctttttagggtggtggtggggccgaagatctagttcaggtcgtagaaactccaatgaaaaactaacaaaggagatcggccatgcttcaggcaggtcaagttcgtcggtgaaagaacagggtcctatagtagaaaaggacgaaggaaaaggaggtggcgagaggacaaacggtgggctcgaggaagcggagcctgaacataagaagaaaaaacgacgccagcggacgaggagccggaagaaggatataggaggagatgagcacgaacaggagcaggagacggttcaaggacaagaccaggacacatcgcgccaggaagcgaagaacgaggaggaggtagatgaggtagaggaggaggaagaggctgaggagatatcaggtccagtgatgatagcagagtcggaaagcaaaaagacggagagggagttagttgtctcagataaattgataggtttgttctttatctcgccttggaccaacttcataatctattatctgatttatttggctttttcaatacaccgctcatctactgttgttgctcttttaccgttcttaaggtgtcggctcacatgtgcgtaattaagtcttacctcgtttgtaagattatcatctctgccagatattcaaaacccaatgctcatattgcttcttgctcttattatcctgtacagggaaccatggttttcgagggcacattccagtctcgacctgttgctgtcaaacgggtgctttctcatttcacaactctggctacccaagaaatcaatctactccagtcctcagatcaccatccaaacatcatccgatatttctaccaagaaacctcggacccctggctattcattgcgctcgaactgtgtccagcatcgttagaggatctcttcacgaaacacagagaggttaaagaacttagggataagctgatacccaaggacgctctgcgggatattttcggaggcgtaagacatctacatggattgaaaatcatccatagagacatcaaaccaccgtccgtcctgatcgtcgttcttctgcagctctctgatcttttcattcatgctaaaagcgcgctttgccttccccctcctctccttaaactataggaacattcttgtctctctaacagctaaaggattgaagatgttgatctctgattttggtctggccaaacaaacgacacttgatcagtcatctttcggaggcaccgtcctttcctcttcgatcactcatctagcacccacaggtacgactggctggcgagctccagaagtacttcttcatcgagggactgagagtgaatcatcaggggacgcatcaagctgggacgattgggacgtcgtgagaactggcaagggagcggctacgtcagccggattgaaacagatctcaaagaggttgacaagcgcagtagacgtattttccttaggatgcctgacctactggctcttgactcgaggaggtcatcctttgtatgtatccgtcttccatttctctcctcttacaaattttaaataagtgctgatgaaacttggtgttcttcgttctgtgttttgatgactgtctttccttttctagcggggagagaatggagagggatcggaacatttgtaaaggccgatctcagctcaacggattgcccttatccgaggaagaatgtagcgaggcgagggatctggtttcaaaaatgatctctcaagatagctccaacaggtatgtcgtttcacaaccttcttttaggcagagtgatgtctccttttgttaatcatgacatctggaatgaagaccttcggtggatgaggcctttctccatccatacttctggagtcctgcccgcaaactgtctttccttgtacgctatttcgccatactcgcttcttcctctcttttctcctaactgatgcctcttgacgtacctttggggttccgcctggaatatccgtgctgatacctacagcaagatgcttccgaccgattcgagatattcgttcgggatcctccagatccaatgcttcagttattagagaatgggtcgact

SEQ ID NO: 224 - DNA, 680 bp, Xanthophyllomyces dendrorhous
ttagagaatgggtcgactaaagtcattggttcgcctcgagactggatgagactcatggatcagtcgtttgtagacagtttagggaaataccgtaaagtgagtctcagtgaccaccgttgcttagcggaggacatcttccttttggaacaatggctgatggatctcattgagggagcagtacgatgttggttctcttagagatcttttacgagcattgaggaacaaacgccatcactacctgttcgtctcgttttgtgtttcatccgtactctttccataaacgaatggttttcttttctgatcatggcattctgtgaaccatatgctgaccaacttgtatcgaacagagatttaccggctgcagctcgggaagctatgtctcctcttcccgaagggttcctcgcttactttaccaaagtgagtcgatatcactttaaatccgcgataccctttctttctagcctgacctgtcctctctctctaatagcgtttcccgctgttgttcttacatgtgtacggagtcatctcgagcacagagctccgagatgaaggaggttttcgagaatactttttagacggcgagcgataggtgatcttatttatacctaaaacagaaaaactaagggaatcgaggatttcaaacgtcttaattaccatatatatatatgtgacgttaatct

SEQ ID NO: 225 - DNA, 5640 bp, Xanthophyllomyces dendrorhous
atgtgacgttaatctcgtatgagtgtatagcgcagcgattgaagatgcaggctcagtcattgacttcttgttagacaaaaacatctacccaatcaccctttctacctttcataccctgcctaaccgtcctaagcatcaaatctttcctcgcctcaccccttgatgtacattgcgagagatctccgggaatcagaccgtgagctcgaagaacgagaagagacgaccagcatggcgaggaggaggatgtccaaggaagagaagcgagatgagttgctttcagcgcggggattgtgtatgagatgttaagatgctgtttcaaggtatcaacaaaagcggtagcgatagggtatcccagctcggctagttagtacagtggctgctgacgaaaagaaaaagaaaaaaaagaaacgagtagaagaaaaggagagatacggacctgtagcaaggggacggcgctagcgaattttcttagcatgttaatcactcttgattctctatccacagtccaccaaccccacctcgcgcactctccatcgccttccttttcggcttcttcttctccttctagttcccattctgtgccccacccaccagggatgaaaagcttgatcccttgaaggtcgagaactctcaaatgggccgggaatactgttatcaggctggggagtgaatggttcaccagattgctcagacagagcgaggtgacaggggtaagggtgaccggctgggtagggagtggtcggagaaggagttttaacatgctgagcgacacggtcgagttgggtaggtagagagttctccatcctccggaatatccaggcctcccaagatgattatcttcccaacttttctcgttctcgtcatctattgacgtggacgacagaagtgagctttcgccatcatcatcatcatcgtcgtcgtcgtcatcctccgagttttcccactctcggagatcccacatcaacatttcgattccttcatctttgagtccgggatatcccgcctgtgcggctctcgtaccaatccaccagccgaggagctctcgaagatgttgtggtaataaacctagttcttctctaaccaactctctatcgatgactgaggatgacatcttgctcgacagacgagccatacagagcgcgactagcctaggaatctcctgtcctttatgtctatcctcgatcgaggctgacgagctagattccgagacaggaaaggatggagggtaatacacctggaggttgggatagactagttcggtaaacgatctaaatgaggtgagtgcctcggccgaaagagcgaaagaggcgcgtgttttgggtttgtttgatgatcttgccggacgaacggaagattgatttcgttctgtccatgatcgggggggtggtggaccggctggacgccgaggttgagcttgcgccggttggataacaggcggtgccaccgaagctggaagaacagccagacccacgtcagtctgctgatgtaacctggaaggaacggcaagaggtaaagctgacgatggtgggataaaaggttgatcgagactcgatcggtcgatcgaccgtcgttcttgttgtcggagaagaccaagaagctcgttgacgggcaatcgagtctttggcttcggttcttttcgaggttcaagcgtcgttgatgctagagatttcgtcaaggaggccgctttggacttggctgatcctttggccatgtgagatgattagatcaggtcgagagagttgatccgatcttttgtcttgttttgttttagtagaagatgtttggaaagaagagatggtgagaaggggaaagagatggtggtgatggtggttggtcagtaggaagaagagaaaccatctgagatggacaccgttcgattcatcatcgttctcgtcctctatctgcacgtcaaacgcaactcatcctggagcacagagatgagtgcagaagcggcagttctgacaactgcctaaagtctaacctctggaagaagacccgagagggagaaacgacgacaaaggaagaacgcgattaactccaagacattctatctccctacaatctcaactgatggagaacacacaaaaaaaagcttacccggagactggaggcaagacggccaccaccgaaccctcgttaagcaacactgtatccacatcttcatctggcacgagttcctcgtcgacagcccatgttgaggtttccaataccttgccgagcttcgggaacttgatggccaggatgatcgacagctgagtgagtgaaaaccctgggtctgctgtagctgagtctacaactgcagggagagagacatccgttcgagaacatccagctgcatcctcggctgaagcaaaaaagagtacatggacagaacacatgatgacggcgaccaacaaagagggagtctggctttttttttcagctagcagatgatggatcagattcagctcgcgttgggtttcattctcattgtgttcagtcgagtctgtctgtggatgggtttgctcagcatcgtggattgctttcaagaagattgtgtcaagagagttcgttatcagctgatgtcactagtggttgtccttatgttctcccttctagttatcacaagagcgaatatggggttttaaagggggattgaatccagagtcaagccacaggcagaggaatccaagcttcgtccaccctctatccttcaaaaaagcccaacagcccgtccagcaactccgttatctccatacccatacggtccgcgttcgaggaaggttccggggggtttaagtccgaaaggtggtcgaccgaagagagacgattacagaggagagatgtttcagagagattggtttaaaagagttcgagaggagtccgaggcaggtaagctgaaggaagaggatgtcaagatcaggatttttgttcaagctggatatactttttgaaagaaaaaaagggagggaaaaaaggtacgaacctgcgagttgatcacttggatctagctctcatctttcttctcttctttctgagccttctcattcgcttcttgcgccattctacaggaggaaagaacaagagaacaattggtgagtttgatattcaaagcatggatgcatgcacaaaattgatcaagaccctttttcccctcttagtcgcacgaccctcgcctaaatcttcctctgtcctgtccaagcaagcttgacccaacggacaaaggtcgagaaagaacaagaccggcgactagaaaggaatcaaaggcctgtctgctcaacaaagcctactcactgtctctcatgttgggcgaatggtgatggaaaggagagaagagagaatccagccaactacatgaatttctttttctgcctgggcgtaaccctaacagtcacggtggccggttcagggccagtcggatggctgagtcccctgagtgctgtgtagacacacgtgatcaaaactgagattagattagatcagatcagatcagatcagatcagcttaaactacaccgctcttgtgtcgtctgtatgtagcccggctggtcaagtaccgttcgtcgatagccatctgttcatgtatcatacaggagctgaagcttcttctgtgtttttgtccagcagcacatggacggatcatgtcgagcgagtggagtgtcttatgttctttctgctaacctcggattatctgcagtgtgctgtcgttcttcgttccctttgatccatgaacagctttccgactgctgaccgctttcggttcggtgctcgttccagattcatccttgtgctcggagagtcgactataagatacgacccttgaaatttctctgttctcctcaactcctcaactccttctatccaatctctcttactacttggaagaatggtccttcacgccctcaccaaagcgtacgtctggcacaagatgaccatagaaatgattgcgcggctaaagtcaaggaaggcacttcaagagtcaagagaatggagggtaaggtgggaagagatggcatggatgaagaaacacctgacggcagatgaggcaaaagagagacaaaaggtaggacggcgattgaaatggcaactggtgagcctgcagatgaaggaaaataaagctaggcttggagctgaggtgaggtggttgaagtttagaagaatactaaaaaagactagatcaagacgcacaggtgagtagttgatccagctagctcaggccttcctgttccatcttctgaccaggtgtgacttccttcctttctgtcttctcatctagactagaaaagtaaccattctccctatataggtcgaaacctctataacggctctcaaccgattgtcccttgccctttcttcatcgactcaagaggctacctgcggcaaagattcttacagggtttctacaagttcttcacccccccctttctctctggaatcagttgttcagctcgaagtacatttgtcaataccttacgtcatgcatgttatcgatggccgcttgaacgaagcaaaaatggtcgcagtctcagattaacagaaagggcagagagaccaatattatgtgtaggtcattttggtggtcgcaggtctgacagaaagttcggaatggccagcactctgattacatatataagtagagcacgaatggcagagaagaaagtaatctatggtgacaacataaaggatacaactcagatggaacctcctacactctccatagtaaaaggagaggcggtcgggccatccaatatagcaagctcttctggcgtaaaaggaaggcgcggaatgatccatatcctgacaggaataagcaaggagatctatcgagcgtttttgatcagaatacgaagaaagtaaactgtttagtgacgttgttcttcgcaacgaagctcatcatacaggaaaaaagtgacgagatggtgggaacctactacgatagggaagccaatggctgcaatggtctgtgtgatggcctgatgagtttatcagaaagaaaggaagagcacacgatcagttctctctttgcctttgccctttcttcatttgtgagcgaacaggtgagctatgacgcgaaggaggtagactcacgaacgtcgctgcaaatccaatcagctcgagtgccaaccacatataaactcttgaaagccggacccgtcttaatggttcatctgtaggaatgagtgttctatcctgaatacagtataagatgagcgccgtcacacccgatcctgccagtgcccctgagcccatcaaccacttttgattaaaaagaggagatagaaaagaatcgtcaatcatctaaatgaggggcaatcgaattagagaggtagaaaaaacatacgaaaagaccggctagaactcctttgggtacccagtggagtaatttcaagaatggacctgtcatgagaacctagaaaaaggatgatcgcaaagagtcaagacctgttagaagtgaacaaacgcttaagaagcataacactctgaagaagagacaaaccagacaagctgagccttgcagcaagttcgatactctctgctcaaccacacccaccggtctttcctcctttcccttcctagcctcccctccaccgttggccttctccgcccctacgttcgtccccgaagccggatcaggaacgtctatcccgctctccacgtcatc

SEQ ID NO: 226 - DNA, 18297 bp, Xanthophyllomyces dendrorhous
tcatcggtgtcttcatcaacatctatcttcttttgacaaaagcccatgacaacgagtgactgagtatgcataggtgcttgagggattagaccgttcggcgctggaatcccaagtaggccagcaatgaacgtcgttattcctagcaggaagactttgatgtcagatgtgataaagaggtatctgattaggacatgttgtgcgcaaatcgataaggaataagagaagtataaatcgatgcctacaatcccaatggaagccgggaggcttcttcaaaggaaattcggagccctgagcgatcaacgaagagacgttatgatcaaatgcaaagagcttgatccatccaatatctcaagtcagcttcagcacacaggatacgagagttagcccctagagctagacgaggcgaaaggacggaccacaaacagaacgaatccaaaaggaaacgagaccccaacccactttccctctaacgaccagaatcgaaccaaccattgtcttccctcagccggcatgaacgccggttgaaagggtagcctcgtctcctccacgtcgattcctacatggaatctaccccagtaggcaagcccgctgcacgcgaccacagagattggcattccgtaatctgcgatgaaccgacggacgtgtcgatggaaatagggctgagtggacacaagattgaatacatgaccaaccacgagagtcaagatagcgagaatgatggagaggaaagaagacgaaagggggagaggaaattgacgagtgatgactgttcaagaagatgggtcagcagtcaaagggttaatcaagtcctttgttgtctaagtcttgcaattctcctcttacataccttgaactccgtattgaagatagacccaactgaatgattggattgaataaaatcagacacggcgatgagcgcgaagttgtaaaaacacgtaagagttgtaagagccatccaaagaactctgcatatcatacctaacgtagaacccaaatgtctcacagggataccgggtaacatatttcaaaaagttgcatcccccaaagacagcaaagacgatgtgcatgatagctgcccagaggtaagtccatctaagaaggagcgagaacggcagagacatgatcaaaatctgtgcgcggagtatggtataattctccgaggcaagtaagatttacccaataaagttgtgataatccggtccgctctccatcccattgaagatatcataaatgaccttgttaaatacagtaatcgggccttatccatccagttgttgcgcatcaagaaggaggtcaatcttctcagacaaccagaaaacacgtgtagtaagagacgagaacaaacctgttacccccaaaatacacaacggctgggcaccaaatatcgaaaaaacaaacgcagatatgaaggcttttcgagtagtatccgagcacaggcagaaaacaaacagatcagcgcttgatgtggtttagcatagcagaccaaagatcaaaacagagaaaaaccatcttactggagagcagcacctcgttgactccatatttcccggtcgtttctatcaaatctagactaaaagcaatacccggctagacaacgacaggcatccgaagcgaggatggggtaagtccgacagatcgaacgcgttagaaaggaaataccaagagaaagactgactaggacattggagaaaaagacaaaggcagtagctgggacgacccgatagttgtacgcgtccacccacttgcaggtccgaaggagaggacggagaaaccgaattggcaaggaaggaatcggtaagagtgaagtcaaagactatacagagagtcaagcgggtcatcgagaacacgcacgtctgacacataatatggacttctctgcagtcagtcatcaggcagatagcagattaaattaaatcctttattagcatcaaagcaggcaaacagaaagaaggtatggtaggccgtagaagatagagacctaccgatttcaagtcgttccacatccctctacctggataacccagccgcccgtaaagggatttcctggttcttctgccatccaacacatctccctctgcagcgcgttcgctcgaatagttagttatcctcgagtggacgacagacggtctatcggatgatctcctgatcatggctgtgtagaatgatgatcgaatggaattgggcgtagacgttctgggagctttttgttataggggctgaccgaagctatgactaaccgagattccttacccgccaacaaccaccaccaactcttctcttcgagtatacttctatcaagatgggaaaggcagctgctggaacaccgtaggttcaaactctctgtacttctattcgatcaggactgacttgtgtttgtctgtcgcgttttaaacgaaaatcactgaaaggaaacaagtcgcgaacgccatgaaggccaagggcctgggcagactcagatggtactgccaggtctgccagaagcaaatgagggatgacaacggattcaaatgccatatcgccactgaagctgtccgtataacttcatctttctgctaccttcacaagaggagagaagagtatggacttgatgggcctaaaactgattgcgtctcctttgggcttgtggcaaatgtgctctttagcatctccgacaaatgttggtcgttggagagaattctgggaagcacattgacgagttctctcagaatttcatggacgagttcattgttcttctatctcgtcggtttgtgttgtttctcttggtctctctgcctgtcttttcgcgttcaaacttctgatgtgtttccgccttcctccggcaatctttcgaatctgaatagatacaatactaagcgtattagagcgaatcaggtttatcaggaatatattcaggacaagcatcatgttcacatgaatgcaacaaaatgggttaccctgaccgactttgtcaagcacctcggaaaggaaggaatcgttcgggtcgacgagaccgagaaaggattctttattagctgggtggacaacagtccaggagcgttggccaggcaggtgcgtgtcgtttctttttgtctctctagaccgggaagcttggccagaaactctcttatctcaatttacgagaaagtagctcgccccagaagttcttacacacattatactctgaatctgatcacatctctaacaggaagctattatgaagaaagaacgccaagatacagacgatgaacaacgacaacgaaaactactggctgaacagatcgctcgggcgtctgcctccaactcgaattctgaagatcctaccgctagtgatggatctacagctgggccgaaagttgaggaaggcctgaaacgtcctgctgaaggagggaagattgcgttttcgttcggagcacccaaaccagtagctgctgctacaacctctgctgcatcatcgagctcacctgcaccaatctctcagctatcatcaacatccacaaccacttcaccaatgcccccgcctcctcctcccccactgtcaacgtcagctcctgtatcaaacccactcaagatgacgatcaacccgctcaagcgagcagcaccttctaccaatgtcttcaaggcttcttcatcatcttcatcatcttcatcctcgaagggaatagccaggccaatgagtgcgacagagaggttgatcaaggaggacgaggagcggaagaaacgaatagctgagaacggaggtcggacgccgtttggaggagccaaacgggtcaggctctagagaaaaagactttctcttcttcaaaatctctggtcgattgttttgactctttactctgtccggtcttcgtctagatttcatctttatttttctctttccttttcaccggtctgttagcgtgcgctgcacaaacatagcacccacactcagagaactatactatgtatatatatgtgctcaacggtgtcccttctgtctcaacctctgttagctacattctgtcaagagtatgtgaacatacgcaagagaaaggatgttgatagctctgtcgtgggcgtggctgaggtttgctgagtcatccaatgttgccttagtcgttctttctctcgcactctttctctccctcggacggtcaaccatggatgagcatacaaaagcagatctttcccaggatctcgagtctttcaggtgggtctagctgcactgatcatcctggggttgtgtgttctttcgaactaatcgcttgaatatccagaaaacaatggcaagatgaggttgttcatcaccatcagcacgggaaccaacaatcgtccgctgttcaaccccgattgtctcctacgacacgaacagtaccgattcctccaccatcaacgtctacaccgacctcaccttccacccagaaagctattttgaaatcgcccgtaacatctccaaagtcaaagtcaaaaatcgtccctcctacgtctctttctggaagtgcccaattcaaacatcaccaaccgctcacttccactggaacactcaccccctcatctgaggcttctgcgctcgacgtgtatgcactcgccatcgatgccgaacgatcaggtcagcttggtccggccgttaagctttatcagcgtgctttccggatgaacgatcagatagacaagttgtaccagcgaactcaaagggagctcgcccttcagcatgagaactacccgacggcctcatccgatcctctcgatccgccgcctatcgtcgagccaacaggtgataatcggtccaaccacgaagctcaggatccagtgggttcattggtgtttgatttcaagactcacttccagctaggtccagactatgttccagccgaacaagccgtatcctcttcatcggcgtcaccagtgtacgcctcgatcgcagacgaacacccaacatttgttcaggcggaggaaacagagccatacgcttggggggttcttccagaggagatcgtcatatacatattgaccatcatgatggaatctggtgattggaaaacggtctccgcgttcgaaagagtttgtcgaaaggccttcttgttgggaagagagcaaagcgtttggaagtatgtatccctagttcttctcactgctcttctctgggtcatcaatatgttcagttcgtgcccaacttaccgagtcgatcttcttctctcctctgtctacaacagaaaaatttgcgcgctcacgtttgtgccgccccagatagaacgacatataagtttacaagcgttggtcaaaccgtatcattttaattaccgagagacgtttataaatcaccctcgagtccgaatggacgggctgtacatatctgtcgtccactgttcgtcattttttctctatctcactctctcttgtcttcgtagtctactagataggctgcagctcaatcgaatgatactatggatatggggcttatgatagatcatagacagggtatcactgagaattcgtggtacgacgaagttcataccggtatgttctcccttcttctaaacgtgttctagccagagaagaccaagctgatcgcattttccactgtgtgtgtgtgtgtttcctatctgccagtcacctatcatcgacttattcgattttatgcggacggaacggtaatctccctgctttccaccgaacagtatgttgactcttctccttcttcttattcattcacgggtggccactcatctatttgtcctttatccatcctgtctgtatacgctttgaatgtagcccttcaacgctagttcccttgttgaatagatcacttcggatgaaaggtcttcatcatggcaattggtctctgacctcctttgaaccgtctcaccacaagaaccaagttcatcttcctggagcacccagagtagtcttgaccgggctagttgatccagggctgatggagggcaggatgaagaagggaaacaaatacgagttcgagatggatctagggctgagatgtacacagcttgggaggttcgccatgcttctctctgtctcttttatccgttctcagctctcttggagcatatctcaacttatcaatctctctgtctttcttcaacggatcacaaaatgacgaaaacggttaactgtggaaacaaagatggaacaaattagacctacacacttatttctccaacaatcttctgacgggcgaggttattcctattggcatggccgttcagaaaccgttctacttctcaaagtatgtattttacgcttcttttcttctgtctgaaatcttgcatttcagtcgagcggtcatgcagttcatagaagaaagaaggaaaagagagactgaccagatgatttgcctttctccatatgatcgattctcctccaccagagtcaaatcctggcctccattcggctaagaattcagctctgaaacatcttggtactttagtcatattcctagattcctctcttgcttctcaagtcccagttgctctccatctcctctaaatcacactatatcatcatcctcctggacacagttctttcctttttctcttatcttgtctgtctttgttttcagatctttatattcgaatcttatatattcaactgcatcactttgcttcaatatatattgcacgtacatttatgttcaatacacttagctctttttgtctctttgatgttattcatggaacaaaaatgaacaaatcatgaaccgcttagaggtgtctccatttaggagagaaaacatagcataagatcaggatagacatggttggaaccggatgtgactgcatatacatatggaggggtatctctgttcttacagcacggatggtggaatgattcacacgactgaacgttcttcctatccgactggaaaagcagaaagaaacgaacgacgaagaagatcttgaatggagaaggggaatgaaatgaaagagaataaaaatggaaaaagaagatatgaacaggataaatacaaatggcctggatcggggtgatttgggctcatatgtcatagcatactcgagctcctacccatgcaaatgggtaattatgtctgagtagcacccaaggcgatataaacaaatcgtctgtcagccttgagagataacataggatatgaaaatgtgtggattaaactgactgataaaagtttcgaacggttcgacgacctgcgaagtaagggagggtaacgaaggatcctcccaactgatccgcgctcgacgtcaaacgaattgagacagaactacgagtcagctttcatcatgcggttgattagtcaattaatcaataaatggactcacgacgacatgatggacctcatcgaagaaatccgagctgtaccctgggtagagctccgatgggacatagcccccaccaacaacttgttgggctgggtgccctttcataggtgttgatgtccattcccagacacctccattatggcctggaatagtcaaacctgtcgagtctgtgtacgacatttcggctctgatggtgaagaaagagagagagagatatcacaacagttcagaacgagtggaaaatcaggaaccgagggaaaagaagaggcaacagaaaggtcttctcacggaacaggatgccagttcttcaatccggtgttactgccttcccaatcagtcctgtctccctctggaaatttatctagccaaactctgagttcagcctcggtgggtaacctgccgcctcttgatttggcaaaagcgagatgctcgtcgtacgacgccatcagtggccagtgttgagcgattgcaaaggataccgggccatacaccgtctttaccttccattctccgtcggtgtcgatccaactctttggaatccttccactagcgtcatcgccgccaaactcttgcttcaagaaagatctatactccccgttggtgatcccttttcgttcaattcggaaagcgccaacgttgatggtatgtaccccgttctcgttgtcccacccgaaaacatgatctctccagctgtcttgatcgcggtactttccatcttcttcctcgagatctttgtggccgagggtgatctctgtggcagggatattagctatagtcgagtgttgagcgtctcgttcatgttgggcgtcccataatcgggcgagagtgctaaaggaaggagaggcgaagccaggagggggaagcgtcttgggagattgaatgagcatgtagagcagcgtttcggcgtgcatgacttcgtgttcgtctaaagagagagagagcatgcgcgcacgaggaagaggagtgaacctgtcatcagctagccattcacatatcaaaaacaactactcaaacacacttcgaaagtaacgagaaagagaacacgtacaagtcatctaaaaatcgtgtgaaaagacgtagataaagagccacgatgaacaaagctgtgaaatggagacagacatgcgaggagtatactatgagactcacaaagatgattcgaccgagcctcctgtccatctgtcgctttccagattgacagtcctcatagattttgatcaaccgttctctcactcggtttctaaattgcagaatatcctccaacgaaggccaatcttcgtctttctcaggtacgatcgaatgggactgcagtaagggatatatcagccggtcgagccattgccgtaatctcttggttcgtcatcaagtttcatgagaagaaatgtgatgtacaaaaacgagggacatacatgacactgctcggggtcatccacatttggatcgatgcctcgctcgaatagatccttgtaatactctggctctgagtgaggttccttcaagtgtcgggagagaaatatatccaagaaggtcggtatatggcctaaatagaacagacctgtattggttttttttaaggaggaagcggaatcgatgtggtaagaaacagaaataccagaaagaatataggattaacgaacacttgtgtctcaagtcaattggcttttcatgcagcacctcctctctaatcatcccgatggttatgagatcccagaacctccacagatcttcccaatcgtcgaccgtcgggattcctgggagaccttttccatccggttggcccaaactggtctgtcctccagattcagacttgagtaggatgcggttggtcggagaaaacgttacgacaggtcgttcgagcacccagaggttgtatcttccttgagagtctgggaatcgagtgattggtcgaaggccagctgaagcaaatactgataaagcctcggtaagagagtacttttcatcattgatgagcaatatgtgaagtaaaagatgagaggtcagaccctggacgaataggaaggtataaacggagtgaccccaactttgtagctccattcgatgttgacaagctcgccagcatcgaactgaacgctcatgcggtcgccttccttcgacgcaggaatcgtgatcgtttgagctatgttggatcgaaagtaagcttcgtggcggcctgtatatataattgttaggagcgaattagtactcgtcttttcgaatcagcttgagaacaaatcgttttgaagtgacgagcgcgcacctttcgggacattgtaccgtccttcatacgtccaggagtctttcattcttccgggtcctttccatccaatctcccgctcgacaccctaccaatggtataaaaagaggagaacacgcatcagttctagacaacttgacagaacaattcaagacaggaaatactaagaatgagataaaaactcaggaggctcacactccacatattttcagcccaggctctggtaacaccctctggatcattgtaagccctctcgaccacctctttctcatttcttccatctagaccgacaaccaacctgtctccgctacccggtcgaagcggaatggaccgaaggaactcgatggctccttctctgtcaaagttgcctaaactagagcccaaaaacagataatggattggttctccatatgtatttgaattgaccggattagaatttgaggttgaatccatagagtcggccaaatgaccgccttgttggatccactggagaccgacatcatacgttccacacactcctccggttgtcacatttccctgggccatgattggacccagtgaagactcgtcaagagaggaaagcgttcggtctagttcggcctggtccaggtctagtgcaaagtacttgacctcggatttttctccatgagagcgctcggccagggctttaagaaaatgactattaaaaaaagccgtaattaaaatcggtgcatggtgcagggaaagtcaggtaggcgtaaatcaattgagacggaggtgatctaatatatataaaagagttttgagcctgcttaggaagtacctggttttggaaagactacctgctccgagctctaggacgacgccgcctagcatattttttgattttcgcccgtccttctggccgttaacgtgcccgttgacacctccgttatggactccgacatccgctgacccccaatctgcaactctccatctctttaccgggccttttctgagcggatagggatctttacgattcttctccggctcttttttctgttcttcagctgtgtttggaaagagcaatgagacaatctctctggaatgcgccttgagaagggataattccactgggtagagatagtaggaagggcagtcggtcgtgatcctgaccaggatgagcgcagaatacatataaatggccatgccagaggaaaagcaagaatgaagatatatcgtgagacatcaggtgtccttcctatacaagtctggatcaagtttgaacgggaacataaaaatacacacttttcatagagcttgaggccgacatcgtcataaaacaacattgtcggcagactcctcctgtatctatacccgtcttccaccgagcatccaacgctatgtccgtgattctctccatccgaattgacccactgggttcctccgaggccgtttcgaatttgagcgagcaacgatttggacggcggcgaacgatctctcaggtcatgaattcggtctagaacggaccgttgctgggatgatgatgataatagaaccatgttgcttctgttgttcgtttcaaaatttgttcagagatattgatgaggacgttgttgttaacgatgatgatgagaaggatgaaggcttcttaacgtgtttccttaccgaaaatgaaatgtgtgatgtgatgatcgaaacagcagacgggtcagttgatgaggtcggtcaggcacacgcgtggtcaggcacattcatgcatacgttcgcccggtcatgtactcgagcccgggcaccgtcagggacgctcaggaacgttctatccgcagcaatcaccgtcaaggtccgatcgaggtcgaatgtgtatgaatcatgacgtggctacaaggcactctattaaccctaactgtaactccgccttcgtacatctctgttggtattccatctcctaatactaagctgcatagaggagaattggactccattgaagatagacccgcacgaccttcgcaaactcacatatactcacatatactcacatatactaacccaatgagtgctatcgaagcaatcaaaaaacaatccgagtacgagcttatctactggcctgggattcctggaaggtaaactttcctagatctttgaaccattcttggttgataagaacacaagccctgattgtctggtttcaattaaaaaaaacacctctaatgcacttgaaaagaggagagcccgtccggttagcattcgagcaggctggagtggcctacaaagatgtcgcattagaggaggaatgtatggagagattgacgcacatatgctctccatcatatcaacctcctcgtatgttttatgtatccttcgatctttccgtcttccaacctgcccggaggaagatctacactgatgacgcgctcatggttctgtacatcatccagcggacaccttgccgccgtttgcaccgccgatcctggagcatgacggtctcgtcttgtcccagttgccaaacattatgttttaccttggtcccaaacttggactggcccctttagatgaaacagctagattgaaaatcaatcaggtgtttctcactatatgtgatgcacagaacgagacgcatgatacccagttcgttccgtctctattctaccacattcgtccgtctttcatcgagctgattcttctccattgcttgatctcggatccgaaaataattgttggaacgaaaacaatgcaaaaaaagccatcctatagcagtgtcggattactatgagaatcagaaagaagaatcgctccgccgatctatcgatttcagacgaaataggatcccaaagttcttatcgtatgtttctccttccttgtcactgcctggggaccctgaagaacgagagaaggagagaaagggcatgttgcctgacgatgtctgactatattttactcccttccggataacaggtactttgaacgactgatcccagacgaatcgacaccccacgtcgtcggctcagacctcacatacgcagatctaggactgatgcatcttatcgacggtctcctctttgcgttccctaacgccatgtccgtccgactcaagtcttatccgaaattgaagaacctctacgaacagacaaaaggcttggaaaggatcgaaaggtacatgaagagtgaaagacgagtcgagtttggaatggggctatatcggagatatccagagttggatatcgaagatgatatcgagcaggctcagcagaaggaataagagcatgatgggtcgggttaagtctaccacaaactggtatgattcgaatttgcccttcatcatgtcgattctttctattgtcgcccttttctcttacatatcctcccagctaacttcgcagtcgtgatcgaattctcatttttctgttctatccttttgcctgatagcatgccgttttgtgttcctccttcttagcttagaaatcctaaggaaaagaagaaagagagagcaagagagaaaaagaacaatccttcaaacgagcatgaatcgagaccgcaagccacaaatcttcctgggtttacttagagtagctccagacgttcttgagcactaaaatttcataaagaataagcgaaaacacaaggcgggagacacgtcagttctcgatcgactcgacaaagagttccggcctcgagagaggagggaagaagacaaggaaatggaaaaaatcgagaacgtacaaccggccttggtggcaagtcggttgatggagtcatcagcctcagcctgggatcggacctgtccgacaagagcgatggtggttcctccggtcttgatggcctttccctcgttgtcaacatcaacgatggtgatctggatggaagcgtggtccttggcgttgataagtcggcctgcaagagaaagagaaatcagcctatttctccaatggaaggttgatggaggagaccatgacagaaaggacgaaccagtggcagagcactttcgggggacgtaaaggtcaacgaggacaccctattgatttaggaaacacgtattcgaatcgacaatggaaagaagaatgataaaaaaccatgatcagtcagccaaccgaaccttctatgatatttgaattatatgtttcttttgttgggtaggacagtctgaagagggcatgggtagcagaagaaaccctgagaagaggtaatggaacgattgaaaaatccagagatctcaagaagcggcaagagagtgaggatattcggctgtcggttattcttgtcttcgatcctctacacagactgacaatgtcttcagacacctaggtcttgtatcgaacacacacttcctttcttctgtactccttccatctcctcttcaaagacctctgtcctacagatcttcgtggtcccctgtccagacacctccaagaccggctttttccagcgggaaaataaagatagaatataaagagctaccaacctggtcgttctccattttgatcgatgtaaaggaaaaagggaaggtaaaaggggaaaggttggaagctgtgagaggaaggtttccgggtgttttgaaagatttcacaaggatgtttttttttgggttcgccgagaagggaagagttcagggtgaatccgttcgcagacgttggaatatgatgagacgattacgatcagggaaaggagagaggtccgaattttttcatccagaggtgaatcgtttccccaaagtcccatccacagccaaatccacacgacacacattccacagattccaatgtagagaacggacgaaaatgccattaaaaaatcacaaaaaaaagagtcaaagactgtcagtatatgctcaacataacaacgcatttctcctcatcaatcatcaagaaagccgaaattaaccaaggaaaagaaaagacacgcacacgctttgacgagagaagtaaaaaaaagaaaaaaaggagtcccttcacaggagggaaacggacgcacagagcatgcgaaaaaatttgcgccagggccagtttggtgagaatcacgtgtctcaacttatgtagcgaagagatttccctatcagggcactttaattgttctatgttttctgtattccttctctattaacctttcctctatcggctctaatgaatgacccttcatcttccttggtcctgtgctttgtctgctattgatcttctctgatgatatctctatatgttcttctgtcaacttgctccatcgccacatttcggtcttctcggtcactcgttatctcttctttgtccttccggacgtgttgtttcttgttcccgacgtctacttcagaaatcggagccaggtgattgagagtgagttttgacgcaactaagggcgcgtcaatcgcttctcatctccgaggcacatcccctcgccatcagaaagcagctcaaacctatagcgtttaaggaccatgagttctgtttctcgcgaagggtttggcgaggaagacaaacggatgaagacagaaaaaaagaaaacctgtaaataaatagagtagagagtgatctggacacgaggaaactacaggacagagataattgatcaagctaagatgaagaaccatatgatctgtttgtactaataacatatctacatgtcacaaagatgactttgaacgtgtactgaacagaaagagtgctctgtgattcatctttgtagacggactagaccatcttcataatccaacattagactccttcctaatacaacactataacccgtgtctaatacgaagttgctgcgtacagtgtgttccattaatcgagcacactcctcctcctccgatcgaacgcccaaccgttcctgacccgttcccgtcagcaagcactcagggccgatcgagactgacaggatttttgatcccttaccttgacttccacgttgacaactcttctttcccatctctcatccatctcatccaccaatccactaggtagataaggccatgtccgggttcgaatcaagtccaaaggacgacgatgacgaggaagacgaggtcgaggtagcacagacagctactactcctggttcggtggagacatcacccttgctctcatctcactcaaccaatcctacttatgcgtctacttctgtttcatcggcccatccaccacctgttcttccgtcgcccaacttgcagactgtcaaccgatcctcattccggtccagacttccatacatctggacggtcctcgccgtcatgttctatctctcttttaccgccatcatgtcctcctcgctcttcaccctacttctcgcgtcctccttcagacctgcgctctccgataaagaaactcttcaaaattccgttgtcgtcagtggtccaagagatatcaagctcctcaatgtctcccaggacggcacgatgtggttcgagatggagatcggcctcggggtcgataccgatcgtgctctcggcttcaatcaccacgatgagagaggtatctggtgggaacgaacgaggagaacctgggcaagacgcgccgtcggttcgtagttctatcaaggtctcttacttcttttcatgttcagcgcatctattgacagacgacgtccaacatcctatccaacaaatatttagactcaatcaataaggtttctgtcgcgttgacatccccgatcagaatccagacggcagatcaccacccccttgtgacggttacccccgatccgacgcctctgcttgtccccttaacatcctctctacaaaagtcggctgaatcttcatcgaatttgtccggccaacaacccaagtatccaaaatggctcacaactttcaccgttcggtcagcagttagcatggatgcatcgccagaggtgcttttgagcttcttgaaacagacatggaacgacaaaaaagttgacatcgtggcacgtctacccgacgacgccgttacgatcgctggtgttggggattggctgggtcggttcacgattacgccagacttggtcaaagaaggaatggatgtcatgaacgttagcatgcctcgtgagtacccttcgggttcctatctttgcaatcttcaaacggtcgaccttattctccggattaagacctcgggacaatgccagaggtaggttaatctactctcggtctgtttcgacttgtcggatcgataaaaatcatactgtgagaatgcgcgttgacaacaagaatacctcttttctccatcagttccagaactaccttttccaatgtcaattccgttgccctctttctgaaacatctgcttcctttctctcactttgtgggcggtagttcctccgattcgaaatcttccgtcaccgttaccagaaaacctgacagacttgatccacatggaagactacgttgtgtacccatctaacgaatccacttctcgtcttctcctcgacgccgggtcgaccattcctaatgtttttaccgacatcaccgcctactttcccttccgctttgctttcagcgccggcgtcgtcttacctaacaatgagcttcccgataatgtgattgctcatgtccgaagcttaccggtcgagatcaatccttcgttccgtcgaatcgctatgaatgcgtctggcgagatcgtcgcggatccaaagccagctgatggatctccctcggctctctcgaggtttatccaagcatacttgatcaacgaaccctactcacttttactccgtccattacgttcgcctggagttcctaaacctatttgggatgtcgttgcagcacttccacccctcgtcatgccgatccccaagatggatgaaccattaaagctgatgagatccgttagaatcgaagggatgaagattaacccaacaggcaagatcgtgttggctactggtacggtcaagaccgagatctttgtacccggagtcttgggtgatgtagatgacgggctagatgttcaaggagttttacctgaggtcttgatcttcaacgggcctgtaccggatgatgacgatgacgatgatgacgacaatgcccaagccttcagtacttggggagcggacaaatacatcaggagcgatcaggcaagaacgcttgcaggcgaccgaccgcttccagatccgttgcctaaaggtgtatttggtcggctcttaccggacgatcatctaccgtcgacctcggagaagcacccgactgagcctagggtgctgatcgtcacgtctcccttcaaggacgctcctgtagagattctagatagtgctcagcttcgtagtttcgttgctaaggtatatttactctcttctccctcatgagggcaatatctcgattagactaacgttctgactcggcggttgtgcatgatccagcttattttcaaaggcggagcattagcaggtggtgagtagagtttcaattgtcgtttgtgcgatatacttctcgatcataatattgattcaatatatgctcgatctacagtcaaaggaacgtgtgattgcaggacgctcatcaaaggccttggatctgacgtggtcgaaatcaatggaatcccattccagggcgaagtatacatgggtcgtcattaaaaaggttgtcccgttatccttctgccaagctttgctctctttcttttctttctcacctcttctggctttcaaaacatgttgtgtgtatcctctttatcatcattccgtcggttatcattctttttatcctcttctctagaggaatcttttctttctttcttctctttcttgacttctcgcatcagcacacgtcagttttccttgctcaagagtttgattttacgaccgactgtcgccgctgtacaaccgttgtatctctcagagcatactctcgcactctcgcactctatactc

SEQ ID NO: 227 - DNA, 4624 bp, Xanthophyllomyces dendrorhous
cactctatactctttgtagtcaaattatgcatatatgtgatcttctttattttgtttggcaaaactcataattgcagacgagaaatcgtgacgccagataagataaagaatgaaaagaagacccgagacctctgctgttttataacccacaacgatcatcaaccctcaactctcagcacattgtatatctacaattacatcaatatctacataatcgaaggaaaagaagtgttcaaaagcacaacgagtcggctgtactaaaagggaagaaaaaaggatggctactcagttcatgacatctagtctagcaggtttcggactggtttgttctcctccctctcttcttcttcctttgtgtttgaaccgacttgaagctcactcgatatcattgtctcatcttcatggtgtctataaattggaatcgaaactctgggctctacggattcgggggagaaacaggtcgcgatggcttattattcaatctcaagtgaaatgcggaaagaggcagaatcaatatctttctcgttcgttctgatctgtccttccgtctactttctgttctcatcttctgtccttctcttggagtttgctgtgctgaatcctggctcgattcgtgtcctggtgtgtcttcctctttgttcctggttattcggtcttggggcttgtttggaaaagacttgcccagacctcacatttgatcaacaacccccctactccatcgtctatcctcctgaatacaacgatccctgcttcggagagatatgacctcttaccactaagtgcgcatatcaaagctcgctggaacgaggatttggagagtttggttaagggtttgattaaggggttctaaaaggaagaagagtaaggcgtattttttcttgggggagggggtttcgatgggtggaaagtaaaacgatctcctttcctcatcttgatctgtttctctctgccgaaggtggaacgatagtgaatcgcagaaagaaacaaaaagtacactcaaagttgcacatatcacgtcgaaaaaatctgatggttcttcccgccatatcggagctacgtcttgtgaggtttcgtcgttcaacacgaatcgagtcaaactgagacaacgcaagaaagatagaaaagaatctgtcgagtcgttgtctgctttgtggtaaagcaaataaggaccagaagggtagcatcatgttcgggttattctacgcctgatctctatttgctaaatgatccagcagccggtcccgttcatcttgttggtcgattagattgaagcaacccagaacttttctaaaagctcgagattcggggaaggaacacaaaaaagagcatagatacaagaagcatgagattgatcaacaacgtgaagaagagacaaagagaagctaaggaaagattgggctacagaaacggagaaaaatagagacaggcaaacggcaagatcgaacactggagaaaacgtcttcaagcaggcgcaaactccgtgctgttttcaccatccatcagatgcgttcaagtcagaatcctctcttgttactaggttctcgtataccaggacttagtcaaggaagaaagaacgcactggtgagggcctttgacgggatcaggcgcattctctgatttcagatcgtactgatgatgaccaaagtagtccatctactcgaagaaaaagaattgaacattgaatgaactctatccaactagacaaagaagatgaggagtactgacctgcatctcttgaaagttggtgggtagttctttaccaccacattgtttcaaccaatccagcgtcaccgccagcgcaggagcgactgatagaagacgcaaagaagaagcgaaggaggagtgatcatggtgagtacctctccacacataagcaacccatccgagcaatgatagatgacgaaccagcatcggtctccaaagctaccctacagacgttcttgagaccgtcataagttcctgaaagttcgtgggcgatctcggggatgaacagcgtgtttttgcattgaggatctttggcgagtaacggttggagaagatcagcgatccctcctgatcgaacgatacaccctgctcgccagattgcaagacacgtctctagcgagacgccccatttcttattattttcacgcacaaacgatagaaggagtcagatgaaacgattcttttctgcacagctcaaaacaaagaaaatgacaaacctcctcgtcagaagctttggtgataatgcccaagccttgcacaaacgctcccaagataccggcatatgtcgccttcctgcagtcctccacaaaggcagggacatctttgacaaacggctgatcagtctttggctgaggaactttcaagttttcgagaactctgtctctttctcctcttcgcgcagagatgactcgaagacaatgagaagctgccatggcaggcgctgcgaaatgccgggttgccatttcctttttgcccatgaaacaaaagaatgcgaaacgttattgagtacacccgaagatgcaaacggaaggaagtaattcaaacaagagaacagcacaaacagcgacgctccacgttccagtcccttcagtgttatcgacgtcttggacgaccttgtcggcaatgtcctctacgacaccctttttgttgaaaattccatctccttttttgaaccgaagcgacttgtatccaatctcgatcaagtaattgtccctatatcgttattgatattcaatcagtgaactagatgacttgggttcgatcaatggaaaaataaactgacgaaagacgtccctcggcattccaagactcgaaaatatcggcaatctcatcattactgaggccggcttgatgtcgaagcaacgaccagatctcacatagaatcgaaagttgggcgtgttctaaacagatttttccgcgcgcgtggggtcagtctcgagaagaatcgggcaatgcgctcatgaaaaaaagaaggaagcacacctattccattatggatctacataataaagtcgccaaacactaccagcacgtcagatcgagatacaccataccagaaagaagctcacagcatcaggacgtaccatcttgacataatttccagagccgcccgggccgagataagcaacacagggctttccatctttgtccttcgcagcccatttggcgagtagatgttccaccttatcatacgcttccttgtctccaccggcggacatcgaaggacctctccttgccgcttggtctatgaaggggtttgccaacaggagacacacgtaagcaacaggtttcgggttgaaagcatgaagaaaagaacttacagccaccactgactccgcaaccaatgtagtgaatacccttctcggccgcttcccctaatcgtctgttcgtatcttcgtaccattcgtttccacagtcaatgatgatatcacctttatccatctttggtaggaggtcggataggacgtcgtccactggtttaccgtggggaagagaaaacacgatgatccgtggttcgttgggcttaaacgccttcaagagcttctctactcacaaacgaacacccaaacgcattagaaactccagagataaatgtcattcgagactttcttcggagaccaaaaagtaagcttgacttgaggagcgtacgaaccggcagaggaaaacccatgaacatgttccgcagggacgtcatcctcatctctcgctcgcttcagaagcgcttcagcttgttctttatcgtaatcaaagaatcctactacgctctagaagagtctcaaaagacgtagaacaatcgcggcaaacggtcatcagtctgtgcaagcacatatccagcgtaaagatcgaacaaacagaggacagcgaaaagaaggagaagagagaaggaagaacaacagagagaccaatcatacgtttgatgaagcaggagaagagaacaacaaggtcattcctccacccatagaaccacctccaataattcctacttctacatctttgatctgttcgttgtcgtaatctgccattgtaatgtgatcaatatatctatcgtgtgtccggatgagcaaagaagagaggatgtgagagagtgaggtgatagaagactgagacaaatcggagaagatgagagaagtacgtatgctatatatgatcactccgatgtatgctgatggaacagtcggcaggtataatgtgattgcggcatatacgaatctcgttgtggcaaaaacatgacgtcagcttgcccgcacgtgttggcacagacacatccatagtatacgatattaatgtctagactgagaacgacagaacccggcaacaaagatggcaagagaacaaaacagaagagcaagcaaagatggaaggagatggtatctagaagagaagagatataagacagaaaggcttgtagaggacagaaagaacacctatggctgggcgaccgtgaacacgggagacaaccaagattctggaatcacacaagagccgaagaagctcggtcagtttgttttcccttgtcgttagagatataacaaggacataccataatcttcattcttagtggcatccccgaagaacttgagagctcggacgagaatcttgtatgaaccgttagggactttgttctttttttttttttttt

SEQ ID NO: 228 - DNA, 21960 bp, Xanthophyllomyces dendrorhous
tttttttttttttttttgcaatcgaaagttcagtttcaagcgagcgcgagcgttgagtgcgatgtttcccttttgatcaaccaagagcgatgatgactaacaatatttctggatgaatcaacccaagtgaatccgttagagtcagacgtgagatcgagtagataatctatgaggaagcggggaatgccaaaacacagcgaaggaagggtaagtcagagacggaataaaatagaaagggtatcatccgaagaaagacgtacatccttcgtagttctccgtagagtcagggatatttcgataattataagtgtactaaatcatttcacgcaaagagaaggggagtgaaataagagacggttccattcttctgactgttcgaccccttcatccacgctcatatctgcatatgaaagaatgtacttggatcaagctgccaagagattctggcgcaacgggtacggtcacaccatagcttaattcaccctcactccgtcgattgattgatgaagtgaaattcgtgtcggctgcgacaaggtctacgaccaggctaggtgttccaccgagaagtcttttcatttatttaaaattcattcaagaaaacgacatcggtcaggcctgaatgttgcctggctggttttaagcgacgccgaagaaaactcaccgaacggccaaaaggggaacgtctgtttcgcacgaggcatgaaaagaagaggaagacggaatgtttatgatcaaaaactctgttcaatgcagaatagcaaaactgcagctcttaacaaggaacggaccgttcccgacaaaggtgtaagcagggtggtcctctgtatgaacgctaccgtctttatcaaatacgacaggcaaggaaacattgaagtagaaatccgaaatgttttttattgtttttattaaacccagaggtccggaagaaaatgaaaagacttcatgtcagattggtagactgaagggcgatcagaacacaaatacgaaacaaaatggacttgcgtatctaagatggggtaatcattgtacatcgcaccggcgactcctgcgtatagaatctggagggtttggtcgtctgattgtacccgaatgtagccctattattttgattcgtatccaagaatgtcagcgagacacagaaaactccgaagaaagagcatacatgaactggagagaacacccacagaatagattggaacgctcttcccattcagaaccggagcttcgaatccaacagtgacttgaccggcctcaccggccttgatagtgatggactgaacgttaaaccagacagttgccccatcgttggtgacaggtacatcgaggttaggttgactatcaccctgtttagcgccattcaaaagagaatccagcaaaaagaagatagggtcagaaaaggagtaaacaacgcccgcgcgggtgtgtatatgcgcgagtctatctgagtatccttgaaacatgacatacatcagtgaaagtataaacggtctgagcaggaacatgcgagatttgataagtcaccgcgtttggtcccttattagtgatcgtgaaatttgcgttcgtgatcggtcggtcggtatcgttcaacgcgaactctgagacggagagaacggtctggtagtgaacggcggcgtaggcgtcgatcaagcctccgccttgttgaacgacggtgtgaatctcggtggtgtccagactcgagggaagtggtctggcgtgcgtctcaaaaatcgatttaatcgtctttggtttagaccgaccatttttactgatgaacaaagctgccacgccagagactgcaacaaagataggtaaaaggtggggatgagattcgaggcacctgctttacgaggagaaagaccagggagcaaaagaccaatcgatataaaactaactgtaaggagtagacatcgaggttccactaccaacggtatagcctcccaaagcaagcggataggtcgagaggatcttcccaccaggcgcgcctacagaaggtttgacgtacagatcattcgtcaacccgtaggcttacgagcgaccaaaaagatgggaatgaaccaagatagaatccggtttagactgaacccaaaacaatcgaaaaggagcgaacgtgctcgacggaaacgcactggtaaagtaagagaccaagccaccggtcaaatcgtttgggaactcaacgtaaccctcggggaaagagattttgattgtcggatcgttcacatacgcagcgacgatagccagcccgtcggccatcgcaatggccgcaccggtgtagttgactgttggaattccggtaagccgggtgatcggtgattcatcattgttgtagatcaacatgatggatcctcctgcctcttgaacattctcggctttgacagcgtacgtgcatgaaccccgtttgataacagctactttgccagtgagagatgtgttaaaaggataacagccgtcgtcgatgatagaagtatcggtgttcgagataaagagtggggaactgatcgtcggatcaactttaaccgagccgactagagaaatggatgggtatctctcgggagaaatcagctcagccgatttagaaggagtgacgatgctgtatattgcagacacataggctctgtcaactcgccgggttcctcttaagacgaaggcgagagaacactgaggaagatcagactcaacttgtcaaacgaggcgacagagatcacatcgattccagacgaaggagccgacgagcttatgaaagagagccaaaagcgaagcggatcagaattcaagtctttgatgatatgagatggaaagaagaagctcactagaacagaccctcggtaccgtcgtttccagcggcaatactcatcacgattccacgctttgcgatcctggcggccaacacagattcaggatcggtcgtccaaccggcaggacctcccaacgacatttgaatgatatcagatttctgttgaaagagattcggagattatcactcagtcgatcgatacaatagtcacttttgcgctcaatgggcaacccagacaaacctcctcggcagctcggatcatagcggccatgacaacatcacttttttgaataaagaaaaagaagacgatcgtggagagatagaacagaaagtcagcataaaacccaacaacatatacccactcagacagacacaaacgaacttttgagaacctccttcgcatccgaatactctgtagatccttaacgttgcttcaggcgcaacaccggtgctgaagagcgcacaatggagaataagtgaaccgtcccactgacaagcgacttatgaaaacagaaggttcaagaaagagtggatcccacaagtttaacgggtttgcattggctccaatgattccagccacttttgaatgaagagaaaaacgaggcgtttcacgcgttaggaacaagctcaagaataatcacgaatagcaagcttgaatgtaccatgggttccgtgaccgccacagtccatcggatcgtttccggacacaggctcatttctgcagtgaaaaattgatggtcaggaccgataccgaccatgaaacaagtcgaccgtgttaagaagggaagaaaaaactgacgatccatcataatcatctccgacctgaacaaagaaaagttcagaggtaaatcgtagaacaagagacacgataaaccgtcagcagtagctcgacactcacgaaatcaaagcctccctctactttgcaacctggtccgaaacaaccaccgagcgcaggatgattataatcgatgcctgagtcgatttctgcgattacaacgcccttgccaaggataccttcagcatgaagcctatctaccccagtcatcatatgggttgagctagaacaatgtacatgaaatatagaggtttcatttgacttattcaggatccgacagatcgtgaggcacaagaggggaaaaaaggtaatagacgaggtcttactaagagtctgtcgcgggctgtccgtcgagatttcggcgcgttccactgaggacatcattctgtccttggaacaatctcggtctggggaccttccgaactctataagcattgatgactccagggaatgatttgatgatcgcttcgttctaagcaaacagagtgagaagaggcaatagatatgagctgatagaataagacgaggagactaagcattggataagaaagagagaccgcacggcatcgtcgacgttgatggaagctccgacaaagaggtcggtggtatcataggtgtgaacgacatcataaggaatcccggatttcctcatgttttctcgaaagtgatcatgcgggttctgaaggtagggaaacgggatatcttgggtgagcggacaaagagaagaccgaagagaagacaagacgagtagtacacgcacaactgttcgttttctggtcttgggagcaaactcaacgatccacttgtgaggcacgtagccatccttcgaaggcgacaaacggatgatgacaataaaccagcaaccgagggtgagcacaagagtcagacgtataaagaagagagaatgaacaaaccgtgacagctttgtgtaaaagctgagagctatctacaaccttggccgagacaacggagagcgcacctgagaggaccagggctgcgagggtataaaggttcttcatgagaaaaactagacaatgcgaggagaaaaacggccgagagagaagaccagcgagcttaaaaagggagggaagtcccaagcatggagagcccataggaaaaaagaaagaaagaaaaattaagcagagaatcaggtagcagacggtctatcattgaaccccatgaaagggctgcaacgtgagtgtggggaaagcaaaaatgagccatgggatgtgtgccgatgtgggtgtaagcatgccacgctgagtatcatgttgagtgtgcgtccaacagaaagtacactatagagcgcttgtgctgtgttcccaattggcttccctctggtcagtgttctctcctttgcaatctttctcgcccggatcaacatcgtcaaagggagctgatgaaataaaagtgtgggtgtgagtttgaaatctgagtacaaatgtgggtgaacggtatacgagggtgtgtttatccgggaatgtctgtatgttctgtatgttctgtatgttctgtatgttctgtatgttctgtatgttctgtatgttctgtatggatgctgtatccgctgtgcgagtgctcgtttcagatcatcctcctcccatcagaaatgccgagagaatttgagagatagatacattgtgagggacacacctcgtggatagcttgcccatcaacagacgctaagagggaacagaacatgtgctgccattagatcgtctatctgcccttcgctcattagtatcctccttgtccattcccacatgggctgcccttggatttgggttttggctacacatccgctcacactttgtactcgtctgatcatcggttggagttctgtctctttcctttctttgtgctatctaccatacagtgtacggaggaaagcccttctgatagcatgtttccgtctttcatactcttcttcatgcactctctcgctgagcattaatatcttgatcacattcatatctcatacggagatctcacatctatcgagggttccactaaagtacatacacatatatgtttgtttgtccctccgtctcttcagagctgacctaacgcagcaagcgtcttgagatcgggcacaacacccttttctataaagtagtcaacaatcggccggttcttgaacttgaccgctaccgagactgtatccgtccgagcgagtttgacaaggagtggtcgtattcaaagaattgtgatctgtccgtcagcctggtgctcacgtagagatagacaagagaagcacaagaacacttacgcatcttgctcgtcactttcgtcctgtcctctgtccgcctccgtttagcgtttcccccgtcccgacctctggccgagtctcccccggactgacactcgatcaacatcttgaccagcccaagatccttcttccccaccgcgagctggacggcatacccatcgttcaggcctggactcgctcctctagctagtagtagctccgtcagcggaagagaaaccggatggttcgtgatcgaggcgcatagagggtaacccttatgggaggatggtgaaggggagtaggtctcgaacaggtagttcagaaacggaagtaatgtcggaggaagaacccgacgggtcggagtgagcaaatttcgaaacaaccgcttcggcagttctaccagttcgagaggaggtggtgcaggtggtgacgacaaggtgggtcgaacgacatcgattgccgacgactgcgacgatgacgacgacgacgatagtgaccaaattcgttcaatcgcacgcacgacatcgagagtgcatatcggatgtcggagacaacgaccgagtagatccctcgatgaggctgttgggtgaaatgctatcaaccaccgggcagcaaacgaagaaggtggatgggacaacatgtcgtgcagccttcgattcgtaagcgcaagtgacgggttgagcgcatacagaaagatttcgagcagcagctgaaagggggaggacacaatactgagcttttgattgatagaatgacatgtaaagataaatgttctcacctcctcgggaagatcgtcaagtcctgcaagagtggtattgccggtgttgctgatgatagagcatgaggatggcatggtccgctgaaagaacctggaaattcctctcaaagcgcctcaaaaaaggaaaggaaaaaaaaaaccaaaagaccaggttccctcctcctccctcagtaaaagacctagagaacaaaggtctcccaagagactgtgcgtatgtgagtgtacgatgtatctgtgtcgtgtgtcggtgttgctccaacgttcaatggaggtcgaaagaaaaaaagaaaagaaaaagaaattacatccaaacaatttcaatctttccttcaatcgtcctcacatccacatcgcttggtgagctttctcgtcctctctcatccccaggcttaccgtgtggagatcgcttgatgaagaagcaaaccagcacaaatccctttcctgtcccgtgatgtcttcctttctctacttcaagagaccggaaggtgtcttgtggatgggccgagggaaatgtcttgaacacttgcccgacccgctctttctttcgtctagaagatgagaatgggatgggatgggatgcagaataaatcagatactcctgagagagatccttacacgggagcctgcgtcgttcatgtgtcttcctacgtgcttcgctcaatctgtctcttcgtgtggacagagatctcgaccgagttgctgattccgtttggttctgttcttggtccggatgaacgaacatagtcgacaactcttactcgaccgaaaccttctgggactatggccgaccctcgatacccaccgccaaatagaggcagcaataacggcaacaactatcgtttgcctcctccaggctatatgcctcctggacctcaacaaccgcaaccatcgtacggatcacaacaggcgttctctgggtacaacacccctccgaccagctactctactcctcccccttcttcgtcgtcttctattgctgctccacaaagaaatggcttccctgatcctcaacaatatccatcaaacaaatatccacctcctccgtctgcccaaacatctccggcgtatcctccaacgtacaaccaacctccttacgccccattccaatcgcaacaagcacaacagcagcagcagcagcagcagcagcaacaaccacccccatcaatacaaccggcttcactcgcccaaccttcagctcaaccgtttgatcctcgccgtgctcgacaagtctcggccgcacaaggatccaatcagaacgttcaacccgggactggtacgccgcctgctggaggaggaccgatgagagtggatcccagaatagctagagctcaagctgctagcggtccaagtggaacaccgacatccacaccaccacctccttctgtctctgcctctgcctctgcatctatctcggcacctcttcagcaagtagcacaatcttctcaacaggtgccggccgtcaacacggaggctgggcctgctcttccaaagagcccgtcttcaaagttactgttttgtgttgtatgcgcgtccaataatgtgggttcttctttatcgtcatctcagagctttttatacgcggcaagtccggcgtactgattttcgagtgttgtttcctctccaattcatccctttcggcgactaaacagaaccggtcgatgtcagcccatctaacattagccactgccggtctgtccgtagtttcctctgggacgggctcggccgtaagattacctggagcagctatcgacacccccaacgtctaccaatttggaacgccctatgaggatatttaccaagatcttctgaaaaaggataaagctttgtacgtttcgactttctcgcctttgtttcttctcccttgccttcggacgcgccctcatgttgtgatctttttggtcttgtgcccttctctccttctcctgacctgtgtcgcttgtagatatacggcaaatggatgtttgaacatgattgacagaaacagaaaaatcaagcgggcaccagaaaagtggcatgatgcaaggtcgacgcccgatgtcgttgttacctgtgaagaacgttgttttgattcggtctgtgaaggtttgtcctctcgttccagatttctgttgaacgcttcgttctcgtgccacttgtgcggacgatagttttaatgtcttatgttttcttcaacgatgattgatgaatagatttgatgaatcgtggaggagacgcgtctagagcggtgcacgttatcaatgttgagatcaaagagtgcgtcctctccttctccttattcttttctctctgaagtttcttttcttttttctttttgcttctttcttttgtccatctatattcgttcaaatatacctggagaactggggtattaatatttttcttctgtctgcatctgggcataaagtaatcatgaggaagcgctcatagcgggaaaagcaatcttggaattatgtcttgctgttggtcccctccccctttctctcttcttcttttctttgtactcttcattccagtccagaaaccatgtgtctgatcacttgctcatctcgaacacatccacgtacagatcgaagcgagcaaagacccggacgaagaaatcaaagagatcatcgatcgacaacgccggactcatcctcatcagatcttacacgccgtcgctttctattgaatgtatccataccgtctctgtttcttctctcttctctcttctgtgtgctttactttcatgatatctttaaattcggagggagacattaccaagaatatgggtagaacgagtacagcttttgtggcaagctagagaatgacgccatttcccggctaattgtccacacgcgccccagagaaagaagcaaacatgatgagaacaccggaagaagcacactcacactcacaccgtcgaacgaccaacgagataccgttctgacggaaatacaacacagagggaaacaaaattagggaacatgccggattcttcgtttttgtcgttcgtttctggagctctgggttggctgtaagtctgaactcgaaggtcgtgtggaaggatactcgttctttggctgacgaatcctgttcttggtgacctgtacatcgaggacatagatacttcacagcttggtcggcctcgttctatccccaggtcattctcaactatcagcgcaagtcgtatgtcttctccttctttccttctgtttgtttttgcgcagaaaagaaaaggaagagtcaggctgaacactcttatcgtttcaattgtgggttctatccgggtgaatcagtgtggcagggttctcacccgatttctacatcggaaacccagtaggccatctgtcgttagctatattcaataccgttctcttcttttcccaaaaggcgaggggtcaatatgccgaaagacatcatggatcgattcctacggtggaaccttcggatgtcgcgttcgctctccatgtgagtttatctctttttcctctcttgcttgacctttctatgctaaaaggttgagataggcagagctgaagggagaaaaaagagtgagaagaaaataaaaaactgacgttgtgttttatcccgttcgtgaaaggcttcgactctggcggtcttcacattggcacaagcgctttactacccggcacctgcttctcaaaaactaagtatagtcaacaggattacacttcctatcataggagttgccatgcttgtactcgccatcgtcgtaggtgcgggatggacatcactagaattgttggattggctctatgggtttagttacatcaaagtatgacgcacttcttcctcttacctttcttaacgtccgttttggatcatgcgctgacatcctggttcgatccgttagctctatatcaccgtatcaaaatatgtcccacaggcgtacttgaactaccgtagacggtcgacaacaggatggagcatcggcaacgtcgttctcgacgtcatcggtgcatcgttgtcgatgatccagttggtgttggactcgtatagatatgatgacctagttggtggagtattcggaaatcctgccaaactgtgagtctcttctggatcttgaacttttccatttggagtttctcagtagcttgctttttttgtctatctaaaactgaaaactttcttcggtcaactcgctctcgcttcaacagaggtctatcattctttacattcgcattcgacggtctcttcctcctccaacactacgttctatatgtagatccttcagagaaggatttgatgaagcgagtcaacgagcgggatgtagagtctcaaactcgaccaacagaggtcgatgagaggacacctttggtttgaggatagataaatctttagacttttcttcttcttttcccttttcttcctcttgtattttacttctcgttgtcccctccttttgatctgtttccatacatgtacaacatacatatatatgtgcaacttttcctatcgccctccaagcaagtcaggattgaacagagataatcttgcgctacttcttttgcacagcttttgaacttgatcaccgttaaccatcacacacacgcacatctccctcggcatatacccaccctccctctttcagtccagaccgacagaagtctacacgtgaagcagaggcatggcaacgttcgagatagatgaagaagctttcctagctagatacagactccgaacaacatcgcctactcaatgggaagatgaagatcacggcacaggccccctggatggtccaacagaggcagaacaggattcggccgggctcagagtggtcgaactagaaggctgggccggtgagccggatccgtttgggctaagaggatctgggtgagttcgaaaggtctcttgtctgtctgatttctgtgggacgtttgcgttggtgaaccttcgtttggacgtttcccgtttcagtgggccgcacacgagaggaagcacactcttctgtgtccacaagtgtatgcgtctttctttctgacccttgaagaactcttttattttcaggaggaagaaacaagcaccgaacgaagagagatcaaaagcacttaggacactcgttcaagagaactttgacagattcgtctcggtcaaggctagtacagacggtgcgtcattgtggtctttctctcgatcttcaggaccaagtcatcaagggaacgatatgttgattcgtatggactttcggatcgtcatgaatgggatctccgctggttctctcagctgtctatcaagaaatgaaagatgctttgttgatggaaggaaacgaatatggtactaaagacatcaaaacaagtctacaaggtctgcccgtaacccatccatcttcctttctttgccttgttttgttctgtcctaattgctcgatgttatcccggcgcggacaccgacgttttagattcgtcttccatcgcggatgaaatatatctgccaatactcgaaaatacgctgagagctcaaaaactaaggtcgacgttgtcggtatttgagagatcaaagttcttcttcaacctgccaggctcgattctttcttctattgatgctgtaagtagacctggtctctccgtctgtagctcgttctatcatgtcgtctagccagtactcgcacgtatcctcagttgttctttcctttctcttcttaccagaaccgaccggaccaagcgctctcagcctacaaaaaggtgctctacatcctagagacccgacccggccagctcctaccaatctcaactaagaatgctactcaaagggatcaacagcatcggatagttgacaaggtgtggtctcaagtagaggcgatcatcgggcggttgagaaatgatctgttggcgctcttgaaggatggctcaagggggtgggaggatcaagaaaagactatcgagtacgttgaggctgattcttttttctcttcttttctatcctctggttccaaccaagttggttgtcgagagcaaaccttctgaccggcgctcattttctctttctgggtgggcaggattctactggagttggatgcaacggacgaaccgttatggacgtattttgattctcaacacaaccatgtccttggccaacttcaaaatgctcacgatgagtttgcagaacgcgtcaacagtatgtctgggttcacgtgtaccgttcttgttgaaagaaaatctcgtaatcttggcttgtttcttccgtttgtcgtcgaacggactttcttttattctaggtctgcgcacttctacggaccaggcgttccccaaaggagaggaggccttagagaaaagacgagcgctgaatttacagagatgtgtgttgtctctgagtttgatgaaggagcctgaaaaagttctaggttcgactttgcttgttcatcgatggcacaaatattccaactgactctctctaaccacttggacatttattttttattttttattttttattttttattttttattgactgttttcagaaaacggagatggccatgaagtatggaaggcaatgctcgatctagtcaagaacctgtcggatgtccttttacattctctaccaaatttctggaggatagccaaacatttcctagatggaaagtacgccgccaaggtgagtcgggtgtgcttctgaaagattctcttaaacaggaacgcctcagagactaacaaagagatttacacatagacaaagaatgctaccccttctcgaacacctgtatcccctatctctgccaatcgacctccgactcaatgccgaaagatggcagtagacatcatcaaactatacatctctcttcttgcttcattcttcagcttcacaccctcagtatccaacaatcatgagctcccaccgtttgtgcctacacaatcgacatcactcacctcggctgtatatgctaataggatcttgtcggagattacagaatgtgtaaatgacatcaatgccggggagatctcatcagaggcgagagatcagctcaagaatcttttggaacatgctcggggaaaatttatagaagtaatctgtgaaggatggagaaaaggtcagtcgatggcttattccttgtatagggacgaagggaaaggacaaaggtatctgaacgacccttgtgcttcttcatagattccgaaatgatatattctctcgaagattggattccaaatccagacgttccatctacgacaatgtacctctctcgaatcgctgatttccaaaactacaattcaaacgcggcgttcaaagcagcgactggattggaaaagacatcggaaactcgatctgtatgtttttggctcgctggccttttgatcgtccacgctgtttctttgttttcatatgtgtatatactgaagatgcgtgtgtctgctaatctaccgcttgacaggtaatcatccccccgttgttcgtagctagaatcaaaaattcatttttcgactcgctctatttcttgttggacggtatggtccgattatccttccaggattacatcccgcttcaagacccggctacacagaagatgatggtttcggtgggaatggcaggcatgtcgagcatgcccgatgttaccaagattgtaagcgaccttcctgtattactatcatcatgttagattgtcgttttttttcgttttttttttctcaaaaagaattctcgttaatcgacaagtcgctaatcattttcatcgaaccggggatggtaacaggaaacgagaacattgttgacgatcagcaatttcggccatctcaaagcaaaactcctacctcagttaataaagcagtttgagacttcatatggtatcgtcaccaaagaggaccaaaaagtacgtttcttctataggaatagatcatccgagtttagaccatcatgaacatggacgttgacgccaaatttggttggatgaacgtagacactagcagaagtagaagatcaactagacaaaatcttgttcgatgattatgttcgtcgaaaagtggtggtcctacgagaaatcatcagacgtggtatcctcttcagcgggattgattggtacagagcgtccaaaccgacaggttcgttgcgtatcatcgttattatctctgttggctgcctcgagatcatttctcctttcaactgacggtcctctccctttctcttcttggcaccgctttgttcttctccttgacacagaaattggctcgtacatgtatgaagcccttgtcttcatggtcgaagttcacgctcagatcagtgcggtatcgaagcctttgttacatcgaagcctgagcagtttactagaagaaatggcgaaagtcgcactcgaatctttccgacaagtaaaacgattcggaatgggaggaatgctcagtgtaagatgactcttgccgcgttctcttccctcagatcaaaccacacaaagaaatcaccttgggctgacagacatttgttttctctctccatcttctttctctcaaggctacactatctatcgaattcatgcatcagaccttagtcgcacacgtaacgcctgtagcttcagccatccttaccgaagtctacgctgtgatttccaaagcttatagccggccggtgtcagaatcaggtgacgaacttcaaaaggaattggatgccgtcaaaaagactctgtataattccagaaaggcgacgtcggtagagttcatgtgtttgcgaaaagaatcgactctatcggcttcttcttctgcttcttcggcggcgacagggggatccggcatgggcaaggtgacgcaggttggagaacacagtgggtcgtccaccggggggctgactcgaccagaaggacttcgtagagacagtaaagagtagggcgaggagggaataaaatgatgtaatatatcgtttatgactttgacgacttgtactcttgcctgtttttttttctttttttcttttttcttttttctttttaattgcttcgaacctttagagaaacaaagatgagtcaccgcgagaagagaagagaagaaaagatatcgatcgtcacgaattcaaacttttcatgtttcaattatgctatacaaacacaaaaccctcccccaaaactaaaggggaaagagtcctactcctccatatcgacagcgctctccgacgcttcctctgttgtcggcacaggctcagcttccttggtagcatctccttcctcttcatcatcgttatcatcgtcatcgtcgtcgtcgtctgaatcgtccgagtcgtcgaatagactttttccgccagctgctgcggcctgagcttgtttccaggcatgagccatttgaaggaccctgttttaagtttaaagataacgattccaggagaatgatcagataaatagggtcgatgataggtaggattatggttgcgagagcgataagaatattttctttgaaaaaatcagagggacatacttgaagctggctgggttggcttcccgctcgtcgtcggggaagatcatgtcccagtctgtttcaacgagaaacaaggcggaatatgtaaaaggaggctcagtcaaaaaggaacgaaacagtcagaaggagaaaaatgacagaagaagggaacatacactcctccaaggcaccgttggcctcctcgagcttcttccattttttgacgacccgaggcatcttctcttccactgctttcagttcctctggtgttccgtggaacttttcgaattctttccaggcttccaacaaaacgacccgctattgatgcacgcgaaagagcgaaagggagacaaacagaaaagaccggatgtttaatgtaagtcatttagcagacgatcaaaaggatgcacaggtgagacaacaaaaatgcgaacctcttccttgaatcctcggtttctcagatcagtgtaacctctatccaacacctttcgggcaagctccggatcacctccttcgtcttcgagcggttctccatcctcatccgtcatcgcttgaacctcgaacaacgcgtacgcgatccagacctatttaaaaccataagagtagagggatgtgttcaatcaggaattgcacctggtaaagtaaaaattactcaagaagattttcacttaccttgacgtgaccggtcttctcgagcaaggcttcgtagagcattcgagttcgctctcgttcaccctgctcaaactcgaaatcgatccaagcctagaacaacggacagacagagagaccttcaatcacacaatttatagtaaaaagatggcaagaaaaggctcgatagaatgacagacagaccttccaaaggacctcgggcatgtcaagctcttgagttgttccgagatcgaacagatacctcgctcggtcaagatctccgagctcagcctcaaactgagcccatcggacccaggcaccggtgttcgaagggtcgaactcgagatacttcatatagatagttcggacatcgtcgaactcgtaaagctgtagaaattgagtaagagagattagtgtagttccatgagagagcagacaaccaggattggcactaggcaagacaaacggaaagaagatgactatggatgaaaaggcaaaccaacctttgtacggaattcgatgtagaccttgaacaacttctccttggggcacattccaatggctgttcccagcaacttcttcgctgcttgtacatccttctgtcggagctcgaagtaagcgaactgaatccagagctatcgcacagacattttgaatcgaaataacaagaaaggaaagaaataagatgaggtaagtggatcgacagaaagaagacaaggtgtgagagtcatgagtagaacaaaccttagcgaaggtgaaagttcggtgaggaataagttgaagagcggctttgtagacttgtcgggctcgttcgtaatcctatcagagagtgcgcgtagaaaaaaaaggtcagaatgcggagcggatttgatgaagcctcattcacggaaagagacgaaccttgctctcgacttcctcgaacgcagcatagaacaaccataaaaacacgtatcgcctccaatgtctcttctcatttccaggtggcacctgagcgaccgcgcgctcatacacatctcttacctttgccggacttaattcctcggccgaagtggtctgaccatcttccctagcggacctgtaagcatcctcttccagtctggcatacgaaatccaagcatcctgttgttcaaaggagcggagcgggatgagaagaaaagcagaggaacagagaattattgactttggtatatgatattcaacgtcaaacctcagcagaaggaggtaagaggatccactaacgtagttgttcgcgtcatgcgaaagctcttcctcatactgaattcgtctcttgcccagaacagtgctctccaccccagcccgtgtaccgtgctgtttctcaaacttcgtgaaagccgcgtagagagtttgggattttgatcgaggaagtctcgagagggcaaactgtcatgagaaaacgaaagaaggcgataaatgccttgtttacttggagagcgaagagaagaaaacgacaaggtagaaaaggttctcaagagaacacgtaccttgtagatgactctagctcggtcaaactccttcaatcgagtctccatcctggcgaatgcggcaaacacagattgagccttctcaacttcctcctcagagtctccaaagaactccaaagccgtctggaagacctctctggctttctctgtgaatgtttggacaaaccgagagaaacaaccagacgaacacacgcacagtaggcctgtcagtcgtccaaaggcttcgcatattcgaaacccgaagagaaagatgcgcagaggagaagagtacgaaccaatttttcctcgatcttcctcgaatcgactccatacaatccagttctttggctcgggcctgaccccaatccatctctcgtaaatgccggaagccctgtcgaactcgttgtatcgcaactcaagcttcacgtaactaccccatgctctgtcatctggctcccatttcatccatcgctcaaagatcgttcgcgctcctgcgatgttccccaaaagctcctctagatgaatgaacttgagccaaagagagtccactcggggaaggagagtgaccgctcggtcgtacaagtttcgggcatgggcgatgtttcgggctttcagttcctaattggatgacgttccgttgagcaaggtgattgcaacagtatgtggttttagctaaacatgaaccggaacgtgaagggaagaggaatcgacgctcacggtttcacagtagtgggaccataattggatgtccgagggatccacatccaaagctcgctcgaacaccgatcgagctctatcacaacaaatcattgttcgacgcgtgtcccacaccatacggagacggaaaccagatcgcatggcgattgagaggaagatgcaagcagttcgccatgagataatgctttatgaatggccctctctacctgatgaagcacttaccggtcatattctccctgactagcctcccaagtggcgtatcgtctccattcgtgaatctgttacatgtacatgccagaacaacagcaattgatcagatttgtgtcgaagcagttacaatcgaagaaagattgagaacgtacgctggatctggaataacgaattcgattctcatactcttgcctctttcgtcctcggtactcattcagttcctcgagatcctcaaccttttgcttgggtacgattgttccactctcctgtcgctcttgagcctaaggccaggttgtatggttgagtagagtttgtgagaagcagacgcgtcgggaaagtcgagtttttcgaaaggaacgttttgatcagacgaaaatgttttcaagaccagaagagaacaagacggaaccaagctagacgaacctctcgtaaaagctgctcagctgtgatctgttgggaagaacgtgaggatatgaaacatgtgatataatgaggatcaagagttatgccactgagaacgaaagcaagagaaaaaagtaggatcgacacaagagatggaaagcagtcggttgactgcaccgtctcttccggccaacgaacccagctaagacgaaagcgaaaccaagagacgaaagacacacctgaacagcggcgggcgctctgttcttgaccctgggagccctatcgccttgacgggtggacatgatgaaggagaagaacgaggatgggaaacggaatgggtgtatgcggtggtagttaggatgggaaaacggttccaaatcggaaactacaaaaagactacaagacgaatacaaaaatttcctaatggatttccatccatacacagtctccatctcgattgactttcaccttctatccatcctgaccatcaaccgagctcattttagattggcatcattcatctaggcaatgttcaagacagttgctgtgccctctgctgtgagtagaatggtgtggtcgatatgcctgtgcactcgttccatctgcgttcttactcgtttcttgttgcatatatacctcccctgaaatagaccgctatcaaacgaatcaacaaagaggttcgtccggtggtatctctcttgatcatggcttgctacggttgactgaccatattcttgtcaaggcagatctccgctctctccaaggaaaccgatctcggaggaatcgtcctccagcccagcgatcaggatatcactaggtggacgtgtgttctccctggacctatagttagttgcccgatctatccagcgtcattccagaaacggcctactaacttccttgtccttcgggacgatgccacgtacaaacaaggggtcagtgtacgaaggtggacagttccatgtgtccgttcagcttcctccggactatccattcagtgcgccgaaactacagttcttgacaaaggtatcaagctcttcttccctcttccaaatcgatttgactacgaagactgaacccaatgattttggcgcgctcctttgttttgctgcctatagatatagtaaggaccgaccatctccttttctttcttatttgtctatctgttcgaggcctgctcacctttccttctctttatctgtcctccctgtgtggttctgaatggaactttcagtcactgtaatatcgcagagtacgtcccatacgacataagcgttaccctgtccttctgctcgcgtggactgaagcccacatctttctgtacgctcaataactaggtccggcgcgatttgcctcgatatactgaaaaacaactggagtccggctttgtcactgttgaaagtgatactctcactgtcttcgctcttgacggatccgaatcctcgttcgtccacatgttttgagcttgtttgttgtgtatgatagaaaagactgatgatgcgctccgtctcttattgtacctcttctgtgcgtgcgggggatggacagttgatccgttggtaccctcgatagcccaagcctatcaagtcaaccgaacacaacacgacaccacggctagagaatgggtcaaactgtttgtctcgttatatacgtatatatctggtttcatatgcatcatcgtatccgttctaacctggcggagtcctgctcttttcctctatcttcaagatatgcacaaaagagacagagtacacccagcgcaccgtctgccagcccgctggagcttgcatcctcagtctccctcccgaaccgacttgctcgatcggctcggcttccaggtctatggccctaccgttcgtcctccaccgcgtcttcttcctccccgacagaccttacgaccagatcgggtccgacgacgatcgctccaacagaaaccgtgctcgccagaaggaaacgtccgtccttccctagcgcgggaaccggaacgggcgagggtgcgccatcaggttcagaacaaggagcggtcatcaacattgatgactctgacgacgaggtcgatcaatcactcgtcgctgaatccaacgtattaacaaatccatcgtcgacgacgacaacaactgcaacggcaacggcaacagcaacagcagcagcagcagcagcagcagcagcaacaacaacaacaacaacacgatcgcaaccacaaacgcagtcgcaatcaaaacaagaacaagagatagaggcagaagaaagtggaagtggaggaagaaaaaagataaggctatcggagatcgaatccaaagtcaaaggagacgatgaaccctgtccgatcccaagcgctggccctgatgcgagtccgacagaccgagccttgaacagacagatgaacgacgggtcagatatgaacactgacgacacggaagtcatcgtccttgattagagaaacgagagagacttgatattttttatttttatttaaagacgggacaggga

SEQ ID NO: 229 - DNA, 5140 bp, Xanthophyllomyces dendrorhous
acacacacacacacacacgcagaaaggcagaggcgaagaaacaaggaggacacacacaatacaatgcaggggaagagggggtgggagaaagcacacgaagagacgagaaaagagggccagaagcaaagacaacctaataagaaagaagaaagaagaaaagattgataactagacctgcctattcaagaaccaacaagaaattagaggaaagaagacgaagaacgaagaatcgaggaaacaggataggataaactagatccttttgaaccagatcaaaccaaaagagaaaaagaacagtcgagcagaataaacagagagagagagaacaaagaagaagacacgagagataggaaaaaaagcctgtccgttatacacaaagacttcgcctaaaaaggattgtccttgcctcgatactcctacaaatacaaacacggacctgcatatggtcggatactagaaaatcccaaacatatgtggcgcctggttgaccaactgtccgccttgcgcggtctgaacacctccgaaaggctggaagttcatcaacattggtggtgtaaacggatccgggacggaccacgagaacgggctcggttcagccggggccgacatcgacatcgacattccaatcgccaccccgggttcaccaccggttccaaggttgctgtttccaagagatgtgtcgaaggcgtttgtcgccgagatggcgtatgggtcgattgatcgggcaccatccgacggattctgaaccgacgctttggcctggaacgcaccggataaagagaatcgatgatgaggaaaagaattcggaggatgtccgttggcacccgttgattcgccgatgtcatcaaaagaatcgccgttgaatgttctcggtcgatcgtcgtcgtcatcatcatcgtaaccctcttcctcggctgacgaatgatcgtcactttcttttccatagctactagcgctgacgatcgaatccttccttagctggagccctgccctcggttgatcttcaccattggaattgataccggacaagacagaattgttgcctgatgatttccgtttcttttggttcccggtggctggttctttttccaaagatgcgtttttggccgcttcctctttacgttttctacgccaaattcgtcgaagttcacggaattctaataaaaaggtggatttggaggtcaaaaaagtcagaaaggaagcctttctcgtcgtgtaaaagaaataccatcactcaccagctggcgttcgcttttctccgtggctctgactgatgatatgtgtattgaggctgtacgaagagaaacaaggaagaaagaaggatatggatgatcggcaagcgaagagcgtaaccgtcagccaggcaaagacagggaaccagagaaaaggtggtacgcactggttgagcgtcccgtacgatctcccacaatcctcaaactcgcaagcgtacaatctttccacctggtcgtgtttccttctaggcctttttggttttccggtgacaagcgagatcggcctgagctccaaaggaagtggctcgaacggcttgacgatcgtgttcatcgccttgtgtttcgtcttcttcaaaccaccagtggcagctgcagcgacggaggctgatccgggttgagcgttcgattgggaacgacctcttcggcctagtccgagggttgcctttagaggtaaaccagtggaagaaacggaaggtgatgtcatcggccttcgatggccgtcgaggacagagagtgggattgaatctagtctgtggccaaatggttctagcccgtttgaagaagggaaggtaggtcggtaggcgaaagtaccgtccggtcggacaccggtaggattggtaaatgggtagcaagggaaaggatgaggggaggaggaggcgttgttgttgtcattgtcgaacggggtgacactcgatgaatgcatagttgacggtcggctgatggtcgggacaaacccgtttgtcggatgctcaatagagccaacggcatacgtatgatgaccatagtggtactaatccaagcgagtgaatgtgttctaggtgagaacgaaagaccgaaagcagggcgcatgaatgagaagaaaaaacttacgttttcggatattccatcgctcgtctgcggcctggaggtactggcctcgggatgaccgacggtagacattctgtttcccgcgtgtcctccttcgatcggccatttgtcgaaaggaccgaccgagtccttacttcttggtcggacccctccatacgggttgtatctgacagccggctgatgttgatgctggtgctggtgctgatgttgaagctggtgctgatattggtgtcgaggataagctacttgttgctgctgctgttgttgttgttgttgttgttgttgttgttgtgaatggggttgctgctgagactggagaaaggacggctgggcccgggggatatgctgtctagagtctgagccggtaagatctatcgttggagagtgacctggcggcccgttaggataggccgacgaaaactgagtgttgacattgggttgaaagctgccgttagcttcttggctagcacccatgctttgacttgaatccaagttgaacaagattgactgctgttgctgttgttgtcctggccagatattcgatgtcgccgttgttgttgtcgtcgtcgtcggctgctgctgctcctgttgctgatagaaaaactggggaggaggaccatgaaggtagcctaagcttttggacaaaaatctaggcgactgtccatcggtcagaacgggagagaatccataggatacctggttcgattctggtagactgtgcctataagcattcgggttgagcgccaactgagagacgttggcactactactattactaccaccaccaccaccggcttggtcgactccgaaatcgggatggttatcctgaccaggatttgtaggtatgtacctgatgggacctccgggcgagctatctggatgaccgctcatgacaccctgtctaggtgacggtgccaaagtctgactgctaccacttggttgactcataagcattagtgcggaagcagcaggggccgttcctggtcggggacccatgacggatgctgaagaatctgaagagagagctgacggtggtgaaaaggtggcaggagcggaaggacggccgacaggttggttagcagggtagtacgctggaagaaccgattgctgaggtggtggcagagggaacgagaaggcggactgttgatgaagttcccaggggacggcggcggaggcggcatcgtctccatcaccatcaatgttgttcatactgttgtctgcacctgtatcgatgctattggtggacgacggcagttttgggttaatcgcgatctcggtatcaaacgatgaatggaccggccggacgaatccggtggctgagtttgaatgatgaatctgtccgccggtggagggacgaccggtggtggtggtggtggcggtggcggcaggaaggctgttgcgaccgttttccgtgtggttggtagagctaaaagatgagcactgatcgtctgacggaggcatcaggccggccgacagttgttcgagggacgacggggaggggatgacgaaattcagcgaatttgccgaggtcggtagagaatcatacgcgtacggtgtgagcaacggggatggcacgttcgacgacgagaaggacggatgggagagcagcagcgggtttagctgaccatcaacagcgagttgggactctatcgaatgttgatggtgtgattgggaatgttgacgctggtgttgtgattggtagtggagctgctgttgcgacgggtatggttgttgccgttgctgctgctgctcttcctcttcctcctcctcctcctcctccggcggtttgaacaagaaaggcgagcgatcttgaaaggacatccttctcttcggtttttttttgcgttttttgtttctttgttttcggttttccgaaatgaattcaggagagggatgggaaatcccttgtgacgtaatgggtacgggcgggtaaggaacgggaatgtgggccggaaaagggagaaagtgtcggatcgctggatggaagaaactgaatgtgtgccagcggagggcgagggagagcgaaacaagactaagagagaacaggaagaggcttcaaatggatgatgagatcggaaagggaagctagagaagggagccagagaaaggagagatacccgagagagagagagagagattgtcagcacaaaactatcacacgtttagcatgacggacgaactgtggatgcctgttgggctcaatttcttgagcctaaagtgactggaatatgacgaaccgagacgatggagacaggcagacagacacagagcaggaacgagagagatgacgaaggggaataagaacaggaaggaggagaaaagaagattaaagtatatacaaggtggctgtctgatgggcagatgtagatggacggtggaggaggaagaaagtaagtgaaacggagggagaggaaaaggtaaggtgtgtgtgtgtgtacgctgtgagtgattctgccgggtgtatctcggatgtgaggtgggaaatggatctggctatctatcgaactctttctttgcttcctttgccaatttctcctcagcatgtgttacctcaccagcagaggatgaatttgcatcgtgaatgagtctgaatccgcgtgtgtgcgtgcgtgtgcgggtgcggatgtgttttgctcactttatcaatcgcttaaaaagaagaaggaaaaaagggagaggactaaagcaaaccaatcaaaatgtaaagagagcgtttgatcgtcgagcacccataaatcttttctccgtcgtcggacgaatctttccgagagcgcgaccgagtcagcgaggcggtagcgaaggagacatcagaggaacagacagtggcaagaaaggcaatgtcaaagatctacgtctctctttgcgtttttttgccgttgggtgacagagaagaagggagaaaaaaaaggataacgagcttgaaaggaggaagaaaaaaaaacgccatcaaagtgttatccgatagaccccgtacgatgtgagagtggatgtgagcgcgcactctttttcttccacttcgctgataactatgcagaaaccca

SEQ ID NO: 230 - DNA, 71623 bp, Xanthophyllomyces dendrorhous
cccttgccctcatctcttgccctcacccccatcctctatctcgtcatctcgtcctctaccatcctcaccctgaatcttgtgagattccagatggttaacggaaacgaatgcacagttcagctttcgcgctaaaaatgacatgacccgcacaggccatacttgtctgccgccctggctgatcacacatgccttccctctctcttgctctcgcgggtccctggatcgatcggctgatgacgtcatctattaccgcgggaccaaacataagggcgatctacccccttttttattttattttatttattttcgtctgtctcctcctgtctcgtcatcttggtcagtcatttaacatacggtccttgtatccgttctgtagttgtctgcttcgactagctcggcagcttcaactggctgactgctcacgtagcctcttctgtatttttcttcctctgcggattctcatgtctctcctgatattcaccgttcggtgctgcaaaaaatgtgtgacgtctgagccatcagctggttggtctcgttatccgatcagaaaatcaaaagaaacgaagaaagcgttccgaaggagattacagagacaaaaaaaagcaagggggagttctcctttttgtttttgctccttcctccctgtgattcagacaggcagatccctgccggcccccaggattcatggccctgcattctgagttgaaaagaatatagagatgatcaaatataaagaagggaaagggaaagagaaaaaaaaaaggagaaaaaaacaagattcggacatagtttggccgacatttctagagtgatcggctggaaacgttccaagagagggcaagacagtaagaagaaggagcgccggtgaatcttagtagctttaattgtttcatgcttatctcggtgcagtctcatcagcattctttcctcctttcctataggtttctttcttatttcatctttgattctttattctctttttttcccacttttcggcgcccaacgcccaatccctacataccctgccttcatttgttgttgaacctcccctcgaacaaattcgatcgagggacgctcgtcggcgttggtttctccgattggatctcgctcggacagtgatttatttttgattgttcagccctcgaacccatcagcccttgcccttcttgttatcacccttgttgccctcgcctttgctttctccccctcgctcccgctgattccgtgtgggtcttgtttagtcccgacgaggccgaaacctccacaattcacggcattaggtccactcaattggcggtcgtcatcgctttgccggtgtgtctgaacagacgttagatcctttcccggaggccgaagacgagctcgtccggccaagagcacggagaacacggagaaaatttccggcgattcttttctatcaccttctgctgcttctgctacttattcttctttggcttgcttctgccctgctctgctttgctctctgccatccctttttcgtcttactgtgttcttggcttccctcctcttttgccttcgtcttgttatcgttctcttactgccttttattttccttctgacctctacagcttcacatcaactctcacattcactctcactctcacattcactctcactctcacgtttacacactcactcattctcactcggacttgttattacccaaacatgagatcaatgaatccagtccgttctccgtcgtcacaatgagacttactaacactctcccccatcgccactctccctgtcttccttgtacttaccaagctcaatcccagaggaacagtgttaggtccggcgtctctagcggtgtcacggggatgtccgctagggtgaacccatgcaggtagggttatcgttacgtaatcaccccccaagatcatgccgtcctcgtttccctctccttcccatctcgatcttgtccggatctggaacagtggacgtcgggtttctttctcttctgaacatccacccatatctgtaacagcacaaacacacacacgctcacataccaaacatgaaagcttcaggcttgctagccttcacattccctttagtggctctcgccgctccgttccttgatccatcccagctagcattcaatattccttccgtggtccagcaagtattggcttacgggaaggaccagatcgggaatcatctggaagggcctatttacaaagctcaggacttttccctggtttgtctctcctctcgttctcacctcttatgccttgtgtacatatgcgtgtctatcttggttccttcttgtactaattctgttggaacggacggacgggcggaaaggattcttggggtctcgtcaaaggatgggtcgaacaagagggaaagatgtgtatgcattttcttcttgcttctctggtttgtctctgcttgacagccagaagctgaccagtctgtttctcttctcttccttcactctccttctgacaattcttggatcgcttcctgatcgctgtacttgctacactgactgatttcacccgtcccgctcgtcttcctactgaccacaaaagtcgagacattaacccacccttcgctcccagagtacaagctcagggtgaccgagccaaagctttgtgattcgtctgtcaagcaatactccggttacctcgacatcggaaccgacaaacacctctggttctgttcgtcatcctcttcctctccgtttgccgcacacaacccgagaccgccccggaggctgaccgcctttctccctcacagggttctttgagtctcgaaataaaccaaagaaggatcccttggttttgtggctcaatggtcagtccatccgaccatctctttgctccttcgctcactgctgaccttgctgcgaagcatcattttcttctatttcttccttgatgaccaaatctacttcataaaacaagggttcgttcaaaactcattctcttgccttttcctttccttttgtgctgacatctaatctcttatctactgaatcacttagtggacccggatgctcgagctccactggtctgttgttcgaactgggaccatgtagcattcaaaagaatggaacgatcactaacccatactcttggaccgagtaagcgcccttttcttgaatacgttctctgaatgttcacaagactgagatgttttcgttctcgctactctttctccttccttatcttttcacctctcgacctcctcaggtctgccaacgtcctcttcctcgatcagcccatcaacgtcgggttctcctactcggatagagacaaagtcagcacatcacctgctgctgccgaggatgtgtttgctttcgtgagtcttttcttctgcctttcacagatcctccgtctacctcattctttagaaactgactgggtttctcgatcagttgactatgttcatcgctcgataccaagattacaaggatcttgactttcacatttctggagaatcctacgccggaacttatctgtacgtattcttccctccctcttcttcttctccatacgcctaaccagactctactctttgtagccccaacattgcttccgtcatccatcgaaatgccaaagcactccgttcccttggtgccgaagctcctctgcctgcgctcaagttcacatccatccttatcggaaacggactgaccgatccgctcgtccaaatgggaacgggtgtgtacgattacgcatgcgagtcaaaatatgcagtgttcgacaaggattcccagcagtgcagatcaatagccgcaaaggccccaacttgtgccaagtaagtccagctcatctctctgtgttcagtcccccccttttcttctcggacttgttttctgactcgttttgaaactggtcgacaggctcattcaatcttgctacaacaccaactctcggttcacctgtggtgagttttgcaaatgacggtcttcctatccatccaaccccactcttctttctcctctcacaagctcactcttgcactctttacccccttccttgtcaactcaagttcctgctggcttgtattgctggtcttcactgtatgcagacttccagaaacttggattgaacccttacgacgtcagaaagacttgtgacaagagccctgagaaggacggcccgctttgtatgtctcacactcccgccttaccctattttacaccttccctgttacagacccgaggactgatgcttctgtcatccaaactaggctaccctcaaatgggttgggtcgagacttacttgaacgaagcagagatcaaaagacaactcggcgtgccaaaagatctcgagttcaagagttgcaacatgcaggtcaaccaggctttcatgagtcagggtgacgggatgcacaactcggctgctttgctcccagagttattggaagacgggatcagactgttgatctacgccggagagactggttcgttctttgtattttctctcttccgaaccgcctttacgagtccatcgagctgagccggttgcgtacattcattggtattctgctagatttcatgtgcaagtatgtaacgttgtgtcttttttgtatgatgtagaaaatggctttccgtatgctaacctttctgagcgtgattagctatatcggaaaccttcaatggctcgaggctcttgattctcccttcaaggtttgttctttcctcctcgtctgtacttttcgtatcgcatcaagccaatggtctgacgaaatgacgcacacacacaacaccaacgatcggcccaccaggtcgagttcaaccaagccaaactctcaccctatgttgtcatcggcggtaagaagaaaatgggctccgtcaaagtagcaggcgcacagggtttcacagctggaaacttggcgttcgtctctatcgagcaagcaggtcacatgtaagcagcccgtgtttctccttttgccttttctcgttctttcaaacaaccatcttgaatagaatcctgttctgctcgagttctctcgtttgattgattctgatgtgcatgttcctttttctcttcttcttctccttctcctccaaagggtgccgttcgaccaaccggaagtcgctctcgacttgttctccaggttcgatctaattctctttctcgtctacttttcttctttctcatcttcttaccttctgcctcctacctttcgacgtacgtacggatgataccgggatttccatggggaccaccagatggttgcacaacgtccctctcgtgctttccaagccggagtgagtctgaaagcttatcgaaagaggcgagactgaagaatttccatcctaggtatatcaagtttctctctttgtgtctatctgtctgtctctttcactctgttttcgtctatccacgctccttgcttgtcgttctattttcgtctccacatatgaatgcgtttggctttgtgagaacggatgggtgtctcttgccgacctacagggaaacaaccagatgaaggatacgaaggaacgagggaatagaaacgcatggcataagcggggggggaaggaatagatctcccccctttggaaactcgagattcgagaatagaggcataggatgtgatcataagtagacgagaaagagagaaatggagattagagagaaagtcatataaagaagcggagagagagagagaggaaagaaaagaaaagaaggcgggaagaatggagcaggatgaactagacacgataggtcggacgaaagattgaaagattgaaatattaagaacagaaaaggcgagataggacatcaacttgagggtcgttatatcaattatattgagtaaagaagaagtaagagaagagcaagagaaggagagaaaaggcaatcagaagagaatgtgatgtgcgagataacatgagagagacatgtcgatgatttaaaagaaagaaaaacgagacgaggaagagatgagaaaacggaaatgggcgaagtagaaagaaagaagaaaagacaggaaggtgtaagaaagaagagaatcgaacagcgctcattgctaaaccgagtttggtttgattgttcgtatccactaccacttctcaatttccccccacccatcggatttccaaatcccttccatccccatcagaaaccgaacgacaaaggaacacaaccggaaaacaacccccaccccgtctctctcttccagtttgtagggttaaaaaataaaaataaaaaccttagaatgaccgatgacgtttcaggcttcaactagcctgtcggcctcttgccgcgcccgcgcttgcgcctagtcctccaagactcaagccaacgggccaggattcgttcgctctccattcgtaaccgtctccagcgctggtcccgcttctggatacgactgctgccgctgcggcggagacactggcaggagaatcctcgaggagcgatggcgagattcctgtcgtcccgcctagagtcaacttgatgtgtttgtatgttcctacaaagaatctccaaaagctgttcgacaagaggatgtacagagaatctttcaggttagtaccctagatcgaaaaagagcgatcggcagacagacagtacgaaacaaaagatacaaaccaggtgacacccccactttcgtcccaaagacacaatttcccagccgcctggacttcatatacgaccagatcgacgatccaacaacatagtacgaaactagtcagcaagatgaatatcgtactgatcgctacagagatccccagtaagaactgtttcctccaccgcgccaggaagaaaggaagggaggaagaaagaagggtcaagccggccatcgagcatgtatataatttggtaagcgcgggatacaaagtgaggcaaggaaagagacatcatccgggagagcttaccttgatgaacggaggctcgtcagaaggcctgtaccaattattccaacgaggcatcgtcagaggagagagagtatctcgtccaagggtggtgtgttcgactgttagaacgaaggcaagggaaagaacagagaaagtaagagccggaacgtgagaagaacggaagatgcccgagagaagaaacgatcggcccggtccggttggggataagaatatcaccgtcgactctgggaacattcaagtgtgaaggggcaggagatctgttcctcatcagaaggccagatcttcactcacaacgattgaacagatagggaatatgcgtgtgatccacagttccaagcgctcttgatcaaattatgttgaagatatgcttgggcttggctctggcaaatcaagagtggcttcacaacctgcggaaacgtcggatgaatcaagaaccggagtatcacagtccgacgaagatcagagatcggtttgaacccgaagacaaggatagaaagtggattcgtacccaacgtcagagataggcaagcagaaaattgtttttgatagacgggaagagacctactcgacgatataggatgctcttctgagtgtgcaacttagatattactccgagcgggaaggtcttgaacgataaagtctaggaactttagccaagccgaaccctggatggtagccacagagattcgagtggactcaagactgctttagatcgacaagagcacgagccagagtgttcccagcgaatgatgtatgtgggaagaaggcaacagtcgctcggtgttggcggtgctgatgggtacatacatgtatgctgacgcggtcggcagctgtctttcgatcatgcttaggtaagccatcggctatgagcgaaactggatcgatcttctttctagccaaacatcatattgatcaagtaagtataagagagaaaacatggggagagagcgcggcaggaaaggagcaaagggatctcgaaatgtaagagagacttcaaatatatgaatctggtttataattgagccagcgcggaaggagcgagggtagacgataaaaagagtgatttattagagaagaggatgaaggatagatgagctctccgtggatcatcaaaaaaaaaaaaagatacgctctccccctgatctagtcaacacagaaaattaaacgatatctccatcccctctgaagctagcgaccgaaccctccctggtcaacgacaatggagggcagcactgagcgggtgcacaatcgccctcaggaggacatcggagaaggcaatcatccccgatggcctggtcgcttgacggaggcagggccaagttgtttgtcgtcggggtcaaagtggggaactcgggctggaaggaagaggaaccgatagattagcttcagatgcaatgatcacactcaaccaaagagggaacgaacctgaatggtggacgagtgaattccgtagttgtggagaactcgtcgaatgctatccacagtggccatatactcgttctccctgtcgaccaagacatggacagaggcgacgatcttggcctcactcaactgccagcagtgaagctaaggaaaaggggatagacagacggcgtggtcagcaagacaccaacgatatatgagcacgaaggtcaagaacaaacctcgtggacagagataacaccggaaacagcaagaatactatctcggagatcatccaaagaaaccgtgctaggggtagcctgcaagagaatgaaagacgcggatttcactgatttttggagaaaaaaaaaagggaacaggaccggtcgtcaaaccgacattctaccgccagaaccttctcgaaagacactgagtggaatgcttgctaacctagtgggatggcagagctggcaatgatacaggtgataaggaaagaaatggctggatccgactaggcaacaaagagaggcacgttttcagctgtcaagcgcctgatgaatggcagccggagaggcctgatatgataagagagaaggacatacgtagaatctccactgtcccttgcacaacatgatgatcaatccactggcaattacaccgacgttccccaatgcatcacccaacacgtgcaggaatacaccctccatgttcatgcttccaccatgtccatgaccatgagatttggaactcttgtcctgctcatcagcattcccagaagtcgagtccgagtgagagtgcgcgtggtcggtgtggtcgttctgagccaacagaggctctcgctcgtcaggaccgtgggagtgatcgtggtgcttaatgggggcggtggctccgtagcccatgtgttcggcggcggcaacaacggcagctcgactctgagccggatgtctatttcaggatgcaggtggccaaggattgacgactcagtctttgagaaatctgttttctttttctactttttaaacaaccataatgaaaagacaaaatattcgacgaaccggtaaagagactcgattgaatcagggccctcaatctcgggaagctgagggagaggaggcggcgaaggcttagaatgggagtgggagtgtccaccaccatggccgtgctcatggaagaggaaaagtccagcaatgttggaagccagcccaagggatccgacgattataacgatcatcgggtttgtcacctctgtattggaatcaccaaagaactcgacgataggtcagtatctttgtcgatacacttgaatgtttgtgatacgaatgttccgtctgtcgtgggcatgacttgatacaataatcaaaaccaacagaagaaatgacttaccagtaacctgaatcaatcgctggatgcactcaataaagattgacaaacaaagggcgagaaggagaatcccattggcgagcgcaccaaggatctctgctcgctgccaaccgtaagagtacttggccgaggaagaggttgtggcgagcttgatggcgtagagagcgacgaccagcgagatgatatcactggacaagaaaaggaaggaaacgagaaagaaaggaggagagagagacagagaaagacagattagctaatcttgcaccaggaagaggtcacataaatggtcgtacgtacttgagcatatggaaagagtcggcgataagtgcgatagatccaacggcataacctaagagtatgcgccagtaggcggacgaacagaaagacacacaaacgctactagtcagcccagaataacaatagcatactcaggcaggccagtacatgtctgttctcagctttgagggtactctaaagcagttgaacgtgagcatatgtgtcggcagaggaatccattggccagcacttggaggagacttcacaacaaaacacgcatcttccttgccatactctcaacccgtccagggaaagaccaacccaaaaagacgaaagaagcaaggcagggaagacagaaaaaatgatgatagaaaatgcctcagatgaggagcaggccggggaggagtggacggagaacgaagcaggcatgatatgaccatcgtcgactcggacgtacctccaatgatctcgatgaagaagaacgtggtgtcgatcaccagcagggtgatgattctggcctctctagaaaagcccatgacggatgcgaggatgtatatacggctgggtggtgtatgctggatgatgagtgtcgagttcttgatgggattcgatgatcgttggaaattaggaagaggatggagtggtggctgactaagcggatagtaacgtgcatatatcgttacagcttggttacggctatatgcatctgtgatgtttgtcccacccagcatgtctcttgctcgggcttcgatggaggcgaggagggacacactgaggaagatgaggagacaacacacgagacgggttgcgttctgtaggtgtagagagggagaaggagagacagagagagacagagacagagacagaggtttaggtggagtgtcaatcgttcgtttgcggatgcccatcttcctgttctactcaagaagccatgatatgaccaacgaagacctgatcattctctcagaacaccaaacgagacaaacagagaggccaccagagtgctgagagaacatcttttaataggattgaacaattatctttcatcacttcttgaccgaccgaacccatccttgtcgctagagatcaccaacacagtcatgagaacgaagaaaaaaagtcgatagtgggcgtcagtctttcgccgtgtctgctttcctctctacatagtctgcttcgatacgccctgttctcgagcagaccgcgccgagaaaaaagaaaagggagagaagaacagaacgaacctgcttgtgcttcgggtccttggaacatcgaacgacgtttcggcctttcctatcaacatcgtcatttcgattccatagaagggatggcagaatgtcgatttcatttaggcgtcagtttcgggtgtccttttccgatcattcctccagccaacaaaatatagttcacagatgaacgctttcacaagacagagaaagaaagagcgaacctcttgacgatttggcacccgtcacacaacctcttgatactcgacctcactttgatccctcttgtctgtccaaccaaagatccaaacatcggagaaccattagacaacacggttgctgacgatggtaccgatgaagatgccagagatgatcccgatgcggacggaagggcaagcgggatcgttcggcgagagaggaagagagagaacgagcgtggtttgaggaaggtcgaaggagcccggagggacgtgaggcgagggaacaacttggaaagcatggtatgagtgtatttgtcttgtcctctcttgtttatttccgttgtttctctatctatccaagagcgtgttcggatagatccaccagagagagacgttggggtttgcctttagtttggatgatggaaggagaggaccaaaagagaagtgaagaaaaaatgggaaaaggactacagaaaaacggccaaagtgattacaaggtttgaacaaattcatagtattcattaatttgcttgtaccctcaaaacctcccaacctttcgctcagaaaccaccacgaccgcattcattcgttccctcactcatcatggctactccgacaacagtcacatctagtcagcttcctgaagctgctaacacaccgtcccacacactatcagcatcgactttcaaacgacttcatccccaagcatatctcgaacgattcttcgcagagggttatcgaccggacggaaggaagctttcagactcggacgatgcctggagagatgtcaaagtcaatctaggttcgttctctttgaccttttaaccttagtgttctgtatctttcatctctttgcttgcttctgctgacgtgtgtcgaatcccggaacatctctcctgggaaactcgtacgatctacaatgttcaaacaggatcggtgtccacagctatgggtagttccctcattcgtttaggagaaaccacgattgtctgcggtgtaaaggcagagacgttcgaaccagatttgtataccccaacagacggttgtctaggtaggtattttcttgaacctttggcatctcttgcctgttgtcacaaaggccggcgagaactcacttgagtatgacttcccgcgtacaccacacggtccatacacgcagtcccgaaccttgatctgccagccttgtcatctcctaaattcaagcctgggcctccaggctcagaagctcaacttctaacagacaggctagatcgagttctctcacagttggtctttccgaaacctctttgactcttctagaggaagatgaaagaacagacaaagactgacgaatgcttgtgtcgaatatttcgcttctcagctcctcgatccttcctctctcctcgctctgcatagaaaaaggaaaatcagcttgggtactctatatcgatgcagtctgcatcaattatgatggaaacgtgtgggacgcttgtctattggctgttgtggccgctctaagaaatagtaagcgcacgatccattcgaatctatcatcagaagagagaaaataggaattcttctacttgtccctagaggcgatcgagacctgttcaagaagactaatatgaaacgtatcttccctccgatctcttcctgttcttccacccctaaaaataaaaaaagctcgattgccggtggccagatgggacgacgcaacaggaaggacaatatgctctcgaacagagacagtaccccttcagctcggaaacttcaatcctataagtagcacctttggcgtgttttcctcgtaagaccatctcgttcttctctctttatctttgtcacatcttgatagcgtgaatgccaatacatattctctgcatatatccgtatgggaatcctttgtcttctattatttctagaaaaacaatcttcccagacccgacgtcattcgaagagcctcttctcggatcaaccatcacttgcgtcctcctccagcccctttcttccagcaacaccgacgagaaaaagacgaaagcaaaggttctcttcttggaacaatccggtctaggaggtctatcggtaggcaaccaggctgtaggctcagaagccgtcttggctggggtgattgggaagtcaagaaagagagccaatgtgttgagaacattgatcgaatgagttccaatttctaggtatcctcagggacagctaacgtcgaaacccctgttagaagaacgagggccagagttgaccgtgtcggctgataaggaggcgaacaagatccaaggcataacataagcaaatgcaagcagagagacgatagacaagcgcaatccaaataaaaacacaaaagaaagatagccaagcgatatatgtgtgtagataagattgttcaagcaggagaagaagatgaacgcatgcgaagaaaggaatgtaagctgggaggtggaagaacaaaacccaggtcgaattctgaaaacggaaagaatgagaacgcagcgaacgataaggcgatggcgaaaaagaagagaggcgagtgtgtgtatcaggagtagaagaaatacaaagtagaaaaaatttgtgaaaggagtggctttgggaacaacggagatccaccaaaagtttgaactagaacgtatcaaaacatcaaaaaaaaaacacaaaaaaaaagaagaatagatcaagaaaaactcatcaagaggatgaggagaagaaaaaagatatggatattcttttgtaaatatctcaaaaatgcaaagatgagcaataccggagataacgatgaaggtgtgaggtcaagaggagaaagaagaagaaccaaaggatagagtgcacatggatgaaggtaatagatacatgaatgccgcacagaaagaaaagggaataggacgccaaagaaagactcaatgagaagattctacagcgagccaggaattgttccagtgcggttcgacccgtcatctctctcttgttccaacaaaccatgttccgcttacagcaacaaagacgacaaggcctcagacatcacatctccttcttctcccctagaagctatgagagtatcgtctccttcatcaagaacgtgaacctcagagaccttagacggcgttaataccaatttcgccctcgcccgaatattctcaatcgagtctcgtttgagctgtagtgagattcgccggacggtctccgtcggcacttccgccagcgaaattcgtttggaatgcgctgctcgtgtcgatgaccattcctcaggagattcctcggcgtctgacaaagcccgaggacgagatttaggagacgaggcaggaagagcaggtaatggatgatccaaggatgctcgtccaggaggacctttagaatcagggatcaatatgggtaacgcgttcggcgaggacgatgagtggtctttcgtatcagcaaggaatgttggtggtggtggcggtagcggcgagtcgagaggcttggacaggaacggagcacccaaaggcataatgggtcgaccatctttaggtggaggcacaggaaggtcggatgtactgtcaaagtgaccgagcggaataggatcttcggcagcggaatggaacgagccggtactggattgagtggacgcagatcgcacgaggtcaatcttactatcggatggactgaaatctgtatgcatgctgatctccaatccggggacagtgagtttgggtgagtctgcttggaagtttggcttgtagccacttaaactacttcgggcggcttggtgtgcactgaaataagcatcacagtcagatctagtactcggcatgtcgttgagaagacccagcagaagaagaacatagctaacgaacatgtgcttgactagcttccattcatccgcttcgattcgtagatctttagacaagatttcctcctataggagacacgcagaaggtaggtcagacaagttcatctcgtcactcgatcagcgctttgagctgaacttacatagcagcggaatcgagccaactctatccgaagatgtctgatttttcgtgctaaaggaggaacagcaagttggattcgctctcgagtagccttcttaaagggcgccaaaatcgacaggttatgggctgtacgaagatctattttaagctgggcctcagtggatgcgattttggagagaagattatcgaccttgagctgtgacgtaaatatgaaagtcaatgccgacatgctagttagcgatagctgaagatcaagactttattcgaagaaagaggagtgcctacctggattgcttccgctctggaagcatgttccgatcgcggccttacatttccgaactccctcaaatctgctctaacgcccgagaccttctcaaacgagctcctcggagtcttcaaagcattcacgctgctggacctcgccctagatttgactgggtcgtcccacgctgatggtatattcactcgccgggttgcactgttctcggctgccagctcggccttgacttcgatgaacgcagtctgaagttgctcgggaccttgatcaactggactgagaggtgattcaaggtcgacggcgagaggtcgactcagcgatcgtaaacgaggtccaaagtgtcgggatgcagggagcgaagacgaaagtgaagagggggatgctgtggataaaatttcagatggagcagctgaccaagatttgtctgtcataatgcggccagtacaattgtcagacaactaggtggattagaagacgtttgaaagtaaagcgaccttacctgctgcgataccggaactaaagaatccagagtccaacgttcttgacgtatacgttgtcgattggaccgatctctgatcttccattttcaacgatttcgcatgagaagcagcagcagccgcacctgcccattgagcttggttccccgtcattcccattcctctcatccgaacggaggctgttttgaacgcggcagcataattgattcgagtgatccattcgttcagctcatcgtcgtcccctgcttgtaagagatattggcgaccatgcggcataatgaaccggaaagtgttagaatactgttatttgccgacaaacaagaaaataaagatgagcgcttcatgtcaaaaataggatatagacacaaagtcagcgcagtataaaccttattgtaagatgtctccataacggcgatgcagtcttttacagagaggacttcgtctggcttgaatgatgtcatcttcggcaaaagaagcttgcccccttcacccgcttgacgaccgacgcgggcctcttctgcttgatttcgcaaaacaagagcccaagtaggatctttgaaaaacagaagttgagatccagtcagaatgacactccattccttccatctccgattcgatgctttctttcctccttcgatcaggtcctctgttggatttgacgtgaacgatgggaagagaatgcagttatgagcaggaagagattaatgaaggtttcaaactcttacgattagtcttgagaacttacctttccgactgagtaacccaaacttggtcaacttgagtgtcaaccctttgtctgcaggaccttgagtgtcttctttggttccactgattccgaatcccaaccctgcggatccttttctacctccaggcgcggtcgatcctacagctgcagctggcgctatcatgatcatatctgcctcggagaacgcagtctgcagctcattcgtatccaagtatcccttaggaccaacatacgaaaacggattgtgagtcggaatgtgaggttcgacggatgctcgaagagtatgcgtcagattttgagagataaggtagtaaacgtcgatcttgtttgttttcccggcaaggatagaagaattcgatggaacgctcgagccagaaccgaaatgcgcgatcgtgtgagagttgtatgaggaagaaaatatagatgaggcgttattgttggccgaatgacttgattctggcaggagagctcgttgaccgttgacatccatgtcatcttctataaatacgaaaggagtaaatgtgatattgtcgaagaacgtctggagtttaatacatggaagaaaacgatattaaaatcaggatccaagatgactaagaacattcgtccaaatatatgaaacacttacatccaagacaagaggatttactccatccatccgagtattacgcacgtagtccgctttggtcatcttgttcttgttggatttgttgaatgcatctgtgtgaagcatgatcaacgaaaaagctaggatgtacgggtggtctgagcaaagaaattgattaacactatccgatcagcacgtcgaattttaaatttatgtagttgatgaggaagaagatcgcaaacctttgctgacgaataaacctggatttccgatgatatattgtctagcaaacgcctccatgactctatcaatctgttgagtttctttgggtagtgatacctccatgagtagctgacgaagcgcgatatcgagcgaaatgccagagaggtcaaaactcgacaagtacgttttgagcgcggacgcatgaaattcatctccgctaagaaaaagtccaagaaggaaagcgagaagacaaacggatcaacacttgaagaaagacagactaccaccatacaaatatgacataagaaagaacgagatgaatagaatgtcaaaacaaacctggatgctagtacggtagctacttcacatctaggcacagcctctaacaactttctcagccattcttctggagaccccttctcccgaatgatcggaacgtctctattccatccagttccactcccaccaacctgtgcgggtgtccagctgccagaagaactcgtagtagagcttcttctccgaagcagagacgtaccgcgcttgatcggtgaagtgtgtatagggattgaaggagatgggatcggaaggaatgtgttacttccattgatcgagttggatctcagcgatcggaatccaaaaatggattcggtgttctctccaatgacaggcgtggaaagattttccatcattcctcccgtcatatctccgccggccgtcattgcagatgacccagatgaacctgccgaggaggacaagaaggaagacattctacgcggcgatgccatcggagatcgaccgttgagaggagagattccaggctgaggggaagaggcaccagacgaagaaaaaaccccagaggaacgtcgacggagagagtcaggtcgaaagagcttcaggccaggagacggaaccgggttgagtaacgaaagatcgacaagaggtggagaggttatcgaacgaggacgatttaaccgtcgatctcgagtgggtgttggagggataggcataggaatagacacaggtgatgagggtaatattgagctaggaatcgaagacgaggaacgcgtccgaaggttgggcggcctcaggtttcctaacaatccgagagggtcggcgtcactcgtcttggagtttcttttactcgagggtttatatgtcgatgactctcgagaagcaacatcgcctgagtattttcgttcactctcatccggttcgactgggtgaaacacagagtgagtgccaaaaatagagtccctgagtcgtccaacaactgttgttgatgtccctgttgccttcaacgagaataaggacggccttcgaagcggcgtaggatctttagaagaaggcacggaggctggttctaaaaggaagtattgtttcctgttcaatgacggtgaggacgacgagtcactgttcaacgatccaggttgactggggcgaggatgatatgttgatagactattttttgagggcgatggtgatggcgatggcgataaagaggggtacttgttgtgaaagaggaaatcagactcgaaaggtgttgaagaggaagatgaagacgctgaagctgcaactgccgtctcggatagagatggatcagaaagaagagagcacgaagaggattgtgttggcatggacttggcagaagaaccttgtcgatttgctagcgaggacgatgcgagagaggaagacgacgagatacccgaggaaaggtgattcgaagatgacgttgcaattggtggcacggctgtcgaagatgaagatgtagagttggattgaagatttggtggaggatgacgatccttacggtcatcgtgtttgtcgaaggcaagatatgatgagagtgttctggaccttctacgagaagaacgagatgtcaaagattgagaccgagtaggactaggggcgggagcagcagcagcagcaacaacaacagtaccgccaaccctcttttctggtagccagttgtatgctgtatcttcggcgagaggagtcggactatccgtaatcgatcttcgaccaacgtaagtctcggctgagggatcaactgcttctttcttgctcccttgattatcatcggctgtgcccgacctctgactatcgttcggtcggagtgtgagccctaacgcggtttctatatgagtgttccttttgcgagatccaaaatcgaatgcggagaacctgtgggtattctgtttaggactggacggtggttggctgtaggaagctactgttctagccatggttggctactctgtcttcaagacacggcgtaagggggaggtatatgagatgcggaccgtcttgtgaatgtacaaaagagggaaaagagataatagataccaatgcgatgttgactgttcattcgaaaccgagaaacaagatgatcaggatgtaagaaagcatgcaaccaggtttggatatgtgtatgctgattgttgtcaagatactaactgtaagcacatacactcacaatttgagttttaacgtacgacttcggctaggccctaacctttgtactcccagtaagagtcaatctagaaaaggagtaatttgatggatggagccgtcccagaagtctaagaagagcgtgcttatctacaacaagaccgtatcaagaaacacaaccaagaagagggagggaaaatgagggggaaagctccaaggtcgagctgatgggttcacgataaacagcagccggggaaatcccgaacgaaagaagtcgacgggaaggaaataaaactccgcggtctagaacacttccatctaatggaccattcgcgcaagactcagacaccatctagcaatagcatacatcaatatgatgaagatgacacgacaactcaagaggcatgattgataaaagatatcgtttcaatgaatatttataaggtgaattatatctcgttaagacgaaagatgaaaaggctagtaaaaaactctatagagacaatagagatcaagtacagtatatacaaaggaagaaaaaatcgaactagagtgaaaaagatgagacgccaaaactataactctgcgtcatctccttgaccgaaatccactatcgattcaggtgtgttgtcgactgtcccaggagaatgacgttcactcgactcgtcgttccggctatcagaacgccgttcattgaacaacgcccgtcgaacctgctctcgctgtcctgtacgtgcccatcgatcccgtatggtccatgcgcgcttctgcggcgtcgatccggtcggtatgtcttcggcgaaattggaaacaagatcttccgctgatgcgcggaacacagaaatcgaagtcgtttgcgctgattggaaggtagatagtgagttatgtagatttgattgctattgaaaggaaaaaaaagaaaaacaagaaaaacaagataggagattagatattgagcagatgtctatcggctgaacagtctacaacataaacgaggaaacctacagaagacaagacggcagatgcactcttctctagatcttcggccgaatgaagaaggtatgttcgctgatcttcgttagaactatgggcggtcgcaaccatggaatcaagagacgtcttctgtttcttgcacactttcgtcatacgttccatatctgtattaagagttgaacgagtgagtatgtatctgcaaagagaaggagacgaaagacaagatctgatggcaacaagatcaatatgacaatactcacgaccggtgttgacttgcgatagactggacaatatagactccacctcttgcatctcaacgtcgagcgatgaagaagtttgctgaactagatcttgattacatgtcgagagttcctctaccgccttcgagacgagctatatcataacaagaacgaaccgcaacggaatcgatcaaatcagttgaattgccgaagatatatgtaaagataagcgagaaagccacataccacaggaatctgttccctaagcgccaacacatttcctctacctgctgccagagcttgttgaagaacactttctattctcttcccctcggtctctcttgtgtctcgctcttgccacacagcttcatgcctctcttctaattgagaactcaaaacctggtgttgctccagtgcgctgttgaatcgtcgagagctggcagagtcccgttcgtcaaacagatcattcacaagagacagcagttttgatcgcagtgctttggaagaggcggcgtctgcctcatacgcttgagaaagctgggataacgagacctcaaggctcttagactgtcgagtgtcaatatgagagcaaacccggaagagatgtaagtgtgaagacaaggtcaggttagatggccgatactttatggaaaccgactcacgtcttcttccatctgtcgcgcaagcagcactcgctcggcggccctggctgctctctccgcttccaggaaagtctgtacagagctatcgagcaaatcgaacgaatgtacactctctttcagtggtccatgaacctagaatcacgatatcgatcggatgaacgagtctcgatatcagtaacagattgtggtcccttctttcagatgcgtaaattcaaaatggtacttacctcccgtaacttattagacacgttttctctgatactctccacatgcgtgccgatctgacttttcaaaccgccagcccatacacggaaagatccttcaatctgggagtgtccggattgtagtttcgtggagaagacctggttctcggtcgctgatcgatcgatagttcgactaattgatgaggctgctgaggaaattttgaccgagtcctcattcaaacgtgatacttgggacgcgttagactgttgcaagagaaatgcggtcagcgcccttctgatcatgaattacatgacaggtcaacgatgcataacaagagcagttgcctacttgtagattccgctgtttgaactcttcaagcgttccagaaatcacggcattggtcttccgctgagcaacctgtagatctcccaattgagatatcatggcttgtgagcattgtgaagatttggctccgtgcgaagcgatgagcttctcattggcggacatgacagcccctctccgacctgtaggatatataaacgactcgaaaattgcgcatcagtttgtatacgtagaatgtatgcgaaaatggtttgaaggaaatattgcgttctgaatgaaaccgagcttaccgagcttgccaaagactccctccagatcacctacagctgtagtcgctaccgtttttaattctccagccacgctatctagctgtctctctccctcttcgaatttctcagcgaccttcaactcaacctccagtgctcctttcacccccataagctcctcctctttctgaacgagttcgtcgacccttctgccgatctcttctctggccacaccgagttctgattcttttttcacaaacaattcgagttggtcgtcaagtctggtcttaagcgaatgaagcttcgattctagctgaatcgacttgtgaagagcttctttggcttcagtctcacggagggccttctcattctcccattctaaccactcttgctcggacttgtagactccattcttttcgcgcgaagcctggatgtatgccaacgatcagtttatagtgaaaagacagaaagaagctcaagtctgagagaacagtccgtaccatcagatcagccttaagtcgttcaatctccagcacataatctcgaatgagcgaattttttgtcatccgttggttggcttctggtcggttcatgatccttgtcgcacgcatcgcgtaatcaagtgtcgagatggtttcttctagatttgaccgagaaggtgaaatggtagcgacaatccgggtctttgttcggccaccgagggaatcttgaagtagtctggtcagcttggattctctatcgtggtgtttaaccgcaagaaaagatgttaatgtatacaccggtatttctgttttcaattcaactgatcacttgcgcgtatgggccgattgatagacagaaggatagacgaacctgtagggaacatgtctgcttttgtccactagcgcgttgatgaccctaccgagggtcaacaaactccggttgatcattcctgcctcggcagctcgatctccttcagcgcctgatctaccgacattttcggatcctgcaagatcgacaaggttgaattttccgactttgaggagctcttcgccagtggcagaagaagtttccttgagatgaacagtgatagtgaagattgagtgtgaccgactgttagatttgtcatgatggagaacattgatcggacaaaggacgagacaatgatcaatgaactgttcctatctccaaatatcaacagaagactgaatctgattaagatttgagaacactcacgaagaagctttattcattagtgtctctcctgtctctctccgttcgctaccgatctttaacaagtttagcccacccttcgcactctcaattcctctctcctccacgccttggattaatactcccttccccttttgatcgtcaaagatcttcaatccacctgtacctgctgtattggagcctcctccgaaaggtgccgcaggtgaagtgccgtgggtaaggaggtctcggatctcttcgttataaagttcgacatacgagatcttgaccgaatactctgtaaggggattcgaatccaaatagtggaagagggagtggagagtccttgggatgattccggcttcgtaagaaacagtattatctgggttgatcgccagatcaccttgcatcgtatgactgtcaacatttcaaagcacggatgtgtattcatacgtggttctcatcggttagcgcccagacgaaggactaaaatctgaacgaaaataggatttacgtttttcctgtgcccgtttgtccataggcaaagatagtacaattgtagcctgccaagacctcgtcaacggcctcttgaacaacctcacgatagacttcttcctgatctgcttccgggccaaagactttgtcgaaagaatatgttcgcttcggactagacagaatggttgatgaagaggaaatggcggtgagcagagtggatggggcagtggtctcaagaacgacagttggagcactaggcgtagtcgtaacgacgattggtgacttctcagcaatctcctttgcagaccttccacttgattgagtcgaagcgagtgtgatcgaagaggaccaaaaacaaacaaaatgagtgtaaatagtcgcgccttactcggaaagcgatcagaatatgggttgtcaaagaacgaaccggcaacgaacgacgacctcaatgttcacatctccagcttctttctctgtagcgttgactcctcgactctctactctgattctgcccgttcccgtgcccgtcttgactgttcctccgctattgatatctagcctcgaacttgttctcgaaagagtccctcctccacctccaactgtgcttccagacctggtcatcttgacaggcggtccagaaggaggatccatctttccttgcactcgttcgctcattcgagaagaggtcttttgaggctgagagggttgcacattggttgtctgacgtaggactttcggattgttgctcgtaggaatggatgtagccgagctagaagaagtgatccgcgttgtgcgacgcgccgagagagacatggctgaacttcactttaacctctcggcaagaaagacaagatatcgttaaagaccaactggacaagtaccgagtcgcgtgaggaaaactcaaagaacacggatcgaacgggcaggaatgtatggtggttgatatcgttgtctgcagatgtatggaaatcaaaaacagtcgcgtcggatgtcgcgtcgcgtgtcgcgtgtcgattgacggcttaaccctaacgcgtcacctgtcagtcatcaccattaacccaagacaccatctacagcatatataaatgggaccattgaccttgtgctcttcttctgtttctcatacatctcttcaagaaacgttcgccatgtcaagcgcatctttcacgccgtcgacaccgtcgacacctcatccaagactcatctccaaaatggctgtggtcgcttgttatacagaaggaggaaggagcataggtcatgacgcacatgacggggttgttgtcagcttgttctgcaaggtcaacataaggaagggagggtatgccagacatctgctctttcctggtaagcatctcatcaatttatatcatggtttcattcaaagagagttgaaccgatctgttaatctggaattcgatattcctatcggacagatgagaatatcacactgctctccacttcagcccaccctctggagtcacctcaaaacgcacttctactcaatccccctccaccattaccaattcaagaggccgctcaatatctcaatatacctactactatacaatcttctccttcttcatcaacatcgtctaggactttgagcagatcgcagaaagttaagattgtgatccaggatttctctgtctgcctgatcagtgagggtggaaagagtaagggagacctgcccagatcggccggccggccgatcgagagtggagcgaacgaggaaacgtctaaggcctggttaatcatgttggagtttctgatacctctcaagagtcgtcctccgttgaatcgttatgcggtcagtcctctccttgccccagatagtatttgtacccgcgtccgattgcgcatatactcatatttctgtcacttaaatctcgccggtagatttccataccacttcctcgttgtctatcaaatactctttcttttcggttgcaaggttcatcttcttcagaagaagaggccaacactgcacactccttcttgacgactcctcgtttgttaccgggcccttcatcatcgagatcaaatatcgataggctagaccgtatcctagagggaactttccaaagcaccacctctctcgaaataagatgggcgcctcaacagatgaccttcaatgaatcttctggcaacatctcgataggagcaggagcagtcaggcctgtagcgctcagaaacacacaacagaggaccatctatcacgttatgggagaggagcgaaaggacgaactgataaaagtgaaggtcgaatgggaattgacaagcacagtccattattcaggggtagagaataccgggcatttagatttctcagtcgatgcaccctctgatttcatttgggatgatcttccgttgcttcaggcaaaccgaggattgtcctcctcctcaacccttgttcctcagccgctggatgaatcccatttcacagagactggtcctcagctagaagattccttggtcatctctccaagtcctcttcattcttcccctacttcttctttgaataaactgcgtgtaccgatctcatctgtctccaagaattcactttctagaaaaggatctggagaatcttcatcccatcctagcctactgcgccaacagccaccttcctctgtagacctaggtgatcgcgtggacgcgtcattctctgcattcgatacttctctaagaccctctccgtcaagttctcctatagtcaaacatcaatctccgcttggaaattcgccatcactccatccatctgcgccagcagaattaccaagcggacatcaagccaaggtgttcagattaaacctagatatttcgcaaatccacgtatcacgcgaacctttcgtagtcaatgtatctggaacggtccttttgaaaccatcaacaacgggagaagttgcgctgccagagtttgcaatcgaagtggactggttaggttctgaagcggatctgagagcgagagagtggttgatccaagcgcccaaacaagtcaaagtgtacccgccgtctatagtagaaagactgcctgatcaaagggagggtaaggcttggggggtatcttctttggtagatctcgaaacttcttactctttcgtcgttggtcttcctgtttcaacatctgaagccgatctatcaacagtttctgctactatgtcgccagctagagctattcggagaaaaagttctttgttcgttcgtcaaccttctcctcccttagaaatttacgcctctacttctctggctgctcagctttcctcgagtgaatctctcgttcctttcactggatcaagatcgatcctctctgtctatatggatacgtttctttccatcgactctgcccagaagggcgaacccaagttgtggaatcaactttctaggatgaaagtctcgttgtctccatctaatccttcaacgtctttacacgaagaagacgcattttttgaattcggcatcatcgccggaccttccgtctcgtccgttacttctactcctgcgctcaacacagtgccttttgttcaaatcgtttccattcacgttgatggagtctcgttacctttcactcttcagaaagatccggcactcgacccaggttcagatattgttgctggcgctttaggctacataagagttggattagatgacgagacaagggaagtaggaggacagctggaggtgctttatactgtgtctggactgaggagttcaatagatgggcttcgatcccagaaaaaaggtagtccattgaactgggataggagatcgaacaaggcaacagcgggtgaagggttccaactcgggttaccaagctttgaaaacgaggtcaaatgggaagaaatcacggtccatgtgatagatggtcagttttattttgaattcttgtctctctgagttcttcaccttgctcaagcttcatttatttctacgttataggatacttcctctcaattgacgcgaaatcttcatctccatccttcgttaacactacatcgaagagtgtagtccgttcagtcacgcactcccttccagctttagcgacaccacatctttccgttatgcctctcactagtcccccacttgcatcaaagtcgaatccgacccctgcatctttatcctggtcaagattacctttccttctcctgacgttctggcttttgttttccattggatcagagatcagagcactacgatcgggcatgatcgagatggcagtagagatgagaggaaagaacgagatgattcaacgggcattggaacgatgtgagacagggtaccagcgacccatatcagcttggcaggctccttttgttcctccatcgacatcaccgttgccgctatcttcaccagaacgtttgtctgctgtttcagttacgcgcgcggtttcatcgttcgcgacgtcgggttctgcttctgcttctgcttctgcttctccttcgtctctgtccgatactacgtctgccacaccttttgatatctcctcatcaatcgcctatcgttctcgttcaccctccaccacccaagactacattcatacgcgctccagtgcagaacattctcctcttcgacctaacttcgttcacgtccctatcttccaacctcctcttccgagctcgactcacggctctggcagcctctctccgacatcgtcctacagtttcacaacactcgaccagtttctatcatacacaaagcagctgattaaccaggatgctttcagtcggagactgacagctttgaggcaattagtggggtgggtgctatcaagaatcacgggggagtgatgaatcgacagcccttcacttgctcaattttccatttacatttctaccaaggtatggctaagattgaaaatcaatgcatgttatagtgttctgtctatgcgaatgcgagtgtgtaacgaaaaggagatcgtttatcaagcgagcgagactgaatgaagtaaaggagacagcttagtgccatcaagaatcagatgtcgaggcaaagagtgagacgggcaagaatcagtcatgataattcggcccggtaccgagtccgactgtttttctctgattcgacgatttgtccatcgtgcgcatcaacatcttaccactaccaccatcatcctcaccatcgccatcgccatcgccatcaactatcactcagcgctcttggacccgccgttcttcatctcagaatatacgaatagctgtcaaattagacctagcaggccatctggatgtcggccttcaagctagttatccctatggaaatatgggccgatgtcttgttcttcggagtaggacccccagcacaggagaaagcgatggcggagcatgggaggcgagaacttcgagatcgacgaaagatagtcgttcaggtctgtagaggctggaaggtgtgtgcgatggaaccttctttgtttcagctctgagcgaaaggttcaatgttctgacccctctcttttatctgtcatatcctatagaaggcagcatggaagtacttgttcatagacccttacctccccacacctcaatctctacaccagttcacatctattcttgtttccgccgacaaaaagtgggatgatcttcgacattctccccattctcttccaggtgcttatgttcgaacactcgatctttcccacctctgttacgaagccaaacctgtctctgcatcctcttcctcctctgtctctcgtttggcggatatcgttcatcgaccgtggatgcaaagtcaactgctttgtcaactaattccacttgttccatccgtcgaaactcttgtcttaccttctggagaaggaggtctgatgctttcaagaggaatattccttcgagcgttgaaggagagcgagcttagctcgaacctcaaacggctgaaaggcttaggaatgcttatgaatggagtcattgatggaagaggggtagacccacttgtttcccttctagagggcctcccagctctggaagaacttagtgttgtaggaggtggaggagtggatatgccgccgtcagacgaattcatagaaaacaatccacagccaatgctctacttgaagaacctacaacatctctctctaatcggcattcggtcaagtctattactccaggcgctcattgattcggatctacctgagttaacttccctgcacctcacatcgtatcattcgacagagtgggacttgacgacgcctcttctccagaagcacggatggaagttaaagtcattgacgtttatccatcttccagatttcccccagccagccttgccttttccggaaaatactctcttaatatgcccttcgttagagagccttcagtttgaaactttcccacataacacaccaccttcactctcgttctttgatccgattccacctcctgttcctgctgagacctccgttcgtccagctccgcccccacctccctccaagctccgacatgtcatccttccgcgacctccgaactcaaaacctgcgaccgaaggctacaaacgtctcatgtccgacttgtcccatccgtcggttcttccctcgttatccagcctgacattcacaaagttcaactgggtccacagtcccaatggaggtagcggaggagcatcgagcgcaggaacgaacggaataatcagagaatgggctatcatgttaggtaaaagaggagtggtcgtgcttgatgggaaaaacaaaccatgtccagacttggccgaagtaggaggcaaatggttacttgccgagttggtcaagagacgaacggtcagtgctctggttggtagggagaggaggagaagaagcgtcagaagttgggatgattccgagcagagcgaggatggagggtaaaatcatgtatgtacttttgtaaacgtaaagaacctggaagttgtaattttcccttgttgtcagccgtctctctttcgacttaatatcgttcccagtcatcagaccctatatatcccctctcctctcttctttgatcaactaaaagttgtactgcttgttttttcatatgatggtttctgtatcttgtccggcttattttcatctggatcttatggctctattctctctgaaaaagcgtcaagctttcttctgcacacattcttagaaagaagatatataaagtaatacaatattccatagctaagcattcgatcaccactctcctctacgtttttcaccctccaaaaccctcagccgatcccacgccgcgtctccatcaacataacaccctttcaaccatctctgcggcccatctctcaggccactgtcctcgatctccttgaatccccttcgagcatgcagtacccgtctgttgtcaaacactacacattcgccttctttaagtgtaagctcgaaaaccaacttgggatctctcaattctttcgcaaacgccttcaaggcatccatcgctacctccgaggagttcggatcaggaggaaaaggagcttggaatggcggtgaataattgacgtgcttgatctccctctgaacatcaagagtcccattatgaacaatacgtgtgggaggaggatagagttcgatgatggggtgagagtgctcaagatgatgcgcgtcgttgatataatgataaggtaccttagccatcgtcagttttcggaagacgtcgggtttgcgctgtcgaaggtcttcagctgcacggaaggaatcaacaaaataggacgctccgcctttcgctcgagctcgaagagaatgaagaaattgaagctgcggagggttttgaaagtacctaggagaggaaaaggtatgcgtttgctgtcagtttgactcgtgtaagaaagtctgagtagaagtgagaaaaacatctcacaagagatccatgtgaagtcccaatggaacgtctgtataagctacgttccttcctcgatcgcctagcgatctgacgtcccacgtctgtccgtagaacgtatgcctgagctctcctatacgattggccagcgctcgaagctcacacgtatcgttctctgtctgatctgtaggtacgtctcgtataaaagcaatcccatgggtagctagctgtcgaagtacagtatggagtgctcgaggtgtaaacttaaaatcctcgtaagacgtccagagcgtctggaggtcttttaaatccgacgctacccacgggattgatttcggtaccaacggtgcttcttctttggtgcgcgagaggaagaccaaaggaatcaaagagtatatatttgccccgaccatccttctagcaagtgccttggcggactgtgagttctttcgaagaccggtgccctcccaccgaaacttcaggcaaggtcctagttcagcagccacggtctcacccatcgctttcagttccgaaacgtttaccactgtgatcggacgcttggtcgaatcttcgtcgatcaatcggatggtaggatctggctcgtcactctggtgtttcttttgtcgagttgaagcatcaacagaatataacgagacatcagaatctcgaacccatcgggccgagaacgtctttcggtcgatgcctagagatggacatgttagagtgaatgttgtgctgggagtatcgatcttctttcccgatgaagcgcgagaaggagagagaaaaggttgagaaaaaacggtaattgttgattgaggatcgattaattggtaagaggtaccttcgaggcagcatatagactggtgtcaacaatagaataccggagaagatgatcaaggagagacaggagagagcaagactgactactggaggacagccgatcagaagatctttgagagataccaggcggagctacacttgttttaggaggagaaggtcttggtcttgagagcggtgtacgagatgatctcgattcatagaatgtacggtccgaggacggaggactcgacttgttgggcggccgttggttcaagaagctagacagactttctgagcgaacgtgttgtttctcttccggacataagagagtcagcgttggtgagagatgtctacggaaaggaacctgaacaaaaggagagcttactcatgatcgagtccgccaggctgagcccagaaggtatagatggtcctctgtgaggtgtcacacctgggttgccctgagtcgaatcataagagatttcagcagctgccgtggaaaactcctttagtatgaagacgaaaggccgacagattcctgaaggaagaactgattttggtattgaaagcttggacttgggtaaatatataggatgcatggttgacgagtgatggtgatggatggttgcttgggtgtcggagatttcaaggtagatggagatcaaggtgtgttcggcggtcggtccgttcgtcagccggtgtaaccggacgaaacctttcaattggattccttctaattagtcgaaattcacattgcaatacctgatgctcgttcttcatctggcatcgttttctcagtccacctgctctagctctttaacacagcctgcttgaccatgttaattcattagactgttcattttatagtcgtttcttttcacgtagcatccaggcaattccatagactgcgccactataggcgatcagaattcccacggcctgtacattagtcatttccagactattaattgacaagttagtcaggccggtcaacagatttgcctgtagaagaacataggggggagcaatccgagttaagggatgaagaaacgagatttaggaaagcaaactcggtgggtcacatacaatcaggaagacaagctgagcgttcgtgttaccagcagccaacagaagcggcacactcgcacctcgattcgacacaatctctctggaagattcaattgtagttggctcgaacgctagttgaatcgcaaggtaacctaagagaaatgtagtgttgaacgctgtaatccatagaacgtatggcagatttgcctgtaaattaaagtaaaccgaaaaatagcgtgttagtcgaacagggcagactagataaagaataacactacgagaaacgacaagagattcttaccagtcgccggctaacctgaacgccccagccatctactccacaacccattgtgatccagagaagcgtccaccataccgccgacagaccaacaagcacgggtacgagagacccaggtttagatatcgtttttgacgtgggacgacgtaaactgtaggcaaatcttgccgagggaggtaggatgtattgtccgagatcgagaccgagaagatagagagcgagatagcctgggaaggaaacgatgccctctttgttcatcgtcaagaggttggttcgtggactgttgatcgcccattgctcgagtccgtagaaggagagcaacgcctgatggactatcgtcgagtgaaaagagagaaagtagaagggtagagagagagagatcaatagatggacgaagaagagtaaagataagaaagcagacgagcgcggagggaaaagcgtatttaccaagggtaaggatgattccgaaagccgaaaagttgaggtatcgggtgagcggatagatgagtacgccaaatggagggacgagtcccatagtaaagaaaaagttccaatgaacgccgtactctgtgacgtgctcctgtgtaccgaaggaagaacccaagaaagaaaaaatcgagtgagaagaacgtagaccaaaaccaactaagtccgatggagcgttgtcacatacagggtatttagcaccttttaccatagccacccttacaagccccattacgactgtccatgcgttttttctaatggacgtcagtacagcaggaatgatgctaattggtcgagtcgacgacgatgccggccgaagaaatggtctagccgagatgatccccaaagacatgacaaaagaaccaacaccgacgtccatctagagattgttcacacagcccatcgaataagagccgacaagatgaaagaagttagttctgcaactagcgcatacacataacacacgctagaaaacgacggcagagattaggaagaggaaacgaacgaccgaggtgccaaacaactctgtcttcccaaactctcttgggaagatattgaagtctacagcgaggatagaaagcacagtgatgaccatcatatgtgcccgataaaccgtcaggaaggactgtgtcggcgagcgcggttccaccgcctcaattttcaccttggtctcattggaattttgtttgagcgaactcttcttccgagggctcctgccgagaggtttatccatggtggctcgtttgacggctcgcttgagcgtatccatatctggagggtcctgtatctcatcctctaatttttctacaaggacatactcttgacctgtgtcttttccgtctactctctcttcctcttcatctttctcgtccacctcaatctcatcttcatcctcgtcctcatccgctgccaagaacctccttctccttaatccctcatctctctctctggcaatctctagactgaccggcttcaggctattcatgcctccagtaacaacgggaaccgcccaggatgcaatagccagcccaacgagagagcctacaaacgaccaaggttcgccagagtagatggtgagcgccaagagaagtggaagaacggatgtcgcgtattcaaacagaaatcttccgacagccgagaacgttggtgttgacgtgaatgttgatgttggcaccgatgaggatattgatgggaatgacgagttgaacttatggtacaagcaagagtaaaggagataagatgcctatggacaatcaaaatatcagccctcaatcagtcaaactttccaccgtgagagccattaatgttgtctctgcagaaagaaaaagatgaagagaacagaagcaaaggccaaaagagaaaaggaatttaagaaaggaagagagcatactgacgagtccaacacctgtaacagcgttgatcgtccctatagatgaccctgttccacccgagacaaaagactccttggcgtctttaaacgacatggtctttctaaatgcaagagagaagaagatgtccctcttccttttctcttcagtgtttcctctagctgtttggtctcgtcgtggtgtgttatgtgatgaatgtaatggatgatgacttaactcccaagtaatgttttcttgctggctgagattagataagcaaaaattactggtagacacagtgtatgagaatctctttatgattgtcatctttggatagatttcatatataacacacaaccgaccatcccatcaagaaagaggacatggagcaggaggacatgaagcaagaggacatgaagcaaaagcactatatgaaaggactacatagaaagtttgcaggtatgttgacctcgaccaatacctaaatatcgacctctgaccaaagtctcggtcggatccaaatctctaacggtcgcctgaggactgcctctttccacatcaaatcttgtgggtccgataatgaatcgggaagagaatcgaggaaatatcggtgtgaaagcatgaggatgaacatcttaagttcaagcacctggtttgcaaggaggccagcgagcgaacaatttcaagcgtgatagaggataaggcacgaacatagatcagacaagaaagatcaagccgagaatagagagacatgaggaattcactaagaaaaagaaaatccaagacgaaagtaaagggacatacagcgagcttctgtccgaaacaagctcttggtccagcgccaaatggcatacttggccccgcgttcggatcaaacttcccattcgaatctatccaacgttccggactgaaatcaatagaggtaacgaagagaaacagaaaaggaggaaacagacaggtcgttaatcgaatttgataattcaagaaatgggagaacggtgatagagtcaaggaccatctagacaaaggccgaaatacatacacaaacgaagccaaattgccgtcgtcgctccatcgaaacctgctgtttttcttcgaagtcgagctcttctcctcatcgtcaacctccgtatcggtgagcgtgtcaagatcgatcaatgtgtttgatttggtagcctctcccgccatgccgagcataaggagaatctcggtgttcttcggaacaacctgtccataaatgaccgtttcttccgagtctgtttcgtgattcacagaatgagatgccacatcaaacgatttttacctcatactgaagtcagaaggagaaaaaataagtgacttggatgacaaagttccaaggaaaagacgaactagtccgagcggttgtcatggttgtcttcgccacgcgcaaaacttcttgaactattgcgtctaaatctgaatatctcatacacacacgtatacagccacgatcagttagtgcgtgaaaccttattaaaatgatgtgaggagagaagaatgagtaagaaagactaagacccacagggagctttgcccgagttgatgtcctcatactgagcttctcgttcctctagctccggcagagcatccttaatatccttatgaagcttgcgctgaatatgtggattttgagtgaggaaccttatagcccagccaattgaagacgagactgattcatcaccctttaagtgatagaacagcgccaaaaagagcggagttaaaagcaaaaaagggccaatcgttaagcaatcaagacgaacagttgaacccgctaggaagaaagaggaacgtacagcgaatagtaaagtggccatttcatctctgatctcctctactgtcatcatcgcttttttaccctgttcttgctcgaattcgtattctttcgcgagcaccatatcaagcagacatccctggttcctctctgatgctaccgatgaagcgactgagcggatagtctgtcttccttcgatgatagcttgattgagtaccttatggatgagacgctccgccttactgaaggaagtaaatgggagtcgtttgaggaagtaagagaatcgagggaaatttgattcgataggaagtgactagggacgaagagagagatcgaggaggtgtttcagatgactgtgagacctccagattacaaagtcaagaggaacactgaaacgtacgttgacatatagcgagcttgcccagccgagctggcttctttctataggaaattcattgacaccagatttgcctttcgacttgacgactgctatagtagattccaattgatggtatcccttgccgaacgcgactttggagattatatccttggatgagtttcaagaatgattgaaaaaaatccgatacacaatgtgtgacaagaagtgtgagcaaaggcgaccgcatccgtgaactcatgagaagaaaaggagaccagttttgatatctcacgctagctaacagactgatatctggcatgatctcgaaacagccttcttccactggtcgtgcggtcggttcccccagcatctgacgtttcatttcccatcttgaaatgaagttatcagtaaagatgaggaatttatcaactgcgtgatacacgtttttacaagtctaagaggatggagcttaaaagaagaaggcgcatacaggatgaataatttttcagcggttcgcaccatcccgggcgatagatgtttcaagttttttgggctcatcaccggtccgattattcgtcggtgatgcttcggttatgaatgcgtttgattttatttcattttttgaatatagaccaaggatgtttgagtcagttaagatagaaagcggagatctcgttgtggttggaggaatcttaaagacctactctccatgttgcatctgtgaacaatcagaatacaatacacggcaataagaaagtgatcggattttcagattcagcatcccaaaacaagattcatacttgtctgcaaagaaaaggatccccctttttagtcagaagaattgtgaatgatctcgggtcagcgtcgttgtctggctcatctgatcagcagaatcggaaagagaagaaaggggcaatcagccttacccggtatgataggaatgaaaacgttaacgaatgagtcggaacgtctaaacaacggatccttcttcataactgttctcggacacagacgtcaaactagacggctttggtgatgatgaagagagaatgaaacctccgctcactatcttcgatcaggaacggatcgcagacaaccaatgtgggctcccaggcgacaaagttgaattgataaaagcctggagaaaacagcgagaaaggatcaatatgaatatcagtatcgaatgaaattcgagatatttgtgacttgtaacacaaaagagcttggggaagacaaataagacatgcctcctgggaacttttcactaagttcagcgtaataaggatggaatcttttggtccgtttgtagtacttgagcatgggtcttaagtctccgaaaagccattcggttgattctagatggggaatgccagggatccgtttgatggctaatctgcggtatagagcgtatgctgagctggctacaagcaaaacgagacccaagatccagagcattgcaacggtagagataggtaattgcgatgaatcgaattcaaacagataaagacaaagagaagacttgtcgagacgatcaaggtcaatcatcagaacggaaagagactgagacggatgagattgaagcaatccttatacagaatgtcaaccatatcaattagcgatgcaggatgaatctcggatgagtgtcagtaaagcagagataaggtcagtacgatagattgttcggggcactattctattcagtgcagatgtatcaatatggctgcatgagagcaatctgaaccgatggtggttgatacatggccctgctggacccgggtgtcctcgggccactaacccaccaaaaactcatggctcatgagcatagtttgcctccaccgatgtgacagttccggtcctagcgtcttcctcagcatcagtggtagtcgtattaaacaccagcattttcgctcccttgtttttgtcctagtgaagggctaggtccaacatgttgcgcgacaaattgtcttccctgttccatcaagccagagatactaaccgaaaggtggtggttacacagaagaacaatcacacaaggaacacaatgacatcacacttacattgcaggttacatctcaactcacatttcaccccgacgagacaccagcatgctatccaccgatgttgtggccctaattacataattgccggaccgacccctttcggaccccttgtgctgcgcgactaaataaagaaacgattgccaagacgtgcctagtgatatttcccctcgtctatctgtgccatctgccagagcgagttgacaaagcttgtaggtcgtcgctctttttgtccttcttttcttttttttcctcttccttcttcttctcttcttgcgtgccttctctgttgtcacacattccttcgttcattcattcatactctttcttcgctcgggtagttgagaaagcagtaaaggaacagttcgactcacgctcgtacatcacctcacacacaattcatgtcctacgccttctcccacccggggaacgcaatctcaagcgactatccggttagacgatccagccctcctccgttctcgtcctcgtccaaccaacaaacaccgatgtcatcggcaaatccgtccatggtgcaccagccgttctacagcctcaacgacggcgacaacacccctggccagtccatggttggactcattccagagtctcacaggacagagaccctgatggataacagaccgtaccaaactaacggctactcacctgccagtccagctagctcggattttcagctcggatctcccaccggttatcctcaggtactgttgcctttttctttcttcttcttcactcatgatttgttgacatcatgtgctttcctgcctgtcaaaacacgcacatgcatacctagggctcgatctcgagcttcaggagcatgcagagtagcgtgttgaacacgcctctttctggaaagccaacgatatcagaaaaggttagtctgatttcaaacaccgaagactgatgcgttcctttgactagactcacttcttgtttcttcgttcttcattatcatcagtatactctcccagcagatcctgccctctgggcccgatcagacagtcctgaaccagatggtatgttgttctttgctcttggttcgattgttcacagtcgccttggacctttatctccaatcgtcaaaaacagggaaacaacagaatacttactcttcactccccctcgccttaaaagactatctccataatcccgacccaaagcgagaccataagaacgataacgccggcactatcttaacggttcgagggctttggaatctgggctgtttgctcatcctgggagcgtctttaacgatggtcagtccactactggtctattgtggagctctctagttacgagacgtatagaagccgtttcttggaacacatatttaacatatacacatgtcctctgtgggtcactgtcctccataattcgtcgtttgtcatttggttttggccatcacagcttttgtaagtattgttccttctcacatccattatagacacatcgatccatttgactcaacggcaatctccttccttcttcttatggcagcgctggctaccctcttgtgacagcattcacaaagagcgacggaaccacccttggagctttcaagtcagtgcattcttttttggctttcctttttttggtggcgcatcgtttgtcgttcgtcgctcaacagttttattgaaccacatgttctgtacctttcctttcagccttggaggagtgaatggttcaggtaagagaacggcttcacttattctgttcgaatgattgtgatggctcaaaattcgctcctgttgaaacaatcgatcaggtcaagtcccgcagactatcggaagtacgtcgaagcccctatctggacatctctcttctcattcaatcatcttgtttctataagcttacctacaaagtcgccatttgttctcttctcctatcggtcattagatttcggactaattgataaagacaccccgaaagacgcctatactattaagtccaactcaggagaaacttgggagcttcagttctcagatgagtttaacgaagacggaagatccttctgggccggtgacgatcccttctgggaggcacttgtgcgcagctttcttcctactcctcatgtttgcaagcatcgactgacaccgaaaccggccaaatcatttaggatcttcacgcttggtcgacaaatgatttagaatactacgatccgagaatggtcactactaccaacggaacgctcgaacttacattgaccacggtggatgatccaagtttaaaccatggtttgaactatactggagcttccattcagagttggaagtatgctaatttactgtctaatttttacgtcatccgtcttttgtttgtcggccaacctgactaacaatgggcttgttactcaattagcaaattttgcttccaagggggccgattagaggcaaaagttagactgcctggaaaagcttcgatctatggactttgggtgagtttgttttatctcaatttatgttgtagcgggtttgatcctcgtttgctgatagatgattctcgcttggttcgtttgttttagcccgctttttgggtaagctagataacgttatctttgtaaagaggattcgaggatggaatgcttaatcatcttgcatttgtgaccaattttccaagacaatgggcaacttgggtcgagttggctatggagggtgagtctttttatcggacggtgctgcttttccggatctttgttggagaacgatttcttatcacagcaatatgcccttgctgcgaactctttaatcgattcagaacgctcgagggaatgtggccatacacttacaacacttgcgagtaagtgtcgtttgtatcatcgaaattacctatgctttagatctagtatcttactagcgagtttcttcttcctttctcattacctttcttttctagtgttggaacgctcaaaaatcagacgctcaatggtttaccctcactcgccatgacatccggaacggactcgagcacagataatgtgctctcgtatcttcctggacagagactgtctcggtgtacctgcccgaatgataagactcatcctggacccaaaaactcagatggaacgtggatggggagatccgcgcccgaggtcagtcaatcattcatacaaacatcttctgtcatcgtcgtatcattcgttgactgatcaatcttaatcatggttcgcttcagatcgatgtgtttgaggtatgtgtgctcgctttcaagtagagcctcaaacgtcgcatctagctgatatcgcgtttctgctcactcctgccattgcaggctcaaacctcgtcagttacgcaaaaaggttcgcatggcctatatctctataattgactgattttttttcacagtttcgaggctgattcatctcattatacggctcttcaggcgcggtctctcagtccgctcaatgggctccgttcaaccctgtacgctttctctatcaatcttctcttccaatcccttgttctgtcatgttgaattggctttcccgtcgaggggggttttcttatctgtagcactatatctgggataatgcgacctatgcagagattacagatccaacaattaccgagttgaacacgtaccgaggaggaagttagttctctttcaactcttcttcggagactcacgctcgctggtgaaacctgaattcaaactgacgctattggcattcttatctgactactaccttttatctaatcagctatgcaagagacgtcatctggagtgtcgaccactgaccagaactgctaccagttaaccaaggatggacaaccgggctgctacactgtatatgcgttcgagtagtacgtacaatactacataagttctgggcagtcttcttaatcatactcgagcttgaccttcatacactggtatctctatctcttagcaaaacgggagacgacggatatatctcgtggttcaacgatgacaaactgtacgttttagtcttgtatcttcgtgagtgaagttggacttgagtgattgctgagctttgaggtttcaatgtcaatattctctctcgcctcttctcagagcttggacatacaaggagggtggatttgcagccaatgcagatttaggtattggtaaccggccgattccttacgagccgatggtcagtccaatttctaatcttttttggtctgacttggcgccttccgaataatcgaatcaaaatgattagtagttgatctcctctctgctttgccctcgatttccttttgattaacgtgtctttggacattagtatatcctgtttaatttggccatgtcttacaacttcggaggcattgacctcgatggtttggcagtaagtattttctaaatttttctcgtcacgaaaaaaaaagctgtacatgctcaacggatctcgtttgcttgctcgttccataggaaatctggccggtcaagatgaatgttgattacgtgagggtttatcgtgagtgtattttctctaatatctgcatctgccactgatgtgaagtgactgataagagctaagtgtatactgatcactacattcatcttgtctgtctgcttatgtgaatgtagaggacccaaaccgaaaggcaatcggctgtgacccggatgacgcgccgacgtcaaagtacattgcactctatgactatgcattcacgaatgagaacatgacgactgtaagttactttctcctcatcactcaccctgtgggtcgttccaagcggcctgtcggtcgtctgtctgagagaattagagatttcgggcttctgacaatttgttcttcatgtctttcttgactgaaacagtgggaccaggtatgttgaaccccgcgtctacacattgtcttgtttctgaccgagttgctgatcctttctgtttgttcgtcgtattctttcgtcagatgaccaacaacgcttctaagcctggtaacagtctacttgtgagttttccttgccggcttcgcacagaagttgaagctcgagtatcgtgaagctgaacgcattctctgctaccctttttgttggcccccttacagggcgaatgctaaacaagagacttttgcctttcagaagttgcatagcatgcttcttcacttctttccatcccagtacattgcatctttctttcatgtctattatttcttttctctgttatcgatcaaatttgtttgctctttagaaacctcctttcatacccgtttagagtttctatcggttcatcctcactttgtctttttattcatcgtcgtatcattccttcctcttttcttgaccccttccttatatcttcttcctctgcttgcccatcatcagtgtatgagcgcacttggactacttcatctttacttgcccccgcccctctttttctctctttccatcctgttcatcacactcttactttctctttcaccgtttttaaccttccatcgtgaaacacagctgagccgatcggtcagtcgatcaatttgttcatattcgaatgtggacatgtgtaggtagaacacgattggcgctgctggccatgatctttgtctgaaagttcgacttgactgttctgaaatcttcatttcatctccctccaaaaccatacctattctttaccttattcctcttttttttccccatcgtggttgacctgaccagacatttctatgcatgtattacggcaattttgctagatttgctgtatttccaacttggatatggaacagacgtcccaggcttctgactaaagaaagacaaacaacaaaccggcaagaagaaagacgaggggatggaaggatctagaacgggaaggatgtgagagtagtctaggtctaaaggtgagtcatcgtttctaaccctccgatcatctacctgtgttccaccagaaattccaggctcgctcttgatccagctatttcaatcagacatcaaatactctgtcacatctaaaccaattcagtataccgactgctcttggacgagtataagccttttcgtattcctggacaggtctggattgtgttttatcccttttgatgattagtccggatatccggcgtccacgttcacgttcgcgtccacgtctctcttgatgcacttaatacgatcgacggaaatgacaacatccacaaccccttccaatccgccttctcgtccggattctccggtaggttcggagtcaattccagactcgaattcaaagccagaaattcagccgccggccaggaacaagaagacgagaacgaggacgggctgtctcgtatgtaggaaacgcaagagcaaatgtggggaagaaaaaccaagttgtcaccgatgcatgagagccgggatggaatgcgtttggccggtaatcacaagcaggttaacagcttcccaagcttgggtcaaggttgttccggaaggaggcaacggcggcagcggcagtggcagtctgactgaggaaagcccagagtgttcggcgttgacagttgtctcgccggagaagcaacaccctctcattgaacggttgcacggtcgggacggtgcttgggatgaacaaaacaagggagcagagagagacagggatgaggatgggcatatgttgttgattgctcctacgtctgagctggagttgaattatccagattcaaacgaacgatttctcgttagttgacatttcttttaaatattcatatcttttttcaaggcgacgtgttctcaagtggctgtcctgtgttctataatcttatgggaacgaccagctccgacatgcactgaatgcggtaaagtcatggccgtcattcatggccatcactcctgacccgaaggttggcaagtttagcccaatcgaactctgtatgcctttcctcgacatacaacattttctcagtattcctcgaggatcatcgaccgcaacggatgccgtttcgctttccttgttgtcaatagccgctgttcatctttcttatcttcatcacgtttcctccgtcgaagctttgttgaatcaagattcgtctggtgggcagatcagcttggcagaaacagagaggtatgccaatatgggtgatgctttagtcaccggttcactcgccctggcagagagtttcatgaacattcaacaaatcaagggattgtcgtcgatatcagggaccggatcaaaaatcgatgcagagacggggatggacatgttgttggccgcttgtttgaacaacatactttcgagatgtcttgccggcggaaatggaggaagagaatttttgaaccttgcaggtcggatcatcagaatgagaggtggaccgaagaacatgctggacgcggctatcaagatcagaggcgggacgaggaagtcattcagaaggaaaaaagccttgatcgaaagtatctggtcgtgggaactttgtagtacgctcatcctccttctcctcacaacgttcgcgctacagtgcgagcctcgttgttgatatagatcaaaacgctgatatcaaaaaaaaaatatccatgtactcaggctcaatttcagcaggaagagtacccgattcatattcagatacccttcaatcttggatcttcaatcccgaaccgggacctatcaacggtatggagatggacgaaggcgagtgggacattctagaatgtatcatgggcttgagtcgtagtcttctagagctgttatccagagtaagctcttttcttctttccttgttcacttcttcttgcgatacttcaaacctcccgaatcctgatcaatttggtaccaatgtcaaggtgaattcactctacgctcattctcacccactgacatcaatccctggaaagccgattcaacgcccggtggagattgatctattttggaaaatccaagcatggaagctgctcgttgaactcgacatccgtgcaaaagacatcagtcatcaattcggacataaaagacctcaggactcggatatgggacgactggaattaggaaacattatctggattcgaacaacggaggtttgtctcatttccgatatccaagttggacttacaaccctttgagctttgactgacggctttcctctttcattatcgatgattttggtagatgattttgaagatggacttactagctgtccatccatcagacccagaaactcttttcagagcgcgagacatcatcgaccttgtcaactactgtcatagtaagaaatttgtgatgttgttgtacgttttttcacttacttcgtctctatttcaggtttctctcaattctgagaaggtattcaccctcccgatcttgcactatctattggcgttatcgtcagattattatggccgatcattgtcgctggttcagtcttccaagaaacaaaggacagagatcaagccttgacggctttaaggtctctcaggtatgttgctttcttctttcccaattttatacaccgtctaatctttttttttgtcctccattctgtcttggtttggatgcgaatgctcgtagatctgtatgctgcttcgatctagattctgggtttgccatcatacatcaggttagctcatcaatatccgtatacacgtctttctgaggagaagatttgttgtgttccgttgctgatgcaaatgtatttatatgtaggtctgggatgctagagacaatggcaatgaatgggcttcatggagagatgttgctattggctctggagatggatttattattggctgatcaggtcttcttctctggttgtactttggtactgttctgctccaataataagaaaattttggctgtgtaatatgttcacttcgaattatagatatatatgtgattgactacgtggactcaagtatattgggtggctacttcttcaagatctccacaagcaaatacatcgatatatccggttacgcatatgcctctatcctgtgctcttggacatggctgaagcgaatactgctccccgtctgtattttgcgctaatcaataagcagatcttcccaatctcgtacccagcagtcgatcagattgatgatactttcttcctcctcctcctcctcatatttccccgattcaacccacttctcagtccattcctccatttcctctatccacatactgacgtcttcaatggacccaaatctcgattgaagatgttcgatccagtcttttttcgatagtatctgaaaagaaggatacatcgaactcttcagcttatccaacaaggtgccccatctgatgaacttcatttttggaatgcccaaactagatgcttgagcatccagctcctcttcaggaacaacaaagaagatccggtcaacaattgaggttgctgcttggtctaatgccatccagggaatccggatgaagaggggaatgtcaggcaaggatcgagttatgaagcctgctttaaggattcttcctaaaacgttcgaatgagaccatataccgtgttgaacacgtggaagcagaggagggatagggtgaatggtactgtgtagagagtggtggcttgatatagtttggacgatgcgcgagattatgttcagattaacatcaagttacactcaagtactaaaaccggaaaagaaccataaacaggaaggataaaggatagataggattgactcacctcaatcaatggttcacttcggaaatccggaatcgtttctcgatgttcagacatagcacaagatggactgggtacagaacctggaggctcaatgaagtcgcaggggccatgcctaggactgatgaaatgaaaattcttctgcctccttgccagaccgattttgcataacagaagtgtcactgtttgatttcgtgatatttttgattttgttggaagaaggatgttcaattttaaagaaatgtatgtgtgtttcaacaagcaagtctctttgcaaagttctgactgaagtacttacgttgaattaaatcctcttccggatcctccgaaccacagacgatgatagtgtcaactcctccttctagcccgttcttagcctttatattcaatccttcgccggtaggaccatcccattcaatcacttgaacatcaacttgatctatcccacccatgatcgccggcacgttgtaccctctagacccaagagaacctactagtctagcatatgcttcttctgtggaagcgcctcggacaacaacagtgattgtctcaagttcggaagggaaggggcgtcgagtgagacgttcgagaagcgcgcaaatcaaagatgatccatcggggccggccaggaggagatgtcgagtgtcagaagaaggaagatggccaagaagaaaggacggttcgtcggacaacgaaatcgaggagagaaagttggaaacatgggtgtttatgatatcatctccatactcgtatctggttggagtatccgaaggtatactacgggaagtcgattgagtgggaagagatgaacattgttggcctgcttcagagagtataggggttgatagatgttgcacaacatcacggagcgacatctcagggtcccaaggcttttctatcgggatagccaaccgagaggcaagctctgtttggaaggagagatcgtgagaggtagataagccggtatatcctagatcgttgagtgtgagatcaaggatagagggcagggtacgcagggcagctgagaggatggcatcagcgatagattgttggaggaagggaagaggggccattggtgcatgatcactgcgacggatgtttgtgctcatcacgaccagtattggacagttgtagagtaaaagaacaagacgatgtttttgccagctgtgtcggagagaggagacagttttggtcaatattagatcggaacacaaccatctccgtgcatcagagtataaaaacagaaagcttatccaagcctgtcgctttccgctctcgaggacaaattgatgattcacaccttcctcagttcgcctgttgtcgtatggagtacggctgtagattgggagtcccaagacgtggtgaaatgttagggtgatcgttgagagacagtttgaattgtttcccagtgacggcctcgacattctctgaaagtcaacacagatgttgagcaacgaggaagaaattcgagagtcagattagataaggattggtaaccatgtgtagccagatggtaacattgttgaagggagccccctgctcttgtaccatcaacaggatctaacacaagaatcagcaaagctaacaacttgcatcaaactgttctcctctcactctctccttcttcccagcctctctctagactcatgccgaaacgtgcaaagaagagaggaagaccacgtgtgaggccggtgacaccgccaatcgagcaaatcccaagaaaatacgcggaggatgatgatttatcggcctggttcgacaacaatgacggcttgaaatctgacgaagaatggattgaggatgaggttccagtcgaagacctaaatccaacctgggctgaatttagaatgacttttgctgaaagttcgttcatcgcctttgttgactccttgaggaacaagctcagttgcttcctcatcagattgaaaggagagagaaactaaccgttatcgatctttcaaacgcgtcgcatccacctctcgtgtctcacctcacctcacgtcctactcctactctctttcttcttcagttgttgatcagcttcccatagaactccaacggacatacacggttcttcgtgatcttgacttacaagctgagcaacacaagactgagcaggaacggttgtttcgagaatatgtttctgcacgcgttcgaatacatcatcaaacgtcgaccatgaagtcggaggtacccgttaacaggcctccggaacccatcccgccaaatgagctcttggacaggccgtctcttcgtctagaggacgcatccgatacaggagaaaaagagaggctattcacaactgaagagaacagagggacgggattgaaagatgaagtcgatgcaaagacaattttcagaacaaacgggtcatgttcaaatcaatgtacagtacctctacattcttgagcaaacaatgtactcgatctctgacaatgacttgcattttgatccataagctccatccgttttacccagcacttcttcaaccagaactgtcacgaatttcagcttaacagaacatccacatccgcccataattgctgacccaccacttattgaaacgtcgccgaatgaaattctcgctctgatcacccagcattgtcaattaggcatcaaatgcgcagaagagaagttcgcgatggcctctggcgcgtatcaacgtgtggaccggcatattcggcgacttgatgtcgaactcgaggctcacaagctctccattcaggctcaaatggaagcagcgctaaggaaggataagaggaagcttggggtcgacgaaaattcggaccttgatggagaaggtgaagaagtggatgtcgacgacttggacggagcagaagagcttagagctgaagacagaaatggcgaaattgatgaagacgccctccaaacgaccaatcccaggcgcgcctctcgaggaaaagcatattcatattccaagacgacatcaacacccaaaacaaaatcgattgcaacaacggcgacaacgccatcgagcgcgaataagtcgcataagcgtaaaatcaaaggatcgatcgaacctactgttcaggttgatatagagagtgagcaggtgaaagcagtcggacttgagtctgagctaggtatggttaatggtaagaaggagattgtcagaggaaagctcgaaggaatgaaagtcaccgagtacgtgcccaactttgttgtgtttcttctctcttttgaattctttgagtttatcatgtcgaacgatggtggttactgatgtgtccggcgaaacaatgttatagtcatgagccgagatactgctattgtaacgacgtttcgtacggcgaggtgtgtgaattttcatgaaccgacaatcgttgacttgaacttacgagatcttgttcttgtctgctaatcgaattctgcaacgtcttctagatggtcgcttgcgacgtaagtttccgttctatcgagagagtcttgtatattgttcaaatgcgatcagagagacccatcttctctccctttcatctcttttcttctcacaaactaaagaacgacgattgtgccatcgagtggttccatatatcatgctgtgtcagttctttctttcacattctatcgcgtcatgacttgtctggtctttcttaatgttcttctttctttcgaaacatatagggcatgaccaaagtccctacaggtgacttttctctcaatctctacctctcaaaccaatgaaggctcgctctgaccattgatctccgttcccctttacttccgattcagggaaatggtattgcaaaaactgcgaaatccttcgaaaatcaaaaaagaagaagaagatttgaagaacgatgatccaaaaaatcaagataagggtgattgggtactcgtcaggactacacaagagcaaaccaacatggccactaggaggaacattgtactctcggtatgaaggatgagacgagctgggattatcccgtcgcatcttatatttcggagcagaacgctactctcttcgcgtcgaaatttccttcacctgtggttctgctgtacatcttatcatctacttttcaaccacatatgtttgtatatatgatgtcgatcacgactttcaattataagaaaggagatcctctataatgaacccttctgacaagcagggcatgaaaatacatcaaatgcaaattaaagaaaaagtaaatagaaagaggtctgcatctcaattctattcatttttgccttgctttttaattccttctgcttccctgtcgtttactttttccagctctcgccgcaccaccccggctggctccaccaccccgtcctcctcctcggccaccccgaccgcctcgtccgccacctctgccacctcgtcctcctcctcggaaaccgtccatgtcctcggtagattccttagtgttggacttcgcatgtcggccagctcctccgaacccgaacttggcgtctcgacctcggcgactcatctgaataggcagccgtatgatatgtgaagaaagaaaaagttggaagcgatatcgtcagttgggttctaaaagacagggattcttggggatttgggatgaaacaaaccttgctgtcgcccctgccacctctactcgaaccagcggctccacccctagcagactttgcaggtctcgagatagcatcctccactttgacgtcgaagtcatcatctccacctgtagcctgaagagttgaatcgtcctttctctttcgcttgagtcccttgagtctatcgtccatcgctttacgctcggtctctcgttcttggatctttgagacttgaaccttctttccgaacttcttgagatctcgctggcgacgggcatcatctgatttcttgatttgcgacctgatgaatatcgacagagaaattaacgataagtaaggtcgatttcattgaatggttcgcgccctcttttgaaaacagggaaatagtaaagaaagactgacgtctcgtccaacatcttttgcctgatcctctccatgtgggcatcactcttgaccatctcggcgtagaaatcatttggtctggagaacggaacaccgttcttggcgcagagtgttcgagcttgttcggcggctgccaaagcttgcttgtagctgattagaagaaacaatcgttcggatttggaaggttaggcattctaggtagatgtctgtgtggggaaagacgggaaagtacatacaaagcaacctctcgctgcagatcatcaccagcttcgacagttccctggacaacctcgagcgagtggatagtcataagctcttcccagttcatgccgacgtagggggcgtgaattcgcttgtgcaaaactcccatagccgcctgggttcggtttgaagtatacatcatttcgaaaagggtttttcagtattttatcaacaacgcagaggttatgaatgaaagagcagaaattatctcaccttgttgtaaacggtcaccttttgctgaggaagggtgtcctcgtctatcacctcgttatcagactcaatgtcgtccagagcgagaagctcatcctcctcattttcatccatctcggcatcctcctcagcaaccccatcctctttttctccgtcctctccttcgttatcctcctcatcttcatcttcatcctcatcctcatcctcatcatcatcgtctgaacctccagccatcatctgcatggcctcctgtacaccctcctctccaagggcgtccataagtcgcttcatgtcgctctctgtaatcacttcactcaaatcgtctccatcttcactgtcatcctcttcatcgtcatcgtcgtcctccgagtcctcgggagcgggctcctcggacgaaggaggaaggggaacagcggctgcaacctttacgggagcgggcgattctttgggagcggactttgagagtttgttggacttgggagttgaagcaggttttgaggacactgctctagctttccctttgttgttgttgttcttggccatgacgtagaaagaaatgcgatgtgtgtatctgttctggagaagaggcaaaaggcaacgacaacggtggatccgtagaaattcacaagaaagaggagagaggaagaaaaaaggagaagctaactgcacagcctgagcacaaatcacgtgtatcacaaccggttacgctagcctcaaacatggttactctccagtcacagacggtccgtgcgcgctccgctggctgtgtccaactttctcttctctcctctcgtcttccaccttcttgttctcctgctgactttgatcactcccttcatcgtctccatcctacttcgtcttctttagtctattgaacagtattcatgtcggccaggacgagctcatctctgtgaggatttgtcttctttggttctctttctctttttctttcttcttgggtttgacgcccagaacagaaacgtggtgtaattttcccttccgtttttgcaaatctctgatatgctaaagagtcagagatccgttgaaggttactgataacttttttttctttcttctcgtgatctcactcggcatctctcgatctcgtcttgctttctgtcctctacaatcgttctcatgtatgctcaatcatacagaccaaagaccatcaggctcaccggtcagccttccttacgttgttgtctgtctgttactcgagaacaggctgctgacgtcgttttgccactattttcatacctcacctgtaacaactcgggattactcatcttgatcattctatctaaacttaacgtttaatacatttctctccttttgcctacccgtctacacagtcgtcgctgctgattctttggccaagcgagatgtcttcacgttagttcgttgtatccttcgtgctcatttacatccgcacacactctcgcttcatgcagtcttaaatatatattgggaattctaaaattaatcaaccgatcttccacctcgttctgacaaccaacagtcttcctaaccctttcgccgtcatcactgtcgacggagaacagacctacacaacaagcgtcatcaagaagacgttgaacccgtattggaacgagaactttgacatgtcggtccttcttacttccactcaccgaagatcgcatttgcaatcttgtttctatcccttgtgttcttagggtttctctggcttatactaggctctaaacctttgctgtatatctccctcctattttcaacgatctgtctccgccgttcaaacgcaatacagtaccgtcaaagagtcttcggttgtcgccgtacagatctttgatcagcgaaagttcaagagaagagatcagggtttcttgggtgtcatcaatgtgaaagtgagcgatgtgttggatctcgagttgggtggacatggtaagttatccttctttggagacgtaatcaacaagctcgtgtgatctgcctcatgaaaaccgtccgttctgctcactatgtgttcctttccatgtctttcctttaacagagatgctcacaaaagagctcaagaagtctaacgacaaccttgtcgtacacggaaagatcatcatctatctttcttctaacacctctactcccatcaccaatcctggtcataacaccacaccctcccctgctcttcgacctgagaatgctggtgctccatcctcctcgcacagtatcggtgacgacttttcaaatctgtctctgaattcgtcctcttcaacaggtgctataaccagcacaggtcctaactcgctcgcgaccgaaagcggtcgtccttctcagatttctgttcctactccgtctttccctgcgcttccctcggctggatgctcatcttcagcgggcggagcgcttcccgttgtatcccaaagtggtgctcaggcagcggcaaacgtaggaagccaggctggaggaaatcctcaacaggcagcgatgaacagaaactttgatccccattcggatcagcacggacctctgccgctcaactgggagaggagaatggatcatttaggcagacagtactgtatgtcaactttcagttgcttctcttcttggtctcatcgtcatgtttcggtcaacaaatcttcatatacaagactcactaagccgaatcttcgatcttatatcactttttttcctttcttatccataaatagacgtcgaccataacactcgaacaactacttggaaccgaccttccccaacgtcgtccaactccgctttggctcagtcggccgcgtccaattcgaccgctacggctgaggccctccagcgacacaacgctcgaacactggcggatgatcttcttgagaccaccgcctctggaggagcccgcgttggagctgccggtgcatccgtcttgggccaaggtgcaatccctaatcctggagcgcagacgaccgctggaggaggaccaatcccagctggttgggaacagaggtttacccctgagggtcgaccttatttcgtagagttcgtcattaccatctttgtcgcacaagtatcttgaggactattgctcaaatcgatctgtatttgttctttattagccacaacacccgaacgaccacctgggttgatcccaggcgacagacccaggtccgagtggtcgatcagaccggaactaaccgaacgcagccgaccactgtttctcagttgggtcctttgcccagcggatgggagatgagactgacaagtaccgcacgggtctactttgttgatcataacactaaggtctgttctgatcatcttcttcgaatgtgccttaaagcgccagagtattgacggtcttcatcttctcttcatgtccatatcctccctaaccatcaccatttagacaaccacttgggacgacccgagattgccgtcatctttggatcaaaacgttcctcaatacaagagagatttccgacgaaaacttatttacttcagatctcagcccgctcttcgacgtaagtccactgccattctgtcaaagccatcttgttctgcaaggttttcctgtaataacatcacattcttctgatctgggttcacagccatccctgggcaatgccacgtcaaggtttcgcgagagtccatctttgaaggttcttatgccgagattatgaggcaaacaccgaacgacctcaagaagcggcttatgatcaaattcgacggcgaagatggtttggactacggaggactgtctcggtccgtacttggtttttttgctgttaatcgtctatcctagtgccatccagctgatcaatcttcttgcgcctttacagagaattcttcttcttgctctcgcacgagatgttcaacccgttctactgcttgttcgagtactcggctgttgacaactatacccttcagatcaaccccaactcggatgtcaatccagaacacttgaactacttcaagtttatcggccgagtgctcggtctcggaatcttccatcgacgtttcctcgatgcttacttcgtggcctcgttctacaagatgatcctcaagaagaagatcgtgttggaggacttggagagtgttgatgctgagttgttcagaggtttgaagtggatgttgtacgtatcgtgtgacggctcagaagtaaaggttttttcatgttcacagactgactgttactcgaatgtttctgatccacagggagaacgacatcacagatgtgctcgaaaatgtctttgctaccgaggaggagcggttcggagagattatcactatccctctcatccccaacggagagaatatcgatgtgaccgaagcaaacaagaaggaatacgtcgagtaagtttgatctgttcggtcttgaggataggaacttgactgctgatgagttgttttttttactctctaagtgccatcactgagtaccgaatctcgaagcgagttgaagagcagttcaatgcgttcatgagtggtttcaatgagcttattcctcaggagctcatcaatgtgtttgacgagagagagcttgagctgttgattggaggaatggctgatattgacgtagaggactggaagaagcacacggactaccgtggatataacccttcggacgaggtcgtcggctggttctggaagtgtgttactgagtggccggcagagaagaagtctcgtcttcttcaattcaccaccggtacctctcgtattcctgtcaacggcttcaaggatcttcagggaagtgatgggcctagacggtttactatcgaaaaagctggcgaggtcggtcaattgcctaagagtcatacgtgtttcaaccgaatcgacctgcctccgtacaagtcgtatgaggcgctggagcagaagttgactatcgccgtggaggagacacttggtttcggacaggaatgagctgtagagaaagacatggcccgcgtgcgagcgtgtgtgctccttccttcctctcttgcctttgtttccatctttttctcagaaaccgttatatcatttgagtcgaccatggctcaatcgtcttcccccttctccgatgactactctctcttttataaacttgtatctattctctgttgctttatctcttcctcacattcttctgtttacttccttctctcttcggatctcccagtcaccatatttgctgtttgtcctatccttccagtcgtgtgcctatgattccttgtcttggccttcaaatttctacaaattacatttccgatcggtccaattctttctatcgccttatatgagcatattcaataatttcatgtctatttctattatcattctctttccgccattgtttttctttgtcttgtttctctttgtttgacgctctatcatgtgtgggttatgttgttctcgacgtcaataaggattgtgatggcttgtgtacattctcggtggctacgacggaggaaactgactgcttgtttagaccagacgcgggagacaaagccaccttcagatggcgtctgataacgcgatgagtgaacaacctcgcctctatctcgctagctcaatcagcctttccttgattgcgtctcgacaaagggacccgtatctcgcctggcctgaaaacagagtgctcacatccatttctatctctctctcatctctgttgtcgtcgtcgtcgtgtagttgcagagaaatttgtcgtagattcgatcgtaagaagaaaggaagaggaaaacaagatcgtcatcattcgagtttcccgctcgatcatcttccgctcaaagggagagataacaaacccgttccatctttgcctcttctttctcccattctgtcgccactcttttgaaccttctcatctttcatatattcgttcggtttcaacatatttgatttcactccatcccatcccgttccatccaccacagttcatcaaactatcatcatacctaaaaggtagaaccacttgactgtttgtctacccgactgagtatctggaacaaccgatcacacgatcctcattacgccaattggtttggttcgactaaactaactatctatctatctatctatctatcaacccgcttcatcaaacaaaccagaagggtcaccccattctagcatcctcaacacttccgttctctgtcctaactttatcatcagcctatcggcctgcatttgactcgaatgtcaagcacgtcgagcgttgtctctcgggaacgagagcgagtgggcaattaccttctaggatcagagataggtagaggtagtttcgcaaccgtcctcaggggatacaaagcggtacgtttcagtctcaatctgtttgtttttttgttctccattccgtcctttatttctacgacgtgtaggaagaagtcttcatcttccctaagggtcgagtaagatggaaggcgatgaagatatgatgagtcccctgcctgctcaaaccttcgaaaccagacaatatccgtcttttcaggttccacgtctctttcctaccagcattggcggggacaggccacaattcatttcgagccatgctcagttctccgcaactcgaacatcttccccaaaggaattcaatgacacaggaaacccgttcaaacatatctgataaacaggcagctgaccccatcatcttgttttttcttacttcctgcgtctctatgttttccgatgtcactctcccttaactttatatcttatcatggtaacaaacttcgggccgaatgggattcggtcaaacctagacgacccgagagacggtcgcgatcaaggttgttcaacgtaacaagatgacatccaagttgttggagaatcttgaggcagaaatagctatcctgaaagcgatccatcatccgcatatcgtcggtttagaagactgtctcgttcgtcctttcgtctttctctatctcaccgtttcatctgtatgactaatctcaactgttggatgtcattccttctgaactatcctcacgatgccttgccttttcatattatcgtatctatttcagaaaatggacgaacgtatatatcttatcatggactattgctctggtggagatctttcgttctacatcaaaaaaagaggccgactgccgacattggaatacgtagcagacggcagtacgaccaagcagttctggcctcatccggaagaaggtggcttggatgaagtcgtcgtcaagaacttgttgggacagctaggtcagtcggtgcctgtactcatcatctgacaggtcatggcagtcactcaatcacaatcccatgtatccgtcccttttctcgaatttttagtattggcccttaaattcttaagatctcaaaacctgattcacagagatatcaagccccaggtaagtccttctctccccgcttgcttgactattagtcacatgcacatatgaccaccatgtttaatacctggttgtattgagagatcgtgctaactacttaacggactcgtgatttgattcggtagaacttgctgttacaaccacctacgctcgttcagctggccggaggtcacccgctgggaattcccattctcaaggttgctgacttcggattcgcccgcttcttggaaggagcgagtatggcagagacattgtgtggatctccgtgagtgtacctttttcgagtgagatgacgacatttgttttataaacttaatgactttgttgatctctctcgttttcgaatcgttcctcgcgaaccggtcacaggttgtacatggcccctgagatccttcgatacgaaaagtacgacgcaaaggcggacctttggtcggtgggtacagtcctttatgaaatggccgttggtagaccgcccttcaaggcccaaaaccacgtcgagcttctgaagaagatcgaaagaggagaagatcgaatccggttccctgatgagaaatccagttggaatccaagtccatcgacggaggagggtttgcctgtgcagcagcctgtcggaaaagctgtcaaggatttgattcgaaaactgctgaagcgaaatccggttcaacggttagggtttgaggaattctttagacatgaggtttcgattgagtatgccacagcgatcagcggcggtgaagaggcagaacgtagaatcgaggcacgggcgatcttgtcaaacgtgccagcgtcgatgatgcctaccatgtctactccccccgaagtcaaacgaacttccctccaggcccaccatcgcccaccacctcaacaacaacaacaacaacaacaacaacagccaacgccttctatgccttacccaattccaacacccgtccgacccgctccatctttaccaccgttcgcacttccgttacccgcttctccgccagttcaatcatatgtgcctgcgacgtttcatcagacgtcatcttcaccaaccaatcgaccgcctttggctcccttgacagtaccgtcatcatcggaacttgcttccgctcaatatgcccgatcagctgctaggccgatgacccctccgctaacttcccgtcaatcatcaggagcatcccctgctcttcgacaatacagctttgaaccaaagtatatggtggatgatccgctggcggccagatcgcctactcatcttgagtcagaattggatgatcgggaaggacgagggttgatagggagaagagagagtcactcatctgaccgaagagtgtatatgagggaggttatgtctgacgcgaacggacgaagagatgaacctcaagtgaggcccattaatttagacgggacaacaccggactcgagagcttctcccggtgaggtcgaagaggattctgcaagcgattatgtgttggtcgaaaagcgaacggttgagatcaactctttagcagatgaactcgacgcggcgtcccaccgaccgaccactgtaaaccgtcgacgaagttctcgaagtttgctttctcgaccgatctccgcccttacctcaggaactagtccgcctctcagcggaggatcttcctcttcctttcctcattcgacctcgttcgcgctgtcgataacaccaccttttgcgctcgcatcttcgccgaaccgaccctccccgttgcatcaacattatccccataatccgcatcatcaccaccttcaacaacaatatgcggtttcttccttaacccgtccgctctctgttcctcacacaccgtcgtcgttctcgtccagtccaggaggaatttctacccctctgatgagcgtcaaccagacgcaccggtttgcctcgtctcctacagctggtggcgtcctcgccagagcattctcactcgcttcaggtaagttctttggcgccagtccgtcttctacctcggctgcagcaggcgtcgtcgcccgcacaacggccaggaagaaggccctcattcgagcgggtacaaccgatccagcggaggacgctcttcttgcccaacttgatgatctggcacagaaggcgtttgttgtgttcgattttgcggacgtcaaagttgaacagatcttgacattcgcaggtcaaggtgcaggtcaacatgttttaggatccaggccaaactcgcctggttcttcaggagggttccagcagcagtcgactggtcaacagccgatgtcatatcaacctcagaaccccataaacactcttgagcgaaggcgatcatccgtccattcaacttcaggctcggaagctagcgtgttcaggatggatgttctcgctgctgaagcgttgttgttgtacttgaaggctttgggtttcttgcaaaaaggaatggaggccgccaaagtattttggatgagtagacaggtcggacatactgaagggggtggggaagtggatgagaccagtatggagctcaacgagagtacgtgcaagtgtttgcaagatctttgggccttgtgcgattaattgattgatattaataaacaaattccttatcagctgttcaatggttccgagctcgttttaacgagtctttcgagaaagctgaatgggccaaagcccgatcagctgatgaaatcccagagtcggctgcgttcgctgaacgacttctctatgaacgagctatggacttggttcgtcttgacaattttggagaatttctaactcagttttgaacagtggtctaattctcgttgcttggcttcacttagtcccgaacggcagcgattcatgaagcgttgaacgaggacctcggatcgatcgagcatgcctacgagactgcggtttggatcttccaggctatctcggatgatactttccgtgaaggagcatatatggaggaggaagatcgtttgacagtggacaagtgtgagtggatcgtgacgttcctttctctttagaggaggaattgaactaatttataaattttccatacggacgggttcaatctagtcttgaaagcctgtcagaagcgtttggataatgtcagaaaacgccaggcagctatagtagcggccactccgtctggtgtggggaataaccaaccctcggaagccatgtaggccagtaccaacaactaacaggttatacactcttgtagattttctccgatatccgtatattctcttgaactcaagaagccgatgccctttccttcactcgttctcttctacctgcaactgtccttcttctcttctctttcctctcctctctctagtctactctgactactcttccctccactccactccactcaactcaactcaactccattccaactatcggtttcaaatcttctcgatctcatcaaccatactttctttagcgattccattctttagataggatgttcaacttcgtccgaccatcattattctgccttcgacggattctcttttctctctctctcttgtcattgcattcagtccttcttgtggtgtttcgtctcatacttcgtgagtctcttgacagttcatctcgcgctgatctcttcgtgattgacattcatattattatttggctttttttcttcttgagacctgtttcggcttgtacttcggatggtctgatagctcgtacgcaaatgtatcgcccgaatatcgagtcgtttcttctcattctctggatctcttcccatttccttcactgtctgtctctctgttcttccacattccgcatcttcttttccatcattcatctcagctcgttttctctgtttctgcttcttgtctaccgacgtttttcatatactccttcatcatctctacttattctcatttctctctttctttttctatcgcttctgttgtattatcggcgttcttcgcctcttcttgtttatgtcatggttttattgacatctcttcgcctaatgtcgcgagcgaaaaaatctactcaaaagaagatggctcaaacccgaggtgcatgtcgctatcgatcactaactcaatctttatagtttctggacctctcgtttgatattactctccaagaactctcttcagccgcccgacccaaagatgatggcccaggaccaactaggtttcgttccacctgcgccatctgttgaactgctctccgttattaaagggacgtggtctttgtacttattgacgaaccggagcattttcagcaggagcgcttgaagagcaggttgtctgaatgtggagcagaagtgagataagtccatcgaaagacgttgaatcgtcagctcgagagccatgtcagatgaggaaagctaatcagaaaactaacgtgtagtccgtgctgatactcgtacgttcttgttatattcaatttttcagatcaaaacgaaaaagaaggattgaatgagattgtatcagtcttctcggccagagtgggtagagagtgaaggcaaggtgatactgacgacgttcagattgacccgtttgaacttggacgttaagtatccacttctcccatgcaacgtcctcctgtgacattttttccaaacgaacagaaagatcaagaatcagaggtgtcgatcagaagccgaacgtgaaacgttagaaagaaggggcgcattgaagaaaagataggaagaacatacctcgccttttgcgaaccatgtctttttgggtctcttttctgaaaaaattagcgaaatctgtcatgggcaagcaattccagttgtagccaccattaaataataaacaatgacattgaaaacaagacggggatgttcagatcagttatcgtatggcttgagttggtattttatgctgatacaagatcaagacagtgtattctttacctggccattccaattccgtactgatccaattgtcctccagaaagcgtcgactcggtcagtgactgtctttgccagctctggatcattcggtattgactgaggatataacatcatgacttcagatcagtctcttgtcgagctcgttcagtctatagaaacttgagtttcttgacatacgaatgtgattcctaaaacgtctaatgtcgtaggtgatacagttgagtacgttctttggaacaatatggcaagtaacaaagctgaaatgagtgatgtacgagctcatgatcagcaacctttagcctttacatgacgaatcatgatgataatctgtgatctttagcacacctcgaaggacgtctttgacttgggttcgttcgacggtctacgaactctgaagagcatggttttagcgatctcatgcagtaaagaaaataaagactgagaagaacaattcaactgacgaatgacgactcaaatgtctggcaagctgttggatctttagagtacatcagaggaatgattgagagttgatggttgacaagagaattcatcaagatagataagcgatttatcggtgatcagcgatgagacatctcgcacgaacggcctcggcctcgtcctcatcctttccattattccggtcgttcatcttcttttctttcaacaacacatcatctcgatcgttttgatgcttatgagtctaatacggatgtgtgcaaactgcccgagagtgttctctacaggaaacatcatagagaaatcgaggctaaccaaaagaatcacgtcattagccctgtctaaccgactttgcaggtgcatcatctttcgccattacatataattcagagcaactttgatgaacaactccgacaggctttcctcggagagaagtccgagtagaagacgtataaaacgatattggatcaggtcttatctcttcgatttgtacacatcaaaaaaacatctctcgatccgaatatactactcaccatgagccttaagccttctctcacctttcaacgagttggatctccttcatcagatcatacactggaaattttcatcgactatcagtgtggccggtgagtagcactatttgtcgttattattcgtagccttccctgatgactgacatgtatttctgaagagccaaggcaatcgttcaggccttgaacaattttattgttcctcgtgagtttatcctagacagctcacagcttcagacgtagaagctgagcttattcgaaacccacgaatcgattgatacctaatgcagacatcaaggaaggcggcaagctccacaacaagctttccgttatccttcgactggcacctcagaattggtaggtacaactggcatgcctttgttatcttagtcaagttatctcactgttgtgctttttcgtttcaaggttcgcaggcatatatcctcgtcatacctagctgaagcagcccttgctgtcggacatttggaaccttctgcgttttgagaatattctttagctctgtatgacaacaaagcatcattcttgaatgtggttgtccaagatttgagcgcaactcagatccgaaaacaggcagctgagcgtatgtcgatgtttctactgctgatatctaatctttcaatgggtatatgtacttgcgctgatttctttccacctgggatctgatatcatgattgattgtatgtccagtcgccaagccgttcacgacggcaagcgtgttagacgccatcaccaacaagacacatgcaagcctaggaaacaatggacccaatacttccacacctgaccttcagtacaacagtaaattctatctcgtttttgctgagtcacgcttaactcgatgcgtctcatttattgcgctacaatcggtcgatccggaactcaccgtatttattctggtctttttattttttaaagtcaagtacgctagacaactatcaattcagcacaccccatcggtcgcgctggatggaatcatccaaggacacgtgtttgacggaggcgtcgtcaatgggattccctccagttggggacagaccgagtgggatgcttgggttgagaaggaggtgctcgcttaactcgttgggtcgggtctaattagttgtatgctcatttaaataaatccttccgtctatacatgctgtgttcccctttccttgtttactatataaaacgagagaaaagtaaggttgtgtgaagagaaagtgaagatagtgatgcggtgcaagcgtgagcgttgcatacattctccccgaacttgggatgacctcatgggtggattgtgcactgaacaaccatagatgagattgataagaaagtgaccctccaaccaacacaccaactcttcaaacttcatctcgtactccccatgtttctctcattgatcagatcagttgcttgtttcgcattgctctcgctgactgttcacgggcacggtcaaatatcttcacacaagacccggatggtgagcttgggcttcatcgctttcatcttcggttggcgatattgatttttggtccttgtatatctatcattcggggatgtgtgatcggtacaggctgggccgaaatctaaggaggtctgtgggaaagcattcaacggtgcgcgatatagatccgatatatatgtggagtcttatgaagcggactgatgactatttattttctgaacgaggaatttatcagacctttgggacggagaatacgacttgaatggtccgttcctcatgatattcactttgctcattaggtcctgttttctcaatgataggagtttttacctgtgctcttctggttctttaattgacagatagagttggtccgttgttctctttcgagccgcataaccggtccaaggactggcctcccgagtgtaaatggtgagacggctcgtcgctcagcatggtattcctaactatacatacgaactaatttcgttcgacgtttgtatatgcgtgcacatcaacccaggtacctctgccaaggaaaacagttcgaagataataaagacaatgtatacacgttctctgttgggcatcatctccacttggagatcttcattctagctgcccacgaggggactgccaatatcagtgtggttgacctggagaagaacgaagtcagttctgctcaactcagaagaggttgttgaaagatcttttagatgttgagaagagactgacatcaaaatgtaacaggtgatcccaggtgcgcaacttcggtattggggtgagggatacgccaagctgaggacatacggagatgggccttaccctcctgctgatcaggtaaacatcctcttgagctgtatacctattcgcaatgtactcgtaatcactgatatccacttttacattcgccaacaaattaggtcaattttgtggttgagatgcccaatttggatggacagtaagcagtgatcatccgctcttgtatctggatagtttctctttgacaaggttaactctaaatgtgtgaaacaattatcaggtgttcccaacctggtcaatgtgctatacagtggtggtggtggggtaagcagagcgcgagggaccagtattatgagagctgtacgtctcttcttaagacaaatgcatctgtattatatactgtcatcaaaaacgagtggctgatcgatattcaaaataaatctgttgctttaggcatcgattttgtgcagcctcaacaagtgacggttgatgaaggtggtgctcaagaggtctttggtgcacctcaaggtcatcatggacactgatgagttttggtgtcctagctccctccttctctcttactcatcacctctttttttttctctcacaagaacaatcctcccatatgtctcttactctctctatatacgtacatatgtctctatatctgttcatatacattatttgttcataatgcacccaaaaaacagcaaagaaacagtgtatagaagatcctagtaaagaaaaaagagctggct

SEQ ID NO: 231 - DNA, 63568 bp, Xanthophyllomyces dendrorhous
ctccatcaggcttccacgatgggctgtacgtttgtctctcaggttgattgatagccgttcgggttcaagagagaccctgtgtagacttcctgacagtcgtttactctatttcacatctttctcgtcctttgtagtccgtttcctcaaccttgttcggccgtttcaggcctttttggtaagtcgctcgactcgtccaatgggctcaaactgttgatggtgtttgtgtctcttgcttttcactcacacaaccctgcctttgctcttgttcttctttctcttcagcctgaggtcactgcaccagagcgaaaggtatgatcgacgtccccataatgatgttaagctccaagacaggtcgccatcacgctcacctctttcctactccatctcctcgattcaggttcctttcgatcaaaaagttctctggaccgctgttactcttcttatcttcttggtgtgctcccaaatcccgctatatggtatcgtcagttccgactcgagtgatcctctctactggatgcgagtgattcttgctagtaacaggtagggctcttttttttcctcagcgccctgacctttcatctctatcacgcgataaaacctccaaagagcctgtatactgttcagacgaagctgacagctagtcatttgtatatctgtccctcactcttcatcgcagaggaactctcatggagctaggaattacccccatcatcacttctggtatgatcattcagctcctcactggagctcagctcatcgaggtcgacctcagtgtggccgaggatcgagtgctctacggggctgctcagaagcgtgagcctattcttcttctacgcgaaatttcaggattttattgtccagcttcctttgcttctctcatggttcgatccgctgacaaataggttatttctatttctccaaaacatctttttgacgtgtctccatagttttcgctcttatcatcgcttttggacaggccactgtctacgttctcacaggtctctacggcaaaccttcggatcttggagccggagtgtgccttcttttgattgttcagctcgtagccgcgtctctcatcgttctgcttcttgacgagcttcttcagaagggatatggtcttggctctggaatctctctcttcatcgctaccaacatctgtgagaccatcatctggaaggcattctctcctacgactgtcaacaccggtcgaggacctgagtttgagggagccattattgctctcttccatcttctcttcacctggaatgacaagtctcgagctttgaagacagccttctaccgagacaaccttcccaacgtgatgaacctgattgcgaccgtcgccgtgttcgctgctgtgatctaccttcagggtttccgaattgagatcccggtgaagaacaaccgattccgaggacagaagggaatgttcccagttaaactcttctacaccagcaacatgcctatcatgctcgaaagtgccttgacttccaacgtcttcctcgtcagccagatgctcttcagccgcttcccggaaaatatcttggtcaagcttcttggtgtttgggaggttcgtacctctgatcttcagttttaatcgatactaaagtctcaaaatcggcctaggagctgactttatgtttaccacctacatctacggcctatacagcccatcaaggattcatcccagctcaacgccatctctggaatcgcttactacatgtcccctccccacacaatcaaggagctctttgttgatccccttcactcggccatctacatcaccttcaccgtcactgctgtgcgtgtcctatccttttctctctgatgtttgtatgttcgagaatcactgttcttattccctctttgtctcttgtgatgcgtggcattactttcagtgcgccttgttctccaagacctggatcgatgtgtccggttccggcccccgagatgtcgccaagcagctcaaggaccaacagatggtcatcgccggtcaccgagagggatcgatgtacaaggagctcaagcgagtgatccctacggctgccgcttttggtggagctattcttggtctgttgagtgtggcggctgatttgagtggagcattggccggagggactggtatcctcatggctgtcactaccatctacagctactgggagattggaatgcgagagagcatgggagctggggctgacatgggtgctctcggagaactcagtacgtcttcacaacactccttgagcttgtcgcacaccttggcataggatgtttctgccaggtctgaatactgattctcttcaattctgaatctaaaacagtgggatgagcgaacagtggagggttgaactgaagagaaaggagatatgagatcctcctgtacggagaaagaagatgaaaaaatgcgatcagaaccaatgaagtaagatatctcgaaggaaatggaggaagaaagtcaagtgtgggaccggaagagagaggtcgtcttctttagaagaatgaacatgcaattattattttctaaaaatccccgatctcagaatgttctgtcagagtacatacatcttgtctattcagtggagaacctcgaaagaagaaaaaagatgaacacatatatatgtacaaaactcctttattgaaccgtcttctttgtttcttctcgagatattcttttgtgtgttggctgaagcaaagggaaggttccttttactttgtttcgatatcaatatcgtaccctttccctctcatctctccgatcaactctttctcgacccctccgtcagtgataatcttgaacctaatgacttggaatgcagatttcttgtttggtctatttgaggaaatccacacggagaaaacggagataattaaagggccggtagataggtcagcgctgagagctctgaggatgtaatgagaagcaagggaaaggataaaaggagagagggctgtaccggatcgaagtaaagtagacgcggcctgcttcttccactcccttgattcggaaactaagatgtcaaccggatcagatcggattggttcgacgagtgcggttgagatgaaagtggaagatagaatgatataggaaggggaggaggagtggtcaggtcgtttaatttgtcaaaaggaagaaaaggacagatagtagatctcacctcaggtctgctttccccttgaggacgttgatctgtataattaaaagaaaggatcggagaggtttgagtcgagtctcaaatatcgttcgtgggttccggtaccacagatacagaagggaggaaagagagggcaaaactaacgtttccctcaatcctgaatccgaccaaggcggccaaggaatgagagaggacaaggcaagtcagagttcacttctcaacaagaggaacgagggagtaacaaagacactcaccagggttcaccaccagtccagaacgtaggttccagatggacaccatcgcctagtaactcctcaactgcctcacttgtccgtaagacgaacatgacctgcctaaacacggacgacgtgagcttttcagaattcgtcacccaaccgatgaagaggacccaggcgattcctccaaataggatgaccgaaaccgctgtgtacatgagaagatgaggtagaataacccggttagcgatgttgagtaggttaaggctgaatgggaaaataagcctggtcgaacggacctggcacccagtaggtctgatatcggcaacgagacgatatgtacaattagccaattggtcagttgacacaccatgccaagagcacacagagaactagatactcacccttgtgtttggaagatctttcagctcagtagccacgttaagtctgggtgggtgagaccattgtccaggcttacctaccgatcgttggtttattcgaagcgcatcgtgggattgattgggcactctttgtctgggcgaagctgtggtagccaagattggttgagaccggacgaaacggagaaccgagctggtcgaaaagggagccgctctttgcagcctgcttgctgtcgaaatactcctggaaacgagtggcgaagctaacatagatgcgtgatggacgagggtgatggatggatggacggatgctggataggtatgagtgcttgaaggtgagagctaactgaattctgcttagtcagctttgtggaaaattcccaaacgtgagcaaaaaagaatctttgtcggttttctctttcctttgcccagccagcatccccatcgagagtgaagtctagcaagtacagccagctagccagtccctacgtagatccagagagcagtccaaacccttcaatagatctagaagagcaacatggtcagttggcttgtagttcttgtctgtaggggtctggttttttgaaggctcatccagatgtttccttttttttcccttttgctcttccactcttttcattcatacagagacctatccttcttagtggtgagtgtctttgggctcttgtgttgcttctttttcgtgtctacacgtcctgcattctggactattcactcatcatgtacaccttccttcctctctatctttggttccaccaggtcacgagcgatccctcacccaggtcatctacaacgccgatggtgatctgctgttttcgtgttccaaggaccacgagatcaacgcctggtgagtatatcatatccttcattctctctttcaatcgatagatcctttcttggtagacggcgatggtccatggcattcagccagagcttgcatggtctgacagatgatccttcgcgcgatgaatcaacaggtactcgcacaacggagagcgactcggaacgtacgttggacacaagggagctatctggtccgtggctgtcgactgttagtttctttctatatccttttgttcatgtgtgctcgcagaccagttgggcttagtcaattcaaccttccctggctccccgacccgattcagccaagtccgagctcctcctctccgcgtcggcagacaactgcatgaagctctgggctgtggccaccggaaagtgccttttcacttgggagttccccaccgccgtcaagcgagtttcctggaagtgagtgattcatcttgctagggctgtctgaaggaagcgtcaacatactcaatccgaacaccctcttgcttcctcttcgccagtgaggatgactctttgttcctttccatcaccgagcagcgatctggttaccagggagccgtccgagttcaccagatcaaccgagaaaacttgaccgagcgtgcgttaacactttctttactttgagtccatttggcttcgagacactaatatgtctattgatatctgtaaatctcttcgctgcctattggttcttgaatcgtcaacacttcaaattgttcaatctcgttctcacaccttacccaaacctgtctcttttgccgacctttctacactcaaccttcttgctgctgctactcgccacattctttctcctttcacgtgtttcaaaatctgcagaatccgtcgagcctatcactgaattcaaccctatcggctccaaggccaccgtcgccgctttcgcccctttgtcaaagaacatcatcaccggtcacgagtctggaaaagttgccctctttgacgtcaagagtggagaggaggttttgtcgaacgagaaggctcacgctggtaccgtcaccgacttgcagctcagcaacgacggaacttactttgtcactagcagtaaggacaagagcgccagggttagtcctagtctagttttcaaggagaagacatcagatgattcagggaggaaccaagcgtgaaacggtgttcccctagaaggagacaaagactgaccgagattcactccatgctgtctgcttttgtgttttcgttattagatacaccgaacggacgatcttcttgttctcaagacattccccaccaacacccctctgaacagtgcttccatcactccctcccgcccgtacgtcatccttggtggaggacaggatgctgccagtgtgacgacaacttctcagcgacaaggaaagttcgaggctaggttctggcacagagtgttcgaagaggaggtcggtagagtgagaggtcatttcggtccgttgaacacagtggccgttcacccgtcaggaaaggctttcgcttctggtggagaagatggttatattcgacttcattgggtacgtctttctccttctccttggttttttttttctgatgcatcttttgggagagggttgactgatatcatggaacggcgttctgttttcttagttcgatgagtcttatttccgtgcacgaccttttggagatcttgagccggaagagtaaacagagtggacccattaaaaaatccagaaaggaggaactttctttccttttccttccttttcccctctcttcttttcttgatttctggcttcgatagttttaccgcttgagtagacaaataggtgggagagggtagaggaggaagatggcaagaggagggaagtgaggttttcttttgctgctgtttaggtaaagaggtgtagcatttttgttttctttctatcatgacttttcattactttattttggctgcatagcaagtatcgtaaacattggtctcttcgtagtgagcatgatctgatcccgatgaaaagaggggagaagagttgtttcagattctccagagattgaacaccaaatgaagatctttcaggagatagtgagcaagaatgttttcatgttgatttgaaaggatgatcaacatagttcacatcaatatcccagcccagcccatactttctctgccaatctactcatctctctcttcaccattctcactccttcatcatgttcattgttcgtctcctttctatcaacatgtggagcctcgagcagaactacaggtcttccgctatccccacctgcactgacctcaggaacgagaggaaggtcacccagaacgggcaggttgagttcacgcgctgcttggtgaaacttgtccggaggaccgaatggatagattggaggtgtcgtggggagatgagacatgttcaagaggaggccgaatatcttcaatatttgataatatgatcgatcagaagggtgcgtgagtaaacagtcacatatagtttaagcggttgagcagagagaaggagacggactgggatggagagtttcttgaataatccgacgccttttcgagcgtcaatcaaggcgatatcctgaggagttgagacgatcaccgcccctgttttatgcagttgccggaagaaacgcccaatttagatgataaggtccaaaagaagaaaacagaaaatacaagatacatcaaaaagacggtctccagccgaagaaaaggtagactgaccgtcgacaatgacgagttgaccgagcgagagtgcgacgtcacccgttccaggtggcatatcgatcactaacacatctaaatctcgacctgtcggacgatctgatgattttgtagacgcagttgtgtttgagtgcgcgtctgaggtccaatcggtatcgaataggagctgatgggttgtttgatggaaggaaaaaagttatggcttgatgagaatcctcaatacgattggaagaaacagagagaacgtaaagagtacgcacttgttggacggctttcatcaccattatccctcgccaaacgatcggattttctccggtcgcagactccgcttatgatagcgtcattgaagagaaggaaacgtccagtaggaataacgagtcaggaacatctaatagctcaagtacattgaccttatgtagaaagacacaacggcatcactcacgaactagatatcccatcgacatggtgccaactccatggttcgtcataggcaccaaccgtccacctaaatttccgtatgaaaagatacgaaccaaacacaagatgtcagcctccggtcattttgaatctgaatgtgagtaagctacacttgaaaatgcgcacatgtgcgcgaagcaaagaagaaaagcgtgtaccaggtgttagctccgcttcgcccaagccctccaatcccatcaactttggaatcgatggtccaaagacatcaagatcaagaactcccacacgcttagtaggttgtgtgagtagcaatgaaagcgcgaggttgactgaagcccatatgatcatgaacgtcagctctaggatagcctcagatatcagaatggatagagaatgcgaaccagcgactgtgctcttcccgactcctcctttcccactagcgacgacaacgaccttttttactcctggtattctggacttccttactggacccattctaggcatgaccggcggtctattccctgcatccttattcgacggaagaccctatgatggatagagagcatgttagggttagttacgagaaaggctcagcaaaaagtcaagaacgcaggtagaaaattaaggctgacgagaggatttgaatgtgacaggttgggtacagacaaagaaagagacctaaaagcgtgcagtgagcgtacgcttgagcgaacaagacctgactgcatggctgaatggctgatggttgattgccgatggtagtcagtaagatggtgatgggtgatgatgggcccctcgtcctcttgcacttgtactgcttttcaagatcacgtgtaaacaatgatgtggcgttcttatcgatcaatttacacacccgctctcgttcactatcactcactatcatcactatcaccatcaccatcatcatcatggtctttctcggcctcatctctcgcttctttaggtaagtttatattctggtcgatgtgatagaacgcacgttcttacgaatctggcttgttttgctcctgtaacagcaacctcgccgcctttgtctatccgtcctacgcctcttacaaagccctgatcgagtacgacccggcacagacagaacgctggcttgtctactggacttgcatcggagctcttacagggctcgagagtatggtcagctggatagtggtctgggtaccgttctattcggaaatgaaacttggttttgtactatggttggttgcccctcaaacagaggtcagtcctttctttctccttgacaagagcctatgagcgcacgtggatgcgtgtaggaacgaacagagaacagaaaggagctgtacttaggatggatatggaggatgaaaggtgccttgttcgaaaccgaacgagtgaagtttcggcaaggagtttacctaatccagcgccgtataggtcaatcacagatcgcctatccctctttcatgcatagtgtttgttaaacctttcccgatcacaccttatggaccatcatttgtttggtcatatgcatacttcacttacatgtccctgatgttcaactctaatccgataaaaattccctttttatcaatcagggatctaccctcctctacaagcaatatatcgcacccttctttgactcccacgaagccgatgtcgacgctacacttcgaaatctgcgctcccttggtggaacctggctccaaaaggcactcacctgggcttggaagacagctcgagagcagctcaatgtgcgagaactttctcacttctttgcgtttgtataacgtctgcttatcaggtgccattctacattgttactggattctagctggcggcagtattgcccgagaattccccatttaaccctaccggctcgctctcaaatccttcgaaatcctccaacaacggcgtaaatgcccctcatatcactcctattccttcttccatgcactctccctcatttcctccgactgaaggagcgtcggaatccaatactcagcagtcccaggcattcaatatcgcttctaatttgcttcatcagtacggacctatggctctcgctgccggccaagccagattcggctccaggtcagggcctactcaggcgcaaggatcaagcctgcctgcaggtagatctttctctgactcgaatgctactacgcttgctagcggcgccactaccacctctcgatcccgaccaactacctctcccacggctgtgatggacgtacatcaacgtcgatcagcgctcgaagctgagctggctgctttaccttccccaccgagtggagtgccgacccctagttcatctcgctcaggaagtccgtccgtactggggaagagcgggtatgaggagatcggaagggatgacgtgaagatggacgaatcgagtgcggctccagctccagctccagctccagcggcaggatcaggatcaggatcaggatcaggatggtttggaagctggacgggtagagcttcgggatatgggcagggcgaagaaaaagctgggaaacaagattaatccgttatcctctcttattcctcatgtatctacgcccatacgtcttgtacttcggtctttcgttcattcgccttgtgttcattgtttttctttttgcgccttctcactctctcctcagtttctcacgattacacccgtcctctttgtacctgtatccgtccatctgattttctctgcaccgtcctctgcttcatggtcccatgtattcattatgtctttttctcatcctgtaccagaaccgatagaacttcagtgttctgaaaagccacaagatgggaagagattaaccatggtatacgagtgattagtaagaggttacgaggtcaaactaaagtttttggagagatgcattgtccgtttcgtttcaattagagaagggtatacaagaggacactgaagaagggaatgcagtagagaaagaatgccggttgtcctgataagggtggaaacgtaggaaggaagcgcaagaatatgaaatgtgtagatatatataacgtttggatatgaatgagcaatactaaatggcgaagaaggcagctttgttctcgcatcttcactgtcctcctaagagacccagcagcaacctagcgcattcttcgtccgtcgcgtccactcccgccccgttagcaccaccactcgtaccgccgtctcctctagccctcccctcttgagcgcctctcacctgtctctgtccttgtccttgcgcgaacgcatgctcatgctttctcatctgagcaagttgggattgcgcactttggtgaggtcttccggtcccaataccggccccaccgccgaggacatcctccatccgtacagacggttcgctgatctgacccctcctcatccttttcgtccgactttccgcttcccagtctggatcgatcctatccggagtacccattgtgacccaagtgggatctcctcccgagttgaggctgcctcgaggtcgtttcgaaagaatggaagaggtggaagatgagtgtcttaaaggcgttcgtttcacagaagatcgaggtgtgctcgttctgatgcccgttgagggtgatcctgtgagacctcctgcgcctccgagcctgatcccgccattggtgttggcgctggtagctcgggaagctgcccagtctaaagaggcggatttatggatgggtgtccgatgagggaatttagttgtcgagttcatcttgggcgtttgtgatactccagggggtaaagacgcttccggtagtaccgctgtatatgagggggctgtggccgagtaagaaagcgccttgggaattgagaatgatgaggatatcgatctggcacgatgatgggttgaggttgacgtgaatagagtggaggaagaagctgaagaagagggtttccgttgagaggtcagttggacagagtgataggttgctgggactgatgaagagcgagaagaagatgaagatgtcgagtctgatgtcgaggatactgagcctgctgttctaaacggaatattcggaggattattttctcgatcagctcgagaaaacagagatccggcagtagtaatcgtcgtcgtcgacgaaagaggagggcgttgagtgaacagaggtcgacttcggcggtaggataccgaacgagattttgaggctcgaggtgtttggctatcttcctcggtgtcttccccactcgaaaagtcatcttcggccatttccaagagatcaccactaggaggatcactcatcatgttcttccacaaatctcttccgtctcctaaagacgggtcgtcatcgacagccataggccgcatcaaagatacagatgatgtgggtagcgatgagcgatggatctcttgtcctcgttctctatttggaccaatatgagacgacgaagaggaggaagaaggcgaggcggaggacttggccgagatataagcgaagggtagctctttgttctgaaccacagcatccatcattgatcgagttggcgctctatttgaatgaggagacgacctagacgaaggtgtcttttcgacagacgttcccggcggaactgaaggaggtctagccgatggaagagttgactcggaaaaagttcgttgaaatagcggggaactcttgatgggagagtacggacggggaaacgatccaacagatggcggcttacctacgtcgaccttgggcgttcgacgataggtctcaataggacccgattgggtcttactgggtatcgaccgagacgagctatttggataggtcgaccgcgggaagagcggcaagacggtctccttgtggtttgctcttacagggaacgacgagagtggtgcttgatccgagaagggatcatcatcctctgatgagaatgtcgatttgggaaaggcgtgggtcgacatggcatgaatgctgagtgcgccagtgggacaaacatttctgccttgggatgaggaaggaggatggtcaggagcgcgtttcttctcagtctgacgcttgttctgaaactgaacggacagaagcgcaatgtcgggtaaagtgatgaagattgatcagatcctttatgtcaagacgatactttgaaatcatgacagagcgtgaacatacccagatctgtacgtgacgagccgtcctgtcgaatatcgagcagtgtaaggtcattccacaagacaaacgtaagtttccgtgatttgtacgaaggaccgatcacagcactacaacaagaggaaaaaaccaaggaggaaacaaacatttgaacctccagcgcgattgcttctcgttctgctgagctcggtaatgggtttcgcaaaaaatgaccttccaacacggccaactctgctgggcttgttcgccttcgccgctttcttttcccagatgacgatggatcgggttcagtccccgtacccgaggacagaagagattcgtaccgagattgactgagtgatgacgcgtgaggagtggagacggtcagccgaagaggttgagttccaacccggttcgagcgtgatgatgatggagaggatatactgagcgacatgatagttgaccgaggagtcatcaatgaaccacccgtcgaactcataggtttaccatctgcaatggcgggtaagcgcgttggaccaagagcctgatctgaagacagaggagctgtattctccgatgaagattcaaatggtaaaccagggtcagacggttgagaggatccaggttgagtggcaatcaagccgatagtgtctgactgagaatggacgtgtctgtcggagagcgcgtcttcggaggctacggtcgagaccgatgttgtcgacgacgaggacgatggtatgagcgaaggtgtcgacaaggcaatcagcatggcaggagctgacaagacaagctgttcggattctgatgcatcttcagctttggcagtgcccgctggttgagatgatgatccgagtgacgtctcggccgatgaggagagtggtctgaatgatgtaatcagctgatcgccagaaccaccgtcagtgccaccaggaaaaggaatgtcaggaggatatgacatgaacgatgagaatagattaagaggaggagaagagtccacgttctgtactgaagagcaagaaccgatggagttgaaataaaaagatgagagagagagaaagaagaggatgagtggatctttctggagaggtaagttggatgaatagaatgaacgcgtcacgcgactgagacgcgttcgagacgcgtctttgcagcgcgtctcgatcacgcattcggcatgtcatttgattaccgtcggtaaaggtttatcatggtttaatgctgatgagtgtatggtctggcctttgagataactcttggtgggaagcaagtttgcaaagaactgttttccttgttcggttgttctctttattaagtgtctagcaaaagaccactatgcctgggacattggtctgctcagtcattatagacgcacactctcatggtacactgtacggttgaatgattcgacgattcatccacgaacactgatagattgcataaaaaaaggtccataaaaatacaactcgctctagccagcaaaggatcagaaataccctcctgttccctcgttgtttttctcttccacgcccaactttgtctctactcctatctttcacgccatcggcggcggcggtggaggaggcgggatgtttcctaccggtcctgttcgtcctgtccacccaggaggtggcactgagtagttctgcggagtgaaaccagccggaggtggagggtagttcgggtacgacggtcgctgctgggccgggtatgctccgtatccgggtgggggaggcggaggcggcggtggagtccctgtcggtgcgccctgagcaggcatctggaagccaggagggggaggaggcatgtatgaccctgttgtttgaatctgggaaggatggaaacctggaggcgggccaggcatgcctccgttgggcacaaccggattcgggtatgggttcgagccaaatcttgaaagcacattaagacggataaacagatgagcatgcgaatgggaatcgtcagagaagattgatgtgtttgtgaaatagagggaactcacccaacgggcatcgagtttgcacctgttacaccaccggccatgccaggagggggaggtcctccaccgggtcttccccccatgctcacccctccgggaagcgcgttgttcttctttgcctgttgagccaacaacctctctgcctcagttccgtgtctctctccctttccgtccttcttgaatgcatactgcacggtgattgccttgttcattaagaattgattcgacattgcctcgatcgcggcatctgaagcctcgaagtcgttatacgcgatgaagccgtaacccttggaaacaccggtagcaggatctcgggcaatctgatggtagagtggaggtaaacgcgaggataacgacacaaacagcgtgtaagcagacaaattcttacagaccccatcggggaatgcagttattgattcatagatgaaattctcaccttagcttgctggctgacgataccaaaagtggagaacgtgtcgtaaaggagtctttcgtcgacattaggatccagattaccgatgaacaggttggctccgacatcaagctgcttcttgtcatatgaggcctgtcggtccagatcgaacgaagatgtttcgggaaacgcgtcaattatcacgatccaactttaatcaagattcgcaagatgtgtgtacggaggacgtaccttgttgaccctgatgggctttccataaagtttgatctggttcatgattcgacaggcgtattcggcatcctcttctcctaggaactcgcagaagccgaacccttggtgggcttgagagattcgatctttaggtagatggacattgactgattgtgcaggacgttgataccttggaagtcagtaatcaaccctatgtctagctatgataagaaagactcaccaactggtccagcctggtggtgtggattgagttatgtcgtttgtcgttcggaagggatggtttcgaaagagatggttgaatgccatatgatgttgaagagaggagccggaagacaatcttgtcagcatgagcattgacagacgataagaaaagaaacgcttggacggacctgaagcatcagctcccaaaccagagcatccgtacatctctcgtcaaggttaccctgttcaaacaaaggaaacagcggtgagcgtctatgtatcgagagatagagacatgtacaagggaacaggagtaaaaaaaaaggaaacaaaaaagtgaagaaaaacccataaaatggacgaaacatgacgacaatatgaaaataagactaaccagatacactgtggcctcttggtttctatcgaactcgtgaggtgctctcgacatggtctaacgatgtccttctgtctgtcgggggatgaggtgagtagaagaacgtagtgcggttgagcgtcaaagaaaggattactatgtggaagaaagcgaccccaagccaagcccaagtgatggggcaattgaccccaaatttgcccaagatattgggtatttctcagatttacccgtgagccgtgttctgccttctcttttctctctctcctctttctcttcaaccccgactcgtcccaaacaccttcgaccttctttcgttttctttatcttctcaatatgcgagttactttgcccaaccaaggtggtatgcccgagggtatgtgatcgacttgtttacttgctcttttccgcagatcttcacgattcgtccggacagactctcaccgttcgtccttgtcttttcggtcttcccttattggcccttggtccttcatcgatcctcatctttgtaggaaagaaattcgtaggtccctctttttttcttcgcttctcgatctcttttatatgagcgacacagagaaggcgtatccgttactcatcttgacatcgatctgatttgttttgttgatgtggttccactttttttcctatccttctctgggtgggggcgatcctttttttctctttcttctcgcttttgacctacccaacagctcggatggtggggagctttcggtggtgagagacagaagggtatcattacctactgtacgtagcattcgttctgcaacaatttgctcctcctttccttgaatttgaagatatactaactttgttcgcaccttcgatctcctgctatgcttttctccacagctatctcccagaacgagcaggccgctatgcgaggtgctttcgagggatacatcttccacggtttcaagcgaattgcccgacacgctccctacttcgttcctcctttcgtcgtcggtaagtaaacgtttaggaaaatcatgatgtgaacggactaggcagtaaatatggaagatcggagcatgtttggctggtttgtttgggaattgggcttttgggcaatgggcatagagatcgagcaaacggaatgatgagtaaagagtcatactaagaaaccttcgatcattcgtatcttccatccaggttacgccgcattccagtgggccgagaacaagtacaacgttcgttctccttcgatctgtttctgtttctttgtacctgtgtaaagactgacgatgtctccttttacatatcgatttgatcttcgttttcgggtgtaccctcaatccaccgcctctgatcctcccttttcatccttatgtttgattcgaccaccatattctgcctcgatcggttccttcaaccaatccacatcaactatcattaccctccgttcatgttgttctgcttttaatcaatagtacctttgctctaaggagggacaccacttgaccatgctcgaggaggagggaggacactaaacgatgtaaaatgtgttctgtagtagacggtgttggcattatatttctctttcatgatgatttttcttcttttctgctcgccgactggcatgccctcccttgaacaagcgtcatctccttacagacaaagtccgagtcagatcatattgagtatatcgagaaatgacagacacggagggttgatcacgatccgagttgttagaagagcgaagcaagacttctcctggtatatacgattgagagtggttgacacgatacatttggagagacgatctggacaaaatcgtcaaaagaagagtgggttccaagttgatagtgacctaaacactatcaactactgtcgtcacctatgtggtcgtcatagttgaggagacttcgttcgtgtataaaaagatctatctaccctcgaccaaggaacatcagctcagacatttccttcccgatcatttctttcgtgtttttttttgggttgcatcgagataggaataggctgttttgaatgcttgacttagattactcaagttcgtccgaagaggacatcaaaccgactggggtcaacggtcgtggacatacaccaaaacagaaacggaagtcgattggcgatttggatcccgtgtatgaaagagcaaatactccagcaaggaaaaagtaaagcctgttcatactgacgagagacgatgtactcgatggcagagaccatcagaatgaaaagtgactgagaaggaggaaagagaacaagatatcttgaccagagtgatgggtttggctgactgaaatgtatctggtttcatcataggtctgtactcccttcgttcgcctccatctcatcgatacagtgtgagtaccttctcgtgcactgcccgatggaagaaagaagggaaagaacactcattgtctttctctccatgtctccaaccggtccggcgtgttttgctcttcttgtgatggctatctcggaactgatgtcaacggcttctcttcattgtgcatcaagtagagaaggatgatccagcacaataccaaggtcgaacactcgctcgaccaaaagtccaaggagactatccaacgcatatttatctatcttgtgagctgagatcttgtaaactcgctctgctgtcctatccttgcggtaaagaggaagaggtggagacaaagaatgacaaagaatcccttggtttggaaatattcaagtcgacatcccacctttcttcagaactctcgtgaaagaagcccaggccgaccttccagaacttcactccttgctagattcgccatcaaataatcagccaccgaccgatcaggccgagctggatacaccgaagagagacaaagagaaggaaaccaagttgcacgtctcgctttctagaccactttatttgagagcggatcgaaagagcgcggtagaggcctcactgagagacgtggttcggacgatcaaatcgtcagtgaccctcattcttctcccttcatctaaaagacgtaggctctcagccgtaatgccacgatattgaacgcgaagagtgatttggaacacgacaagtctggtgcgcgagtgctgacaagaaaccctgtgcgctctgttctcttcgtcctacgtatcgtaaccttcttttccttgggacatgcgaaacaatatcaggttcccactttcattctcgactctcagcgtattcaaaaacgatgacaacacaagaacgttcctgagtatcgatgttggcgctgggtttccagaagtatctcttcttgctcgctttcctttcattctctgctcttgatatttactgactattctcttcatctccgttctatggctcgcaacacagctggaagtgttgacagaatctctcaataaatcactcgacaaacaccatctaccaccctactacacttctcctcgattccatacttccatcgcctgggcgctccttacacctagctcaaacccgtcgtcgcatctacctaaatccacactgatcccctctattcaacatgaccgatcgaacaaacccgatcaaaaaagtttcccgtcgatcgaggggatcccaccagatctagttaaaaaattggatgaaaaattcggagatcgcataaggaaagagggaccgtggctagtagacgaagtccgcatgaaagtgggatcggagatctctgtgttcccgctaatggggtgatcgagctttcttccgtcctttttcgtgcatcaggtggtctgttcgtataaaggcatgactgaaatcgcccgacatgttctcggatgattttctctcacatagaagaataacgaggcatggcgaatcgtgaatgaaatttcctcaaccagatactactatagaataggccaacggagggggtgggagaccaggagaacgtgagcaaacgataaatgtctgcgacagatgcaagatgagaggggtttcaggtgaagaaaaatctaaactttgtgatcaagaggttgagcaagaggaggaaaggaaaggaaatgttcatggggtatgcaagatataaaaagacagcatagaaagatgagaagaggagaaataacaagataaaaaagaagtcatcgatctagacagcaccgcattccccctatgatatcgagagtttcagaattagacgaacgaaagcagaggatagagagggaaaattgatgtcaacaaatgcttgattgtcatcagtgtgcgtcggtgaaggaatgaactaacgagaagtctatttccaggcttaggagcattgtcggtcatctaatttttgacatcaatcaaacagacaggtcagtattgagaagttttgagggagaggaggaaccaaagaatttacttgatcccactgttggaaccataacacaaagatatatgtagataagtacaaaatcattggaaagcaactgaaggtcaaaatcgatttcagacccagaagagagaacatacagtcgtcatgttttgattggtatacgcgtactcgtatcgcttgatgtactcggctgtcggcgcatcgtccggatcacatccaatcgctttcaaattcggatcctctacacaaacatacatgcccaataacgaatcctcataaaggatcagtctacgacacagaaaatagtttctttctcgtgacgactttttgcttacggtagactcgaacgtaatcgatgttcatcttaaccggccacatagactacacgaagcggtaagggtcaacaaattggaccataacttgaaagtttacataattagatacaaaacctagttattgcgcttacctcaagcccttccatgtcgataggtccgaagttgtacgacatagccaagttgaagatgatgtactgtgacccaaatttcaagttgatatgttctcagacgatatccttcaccacactgagaactaacttggcaaaggacgagcaagaactgaccataggctcataaggaataggtcggttgcccacctgcgtctcggcgttgggtcccataccgccctccagatatgtccaatccctgtatcaagcatagggcttgctatgaataaatgactggtaaacgaggatataatctgtaaatcatttgttcttacaatttgtcatcgttgaaccatttgatgtatccattctcgccaagtttgctgttgtcaaacagggcgtgatagcatgcagcgtttagctaccgctacgatcagttctgtttaagagaaagagaagggacatactactcaaatgcgtaaacagcgtaacatcctggattaccatcagtatcagtctcgtagcaatcctggttagtggttgatactccggagatggtctgctgataagctgatgaagtaagacaaggtctgagttagtcttctttgtaaccgaatcgagagcaaaagacgaaacaaaagaaagaagagaagagaagaagggggccgtacgtcctcctttgtaagaattaagatgagtgatgctctcgtcctcgatgatcatgtgggactcattcagccaatcatattgctaaaaagaaacattcagaaggaagtttaagcaagatcaatcttggaagcggacaagagtaagaagggctaattacaggattatacggagcccattgagcggacagagacacctccccttgagtgatagaataatagaattggagcatcagttacgattcacgaatcaaccttaatgaaacataaggggaagaacctgttcgggaagccatatgaccttgagcctgagttcagacaaggcgaccaaggaccatcatcacaagagatcaggtcacgactctatcgaaggcggtttcgatcgatttgaacagtcgcttacctcaaatacatcaatctatcacgagatcgaataaattcgtcaacagccattaatcaaaaggaaaagcaaggcgaaatcaagcaaaaggatacttacctcaggcgccgctcttcctttccaagttccgtctgggtgttttggtccaggatgggtaggatcatccgggcaggtgcatctagaaagccgctggccaggaaggtaggacaaggcgtaatcggttgcttcgtccgttccggatgtaacagcaatttctggaagaccgttcaacgtttggttgggtaaagttccgacatcgcaagaatcataggtgtatggccatgttccatccagcgttcctccataaccaactcggccaaggtttcccatcgcccagaatgcaggccaaagaccatatgtagctgctgtcgcaggaagtctaactctggcttctagtcgaccaccttgaaagcacattttgttccagccttggatggatccaccggcgaattctaaattatggttgtcctcaggatcagctttgtctaagctgatctcgagcgtgccgtcacgcgtagttaccattcttggatcataatactccagatcgtttgtggcccacgcgtggagatcctacgcgcgcacaaatatttatcaaaaatatgagagaggtgtcgcaggtgtcggccatgaatgatacataggtgagaaagaacgagaaagattgtgtccggaactcacgatagcctcccagaagggatcgtctccaggatagaaggacctgccatcctgattgaattcatccgagaattggagttcccacacttcacctgagtcagagatgacagtatatgcctcttcaggagtatctctgtcgattaatccaaaatctgccgaacacaggaaaaaggaaaggtaacgtgtgagcatcatatacattgaacgactctcatactttcatctgttctgtgatatcaagaaggtatattggactgacttcccaccatctgtggcacttgaccttatatttcacaaaacaggcaacacggaagatatatgagcagtgggcagaaaggatgattccttttccttgtagtatcgtacctgatccgttgactcctcccaagctgcgtaagagagaagtatcagactctaattcattggacaaccggaatggtagaaaagaagatttgccacagcttacttgaaggcgcctagcataacaggattgggctttatgaagacagtaattaatgggtatccggcgctacgtattccaaacaaaacaaaaacggattggtacaatggttgttgaccagacggctacataactagcggctcttacaaaagctaaaaatgcaggaaataaaagaagcggattatgaaatcagatcattgtcttgactgaggaagagacaaccaagtggtggactaacggtcaacacggccaatgatagcatgaacaaacagccgatgttcgccaaccctcgtgctgtcagtatcgtgcctgctccgcgtttatcgtgctttgggtccggattatgtaagtagtctgatttggtaaggatagtagaggaataggagatttttctgtgtaaacaagcaagttgccaatgcgaccggcgacgatggtgagaagaacagaccgtctgcttccacatcgttcacccatgtccattctgaagggtcggaaggaagagagtactatcaacaggcgaagagagcatgttaaatttatgttcaaactcatttggcggccaagcccgtccgcgcgtcatgacggatcaagaaaataaagaaacgaacgatttcagagactgttggcttggttgaaagagacgtgtccaaaacagagccttgagaaccactctgatagcttgaataggatctctgttgaaacgggtgtgggcaagatacattcatcggcttgagccttagacacgagcagcacataagtgaaaacgaacctgggtgtgtcgactgctctgggaaccctcgatgagtacttctgagctcgtcgaaatgtctctataggagaagccagaggctttcttgaagctcataacgctacgtctagagagaagagggtcggatgtgtatgatagcttgatattctcgttgttgataggtaacgaggaacttggcagtatccgtaagaagtatgaatcagaggagactctgaaaatggcgttcttgagcggttgttcgagagtagacctgctttcgatcgaacgaataaggatagaaagtgatggatgttgaggttaagcaagagaatgatactctcgtgtctatgtcggaagagcagatgtaaaccaacacaagaagaaagagagagggattggaaacagcaacagagtgatgttttgatgctccttacgttgtttagccttccaagaaagctcgcttgcctatgttattccaaccataaacaaaacgaccaagaactcgtcggactaggctatgtcacccaagagtaggacctttgaggtagatcgcaaagcttgggtttggacttggccttttacgtaggatctctcggggtttcttggcaaagagaaatcgatcccttttttttccttttcattttcaaattcaagcctgagcagcgttgattagttttcactcggcgcatcagttgcaacacagttagcttatccgccatcagctcagtcaatcagtcagattggtgtgagcgaagatgatgatgatgatgatgatgaagaaaaggtcagtttagaagaaggcgcaggtaggcgacaagcatcatcgccgttaactgggcagaatattatacagaatgttgtattttcttgggcctaaatgcttgacccgcggaacattatattctagaatttattggcatggccaacgggccaagccgccagaagctcttggttaagctttgtatttcctctcatcgctaacgaatttcggggttctttgactctttctgttgaactcaacgtgaacaactggatgatgcggacccatcagatgaagaagcacacacatggatcgtttatgaggtgagtttatatatagtatatttaaggtggataatgaacagcaaactaaatcgtgacgagtgggggaaaagtgtacaagtagtgatggcagaaaaataaggcgttgaaagaaacagaggaaaagagatgataaaataatacggtgtctctatcgttgagagtttatattttttcgttcaatctatagactatgaatcaaacggcgccaaagcgttgccagaaaggatccgacttgtcggtatccggatggatctggactttccctcgccataacgccacgctactcgcactcggatcctgtgatgggttgcccaaatcgttcgaactcggttgccaaccggctcccacgctagatgcgatcaacgttggtaccatggcaaggagcgacattggtcgaatgtccttcttctccatcatggccgaccgcgacttgaaagccatggaagacgactggagtcgacctcctcggattgttcggtaggtcgacaagttgtcgatcgtcttagtgatggcctcattccactcgtgctgctccgcgtcagggttcacttttggtagcttgctagggtccttgtagattttcagcgcataaagcacctttgcgaaaggctcggtaggaagcaaccggatgatgacagccaagggcagcgagagcgcaccaacgatgatactgattgcccagtctcgaccggtgatcctgacgacctggaaagcacttcctccgacgaagacgatggcgatctgacctccaaccatgatgccgaagatagcgaagaagtagtagtttcggaagaaatctcgtgtaaagatgttcaactttcgatcgagccgtcggcagttgagctggttgaaaatctgacagaagacaaaggcgttgaacacgatggtcgagacctcctgttgctgttggttgcaagtcaactcatcggaacagacgttgttgaggatgtctcctccgaggaagtgaaggatcaaacaagcgatgatctggaacaaggcctgtccgaggatcatcttaaacatgtcaattgtgatcaagggagccgtctttggggtgggctttctcagcaaggaagtaggcgtggcgggatcagtcgcaagggcaagagcagcaaaggtatccatctaaacaacacaaaaacgaacagaccaatcataaccccagcgtgagatttcattcttagtcataaccatgggaaatggaaaaaagaagatgacgaacgatcaagttaacccaaagaagctgaacggccgtaagcacagactgctcgtcagcagaagcgacggcagaaacgaaggtgataaccacggcggtgatgttgacagagatttggaattgcaagaactttgagacggaatcgttgacacatcgtccccagcaaacggcgctgacgatggacgagaagttatcgtccatcaagatgatgtccgaagcctccttggcaacctccgttccggcgatacccatcgagaacccgacatcagcttgcttgagtgccggtccgtcgttggtaccatctccggtgacaccgacaacctcgcctagatcctgtagagtagcgaccaatatcttcttgtcctctggagaagatcgggcaaggacctgaagtcggggtacgatggcgtgaaggtcggctcggctcagttcccggaagaccggtccttccataatcaatcctccaggagtgtagattccacactgggtggcgatcgaccgagcggtcaacacgttgtctcccgtgcacatcttgacggcaacaccagctccagagcatttcatgactgattcggtgactcccggtcggagtggatcttcaataccggtcacagcgagtaaagtcaagtcccgggccaaccaggtgaacgggacctcgccattctcgtccatatcggctgaaggccaggactcgatatctcggtagcagatcgcgatcgttcgaagcatgttgttggcatagagaatgatggttcgctcaatgttgtccctggtgtcctcggtaaacttcttagtctcgatcttgtcactcgagatggtctgggagacctcaagatagctcgaacaaagccggagaagaatctcggaagctcccttgaagtaaaccctgtgctttccattgggaagctcgacaactacacccatagattttcgctcagacgagaaaggcctataaaggagagaaacccgaataagaaaagatcgttcaattgaggaataacaagaaagaccccggttaaggggaacaaggtttgaggtattcaattaaaagacgtacagcatctgagagatcttggcagactctcgagtagttttgtaatccttccaacccagttcctttgcgaaccgaagcaatgcggtctctgtctttgagccgacaaagatcatctctccagactctggatccttatcttcgaacgcagtcgagttcagaacgatagcttggttgaagaggtcttgggtctcttggttgagaattgtgttcagggtgctcatctccaatgagaagtctcgtctggcctggaaggaaaaggtaggaagatgggtacgttgagcactgttttgttttatcttttgcgtaaaagtacgacgaaaaatcacacacctcctcagcgttggttcgtccctggttctcctcgagccgctggacaaacttggcattgattccaacagatccggcaacgacagacatggaattctgagtggcgaaagcacaagaaagagtagaaacgaaaaatgtttgttagcgtcttagacgggaaaatggtcggacgcgcaggaaggagagacactcacctgggtgagagttccagtcttgtcggtgcaaacaacagtagcgttacccatggtttcacaagccccaagtaatcgaactagcaagttttctttggtcattcgcttggtggcaaaagccaaggcaagggtgacggccaatgggagaccttcaggcacagcaacgacgacgatggtgaccgaaatgatgaggatatcaatgaaagcatctcctttatcagaagccgatcgaggggggttgcccgtcccgagttggacgaagaatcggatcatcaatgacgaaaacaggatcagaccagccaaacttccgagttttgcgattagctcggctagagcgttcaacttgagctggagcggagtagccggggtatctccacgaagggccataagagtccgtccgttgaaggaattaggtccgacagcaatcacaaggtactctccgacaccctccagaatctttccaccagagaccatgaagcaactacaaaccccaaaaatgaggaattagggtcggatgaaacatagaagtcagagaacagaaaaccaaaagagaatgggcgtactcgtttttgaaacccttctcggtctcttccttaccctctctttcggccaagcattcctcgtaagtgacctttttgatggcatctgattctccagtagcaccagattcatcacatttgacggcgtgtcctcgcaagaagataccgtcgacctgcgaaacgaaagaatatatacaataaacaggatgagagaacgctcaaggcagacgaggcagaaaaggagcgagcgcattatactcacaggcacgatctctccaggctccagaatggcaatatctccaacgacgacttcgtaaacactgatgatttgctccctgccggatcgaatgacttttaaacctcggtcctccttttgagcgttgagcttctggaactgcttctctttttgccactgagaatcagataaaggagacacaggtaggagagttaggaccgggtatttgtactgccaagaatacagaaatatagagacttacatcgttggtggccccaacgagagaaaccacagccacagcaaccaagatggctactccctcaacccagtcgacggcagggacttcgacaagttcgccttgggcgttcaaaacggttttaggcggtcgacccaaatcagtgtatagtcccaaagcgagcgaaatcatcgcggcaaccatcaagataatctgtattgtacggaaggccagcaaacgggagcatcgtcagcaaacaaacgagatagatcccaagacggtgtggagagaaaggaaccgccatatacgaaccaaaaccttgtccttcagagcgagccagaccaagtagagcaaactctttggcttcttagaaggcagcgtgttggtaccgtaaacccgttttcggtcctgggacgtagcctggacaactgtgccagttgatcctgctccagaagaggcaagtacagcatcatctaaacctttggtaggatgagtaccaagagcttcgagcaccccggctgtccctccaaacgactgaaggagaggtatcgatttactacaaaattcaaagtggaaagaaatcgacgatgtcagttcaaagaggaagaaactccgaaaacacgcgccatgggaaatgacatacggatcaaccaagcttgctaatttcttggggaataacgtgaacggtccaatatcttcggcgctcgccgcctcattttcgacatcaagcttaaactgagcctcctccttctcgaccacgtcctccatcttgccggtcttctgttcaaacgcggttttctcggattggttgatgaatgcactgtccgtgtgggtgtccgagtgatcggccgctgtgatatcagagacccaggtagcgtttgaggctcgtcgtctgtgatcggctcgatcgtggtcgaccacgtcaagcgtgccttttccagagttgacgtccgggtggttatccctcaatacaagcgaggtatgcgctgccttttctggtgtactgaacctgacggacgaagcggagagcgtaggggatgcaggagagaacgaagagtctgcatcgttcatagcgtcgctgggcgagagattggccggatgggatggcggagtgataggaggaccgagcgctgtgcgacgcgacggcggtggttacgaaacaaggttgggattacaaaccaaatatgatgtaatcgtcagcttcctgtgtgaccctgatttacccgtccagggggagggaaacaaaacaaatatcgagattgcaacaccgcctccttctcttttttttcttccgctcagaagcagctagtaaagattcttccttcttcgtttgctatcttttctactgcttgtgctggattgggatgatggcatgtggttatgatgggaagacgggaaggcactgagcacggtcgtgctccatcgagaggggtgcgcaattgagtggaagatttggtggggatcggaatggtcatggaaagatgaaacaaggctccgtctagagagagaaagttgcttaccatactctaaacttggactggtgttgaccgaggaactgaactcgtccgcgtcgggcgctgtggtggtgatgatcaagggaggcagtatcggagctgacatcttgtggaaaagagagggctgtagttgtttgaccttctacaatcgagaacagggggccttaatgaaacgagccacaggctgtttgagaatccaagctcttgagaggatggataggatgatcacgatatcgatgcaggtcgtttaacaaatttataggagaacggtggtggcgagggtggtttactttgaacgggtagatcgatgaatgagaagagaaaaggaaaggaaaggaatcaagagatttgaaaggagacaagaagtgtatgttaaatgtttaaggagaaatgggcgatcggtcgaaggctatgtcagatacaaaagacccgaaaactacaccgcgggaactccattgaaggtggcagcgtgatacatatctcaccgcccaatcgttcgtctaaacccagaggtcgcttatagtttcagttgtactctgtcttgtacgagttcatcttggcaagtgaacacaggcatgatcttttgttttgttttctttctatctttctgtctctttactcatgatttcttggggttgaaactgttagagatattagcagtagtcgctggacagcctcataatctcttattcatcgatcagacccgattgccaagcaaatcttcagtaacgcattagtattacctactatatgtccgtcccggtccatgaccttcacgctttctcgatctccctcttgctcttacaaacatacatacgtatacatcatatcagattctctcgttcccctccaagcacgttctaaattctctggaggacggcaaatgtctgtacacagaagaaaaagctgtgagaggatgagagggctctatcgttccgaccatatgtttttctaggcaaaaccttcaccggtgtttttaacgtcattcgttacgtgtgcttatgcggccaagggttactgcaatgaaataacagccataacgaacagagctcatctccatacgactatagcctgagatacaacagacacatcaacgtttgacccaaaatactccggcaccgcccataagacgtcaaaagactgagttctcagaactttgcactgttgattcccgccaagaacacagcctatcagcttggagatggggaacttgaattgcacaggctgagatagatagcttactgtggtaagaactttccgttcaacgtgattttcacgcggtctcctttaggatcctgttcccgctcgacttcggcgtggaaatcaaccgcagagatgattccgtccccaaactggtttttaacattggcaggccccggcaaggggattgtaacaattgttaatattgtcggtgggaacaccgctttcatccatgatcaaacacacaaacagaccttttcattgatgacgtgttctgtgagtgtaccacaaaagaagaaaggatcaatgaatgtgctacctacgtatcagctataaaatagacatctagctagaacctactcaggggatatccatagacgaccatgatctcgtataatcgatatagcataggatccttcggaggtgaactccacagatctctgccaaagtctcgtcgacaaagagaacgggaaacaaaaatacaccccacctatgagtcttacggccttgatcgcgccccgtataagactgagaatccttaccctcgagatggaaagtagccttcacccatacccgtgaccggtttcatcaaagcgcttgcgacatgacctccgagaacaaggcctagcttcttgaggtcctcctcgcttggctttgctctgttgtcaaaaacacgaatcccaaaaactgagggtcagtgaatgatcagaccgctctctctttcccgaaccgaaacgaaaatagcctcttcatcacatactgtccatagaatattgcggccacaaagacctcgctccggtccattctgctggcgatctgctcaaaagtcagttttgactcagctttggctgcaagaagtatcttggaaatttctgaaaggttgttgagcgacattgttaagcttgctggtctgatggtctaagctcagtcctaaaacatcgagtccaactggttcttataagatgtaagagatcacctgggtctcattcggctaaccccgggacggtgaatgaacgagagttggggtgagagtgcgtaaccctaacaacgtcaacgcacacaacaccatcatcatctatacactctctaattatatcagacatagatcggcttcacacacaacctctcgtgtttatccgccggagatatcacccagatactccctgatccaaacatcaaccatctgtcgttaagatgtcaccgtcggcgatcacccggctgtcatatttgttgatttatgccattccctcaccagaagaagaacgggctgccagagatgcgttcgctgacgaagatagccaggaggccagccaggttcttttctattactctacaaggaacgttcaaacaagagacaagatgctcagacatctagggcttgctaaaggactggaaaactttgtaaggtagatcctttctatccggtttgatagaccaacaagagtcctttcatcgtcaccatcagcagtagggcttgcaggctgactgccggctgatcgtttggtaaccaatccgattccagcatgtttgatgtctcgacggaaccgactctgatcacctccatcaaatcatctctggtgacagtgtccccagaaccaggatactatatccatgccgtaagcagcgaaagagtctctttctccttcagtcgggctatataaaagaaaacgttctcatcaataaaacttgtgggtgtgtgcatgtctacagaatgtcaccttggactcgtcaagttcatcgtctctaaagtcaaagaatcctgctgatgcagctgctccgaaggatatccctgctcgagtcattgaatcatatcttctccaaacatatgagacattcaaggtacgagacttctcatcttgaatgagatccagggtgtgtcgttttgactagaaattaatgtcttccttcttgtccatgtttcaatctatggtcgagaaatgtattagcttctcaacggaccgatcacagccctggacagcctttacggaaggaaagaaactgagagaaaaatcgaacagttctggaccacttcactctctacatgggagttcgagctagaagcgggtacagcgttctacttggagaattttctcggttgtaagcttctctcctcctatatccctatatatccggtactgttatcgatgctgacttggaaagaacatcattcgtgattttgaagctcctttaccacctttgtcttcccatccgccatcacaatcatcttcctcttcaccctgctcaatcttactatctcgctcgcatatccatcgtcgcgatcaccctgttccgttccctccatccctcatacacacccttctcaactatttaccacccgcaccgcgcgcaaatcccataacaacgaataacaaatcaaagtcagccatatatgaaacccggaagagtttcccgttggactggggagctaaaaccttgatgcatgggataggaatccacacctggagatctaccacgcctaccgagacctcatcaacttctaaaaacatctccagtccgaccgaagacacgaaagagacggcgccgagatcgaaacattcatcctcgagatcatccttaggaggacttggagggatcggcgcgttttttctacctaaagaccattccacccaacagcagaaccagcaacaggagatcgacaaaagacggactcgatcgacaggagctggttcaggctctgagaaagcaaaagacggttggaagtggcttctcggtgaaagtctaggatcggccatcggcataggaggatcaaccacaccttcttcaagttccaaggtagccgctgctagttcaaagacaaacgaggcggcagaggcaaaagacacggtggagtctgagccacaaggtgaacacatacatgcggatgtggatgtgaacaaagaacgagaagatgatgttgacccaaggcagatcccattgcccggctcaccacagatggtagaatccgcgaaagagataaagattgacctgttgagcgaggcgatggagacagtgctacctgtccctagcgtgaccgagagctcagaagaagtagaagatgaaaaccaggctgacgaaacaaagatagcagaaggagaagagaagcaggacaaagagacagtggaggaagagctagtctggagagatctcaaagtctggctagatcgagatgagaacggtacggaagagcacattgaaggcgaaggagagaaagaaggaccaagggagtctgatcttaaattcactatcgtttgtcctctttctctacaatcttcttcgatgcagctcaagctaccttgcctctatctatctcactcggattacttactactgtccgctgcttttctgtagatcacatttccagaccagaagacccttccaatcttatacgcctactttcccttcgacccttccgttcccgcactcactccctcctctttccctgtaccaataccgacgagatctcacatcatgaagtcataccattcatcccgtcaatctcctcgtgcacatggtcagtcaaactcggcaagcgcaaacctggttgggcttacttccggtgatcatggagtctggaggacagacaagtcagaggcagcatgcatggaagatgaagatggtgcagatgacggtggcccagcagcatcagccacagccacgaaagacgggaaggtaaagaaagatgccagagaacgaagtttgttgaggagtttggagattcttagatcgtatgttttcctcctgctccttctcctctctttatgaggacaccaaagtcgacatcaaacggtctcgtccgacatctaatttttttgtttatcttctccttctcaacccttgattcgataacagagacgagatgattcaagagaccatagctcgcacgactttttcttcctcttggctcatcagccggatcattccttcctcctcttcctctccttccgactctgatggacctggcacacacgcgaatgacgttgcaatgccagtatcaagaaagaaggatttcgctgagaataggaaatctaccaacagaagagagttggtgggttcggttgaaggaaaagggatcacattgggcgacttggataatcatctagccacttgatcatggtctttttcttttcttattctggttgattggaggactaagaaggaaagggaacaagaagcagacagaggatcatctgatcgctcgcgacatatcagagaaaacgagaaacgataaggaaaaaagctagggaggggaagagaaaaaagaaagaaagagtgttcaaagtgggtgaatcgggtgtatttgtgagagaaagagaagaaaaaagtttgcacaatgagaaagaggttacagatacacgaattgaattcgatagagatggcaagggaagaagcgatagctgaggagcggggcgtatgaggacgagggttaaacgaataatgacaagcaaaaagcgcagaacgaaggcactacagttttgttgaaaagagaccgatgctagcatctcaagtagacttgatggacacttccgacaagatcctatagaggcacgaagaaccattttcatcagttttcagcgctgaacacttgcgtcctatgtagaaagaacaagaaagaaataaaatgattggacctacttgaaagcctccttgtaagcatccaaaagagccttaacccgagttcgctcggtaaccagggcttcgtcctcgaacaacaagtttgcgaacagatctggtttgtaaaggttggttaccaatctagactggactgattccctcgaaaagttgaccaaaagctagtaggacggagaagggtgggtggtttcagtttcagttgtagaaaagtggcggacttttgtatgaaacgctgatagaaagagataggaactgacatgcatgactgcttttggaacgagatcctgaatagtttgacgaacgatcgcaaagtaagagcaaatcaacgatcgaataaggtttgtctccatctcttctcgcattgacagctggggctggtccgggtccgtaggcgccttttcccaaatcggagacagagagagtacagaccaatagagataaggcatgaacgaatcagcaaacagaacaattgaacacacatacacatcgatcgaaacgagaagagaaataaaagctcgaggtacataccggctcaagatgctttcctagacttctcatgtcaaaggcggagccaggtccatcaaacgatcgagttccagacacccttgagtccgccctacccgtcaaatcagggaaagtatccgacgcaccccctcccacacctctaccgactgctccactgctagtcgttaatcctgatgaaagtaatgaggctggtccagcggtggattcacccggtcctccgggttggccaccgaaaaagtagttcatgaacgaatccttgtcctttccaccaggaccgccggccgctccaccagaagcgatgtgattcgaggtttgagataggatttgactcgttcgctcagaggatcgtttggacttttcagaatgatgatggtgccctcgagttccatcagtgggcgtagccgatcggttcttaattgaccgtcgttcgtgctcggatcgatgagtcgacgaagcaccattcagaaggacgtcatcagagtcaatgtcctgggactcggcccctgggtcagaagtcacagaaggcgcttggggaggatttgatgcagcgacagctttttggtgaccttgctgagcgatctgagcagaaccagcaacgaaggctttaggaagacaacacccaagaaaacatgacaatcagcaagggttttcagtaggttgaaagactgatatgagtcgatgagggattccataccaggatgattcgtattgatgtatgctgcctggatagagatcaaactggtggtgtagtccgaggtaggaccaagcctctcccgaagtagctcagtgaccgtctcgactaactgtgaatgaagcttagggaatcgctccagttcctatatggcaaaaaataacccaacacacaacacatgagtatgaccagtgagaggaaatatcttataaagtgaacaggcacatacgggactagtgcaattatggcaaatcttcattaactcttcgtataccagctcgacacatctcaaactgggcgcctccaacaacttgatttgaggtttcaccagtaattcgaatgcaacctccggtacaaacaaactcggcctaggtccggtagagtttctgatggccgttctgatatcttgggtcgataggttgttcgccggatcgatagattcgagagctcgaccaaagacatcgtggaagatgtaataaatcctggcaccaccacacagttctttggtagaaatatcgagagatgtaccatcaatggcggcaatgaagtctcgggcaaactcagtcatgagtttgaggatgagagaacctcgatgctgttctcctagatatgacgcatcaccgaacgagttgagctcctgctgggtctggcccataagggtattaagtctagctttcatatccggcaacttttctctgatatggttcatcagaacctatcatacaacagacacaaaagattcagacgtgtaagatgtctcatgacgtctgatggatatacggaaccaagatatagtgaattcttacatgattcagctgcttggctagatatctagttccgcatttatgagcgaacgttctataagctccatgtctgttgaagaattcttcttctttgaggatagcatccctcatcggcaatcgattattgatgtcctgctgggatcgacagacgattccaatgaacccaagtttgagaggatagacccttccggtcaggatgtcagcagcattggtaccggcatccatgaggtcgagtttggtaaggacaccgatggtacgaagacctcgaggatcaaccgatcgggcgagtttgagagcatcggagttggccaaatctacgttagcaggagagacagcaaggatgactctgtgatatgacgaccgagacgaagaaacggttacgatcaagtaataaaaggacgatatctggtgagaataagacaaggcttacgagttcggtttagagatgaagtcagtcacgagggttcggatctacagacgcatgttgatcaataggcagtcccaattagtcaactggcttcatacgttttcgacgtttcttgaaaaactactatgacgtacctgcctctctatatcgctaggctgatctccaaccgggatctacacagaaacggacccgatgtatgtgtgatcaactttgcaatctttcacgcgagttatacatgagggactgattacataccttcgtcaatcccggaagatccacaagggtaagatctagcacgccgggtccatagattttcaggtgtataggaagtttcgagattccctacagattcccaattacgttataacatgacagtaaatagcaattctacttgtgaaagactcaagaagaggctctttctagtcaacaagatattgttgagagaacatcaaacccaccttgttctgaccggcgactctaaaggtctcggcctcgatttcctttcggatctcttcaaaatcagtaaatcgcttgttgacatggaggaattctgcgtagtctgttccgccttctcccaacgtagcatcacctgcttacaaaaaagaaagggtgataagagccaggttgaagaagaagcgcgtgagtactagaacctggttctaacgtttacacggttagacgtaccgtttgcagccggtttgggagtatgaatcagttgaaggactaaaggtcgtcgagtgacgatcccctaaacgtagacgaagataggtaagatgaactgtttcagcaaggacccaacgatctcagggatgcagacacacaacgaaaataagaacgaacctgtcctctgggtaagaaatctctgccaacgatactaataaattccaaaccagaacccaaatcaaaccccaagcatcaccgccatccccacaatcatgtatcatcaccagtcgccagtcaacatctccacaccttggcatttacatttctctaaaacgaaagaaagagagtttggcttacgtttctaagactgaggatttccccgaagattgagatccaacctaatgttcaaagacagacgcaagagagaacaaagataaaaacaaaagaccaaaccacgaaacccatcagatactcctcttttcatctggcacattcaaaaggcatctcgagtctcttcttgttctcatctctagtttcgagatgacatattctcaagaaaagactactggagtaataaaaaatcaacagagggacatacaactacaatctgaggcctgccaacgaagagagaaacacatatttcatttagcttctgacaatctcttgaaccaccggcctactatttagaagaaaacacaaaacgagataaagaataattgtaaacttacaggtcgactgcatcacctcctatggcgttgaatgtatccctgtgtaacaaaaaagagtttccccaaggaatgtatacacgcatatacatgtcagacgatgagcggtttccaaattgatgctctcgctgtaggctctcttgaacaagcaatgcagagcggagcagataaaacataaggaaataaggtgagagagacgaactggagcttgttgaccagcgagattaaatctccatccatagacatttcttctgaagtataaattgtcgataatagatgggttaaggtggatgttgttggagcaagtgtctctatttgtgtggaggtttgaagtcgaaaggctgatgctggacgttcaaggaagggctgaaggtgtgcaactattctcagacaagggcaaacggagaagaaggcgagccgtccaagtgactgtgtgcttgtctgttcaagaaagtgagggtgagagtacgatggaaagaaacagagagggttggggttgagaaaggaggaatgaatggagaaccgcttgaaaggagctttgaaagcgctcgagagaaaatcgacttgcctgccgatagtggctgcgcgttgcacccgctaatctttcttttccttttcctttcctgttctactcaggtatatgtgttatgctctttcttgaacagtagattatgatgtattgctcttacaggtagacatagaaatatcgagtctggaattgtatttcatcaggccgttaagaatctattgtaggcatgatgggaaataaatgggttggtagaggaaaaagaaagaacgatacgacatcgtattggaacatgaagaaagacgaagagagaaagaaacaacaacccgggcgcttataggtgacaagggccagcatagacggagtaaaatcagaaaagagaagaatgttgacaggagacgactcgagaggaaggacagggaaagcgcgtagagaacaagatgaataaagtaagcgcaagagaaaaaagagaaaaaagacgagggtagttcacgtttaccagccctgttctgagaacaacaacgaactgatgaaaagaggggcacagattcagttaaagacgctctagtattctattaatacaaagggaaacgaggaaagaaaggtaaataaaaacgtacatggactctccgttgtgcgttcgcctgatgctctcggcgatcgtcgcactcacatcaacaacatcgagaatgtcgttcttgcactcctctgtcctgtgagtttgaggcagtgtgttggtgaccaccaactttttgagcggtaaatcttggatggcagccatagacgtctcggagagcagacctgatttgaatttttgagaaaaaggtaataatgaaaaagagtgagccgttgattcactgatttctgatatggtaagacatccaaacataccatgagcaatcaaagcccaaacttctttggcacctcggtcgttcaagacctgagcggcgagcgagatggttcgtccagtgtcaacaaggtcatcgatcaagatagcgacctaagtaaagcgtgatgatgtttccagagctgacgtcagtattcattgatcttggcgagttaatcagatgtcttcattgacacacctttcccttgacgtctccaacaagcaactcaacctccttcttctcttctccgtcggcatctttcggaatcggtgcctcgggttcgccattggccagctttttttctcgctttgctcgcttcctgttgatgagcgcaaagtcgagaccgagcctatcagccagggcggtcgctcgcttagctcctcccgcatcgggagagacgatgatggcgtctttccagttcgggatgttggtcttgatatatcggaccatcagaggctcggtaaagatgttatcgaccgggatatcaaagaatccctggatctgggaggcgtgaaggtccatggtgatgacatggtccgcaccagccacggtcaacaagttagctaccaatctgataaagaaggacgtttccagaagaaacggaacgttgaatcagctaagagaaagcaaaggaaatcgagtacaaagaaagaacgcacttcgccgtgataggagctcgagacttatccttcttatcctgtcgggcgtaaggatagcaagggataaccgccgtgattcttcgggccgatgcggtcttgcaggcagagataagaatgagaagttccatgagatggtcgttgaccttttgttcgagaagcaaaaggggcagaaatggcagccgagaaagatttcaagagaagagagtttatgaatataaacaagacagattcagcccagcattcatactcggctgattgttttcaagacagactcacgctcggaggactagggctttggagaataaacacatcctcatctcgaacggactcgtggatcctgactccaatctcttggtcggcaaacttagtgcattgagaggaggtcaacgggatacccagtctaccaatccaaacagttgtaaagcgaaggcaaaaaaaaggtgagggaatcaagcggatgaacatctctgagtatcctaacacaacaagaccagagctaggaaccaggcttacctctcggccacagctttagcaagctcaggatgtgagtttcctgttgtcgtttgagccaggaaatgagcatcggtagagagtccgagaaggaagagacgagggaaagtcagctcggctgaaactccgaagaggagaacgagtgagttgattatgggagaagcaagggcttaacctgtcaacaatcgaactccgtttccgctgtacatgattggtctatgaagagactgatagaagtgtttttgcttgttctggattcttgataggtgcagagtggatgaggagcaagaaaagttgagagacggttcgagaggacgagcaaaaagaccggagccgagtagacccgatttataaagtgaaaagttgtccggtaaatgtcaagattttggttataaaaaaaaacaaactcttgagcttaccttgatacaacttgtgcttatatccgcaaacacaacctagagacagaacgaacgttcaaagaagggttgtttggatgcttgatggtgcgtaagtgtgggcaggtgaggtgatgagagaactgatagcaaaaaaaaaagaatgaaaaaaaaagaaattacgcaaacacgtgatgatacaacaacacgtgattttaatcacgcagtcatcaaccgtaaccacccccatccctggtcgctcccaccgtctggtactggaacctccgaagagaccaacaaccgccatcagctttctcatcctcttccttctcttccttcaccgatcactatggcttcgatacagaaccagtttgctcgtaagtcttgtcaaaagaacgttctacggccctctttctttttcctttcgtatttccacaggtggctcctctgaagagagcaagcgactgccggttagccaactaatttactgaactgtttgcatatctctcctcttcctttctccttcgtgaatgtcccagttcgagcccaaaagtcaatgtccttgatgaacgcctcaccttcctacgaggccgttcccgagttccaagcgttcgtccctcttgttttcactttgtcatgtcatcttttggtaaacacctttagcgcagcgtcatcgacgagtctcaaagtttttgaaaggacaagaaaaagtcgaacccataggaaaaacccatttgcaaccaactgactctgtctttcattacgatttctacagtcctgaaggtagcacacggatcattcagtactctcccaatggacagttctttgcctatgctttacctaatgagtaggttccgttggcttgcccaacttgcttcaccttgctcattctcttgccttggtcgagacattggtccaactgacaactctcatactcgtccccatcactctcctcaacaacagagtcgtcattcttaacgccgacaacggctcacttgtacaatccctcgccgtttctggagctgttgagattgctttctcgccgaagggcacttacttgagcacatgggagcgatatggtccgttcttcaacacaaaagcgtctctctctctgccttcttgattaataggcctttttgtatctgcctggtccacatgagctcactttgcattcttcttgtctttgcaacacatctgctgcacttcgctgcacctggtctttgtgttgactctatccaaaaacagttaagccggaagaccctaacgcccagcacgccaacctccgtatatttaccacagccaccggtgaggaagccatgtcgttcactcagaaagctcaggaaaactggtacgtttcatagttcttttgctcagcgttgataacaaaaagagataaaaaaagattcaatcgccctctgctttgcatgtctgtcgaatacgaacgtctgacgccattccttcttacaatgaatcttgtattaaaggcaaccgtctttcccaccttccgagtctcacctggtccgaacattcaactccgaaatccttctcttccctacctcgacttcccagcctcttaccccatctacacctccgacttctcgattaaaggtcgatggtcttaagcagatctgggtgggaggaggagccgaaggtgaaggtgttgccgtgtttgtaggcgagaagaagggtgctccggcaacgctcagcttgtacagcattcagacccttaaaggatcttctcctgtggccaccgccaagaagactttctacaaggctgacaagatcactgtcaagtggaacagggccggtaacatggttcgtagcagtccaattggtacctatccactcaacatcctgatccaactcgtcctgaccctttgtgaactgcctttgtttcatcttttcgtccttccaggttcttttcttgacccagaccgatgtcgacagatcgaaccagaattactacggagaaaccaacctctacctgcttgctttgaagggtgggttcgagtgccgagtcgcattggacaaagatggtccgatccatgattacaactggtcacccaactcgagagagttcggtgttgtctatggatgtgagtctgttttctttagatgagatattgtatcacacaaggcgcgcaaacaaactaaaacaatcatgcctgcaactgtttttggaaatcattagatatgccttccaagactgttttatttgatactcaggcccgaccaatccacgatctcggtctttcttcccgaaatttcttgtccttccaacctcattcccgattgcttctcgtggccgggttcggtaatttgagcggaaacattgatgtctgggatcgaaagtcgatgaagaaggttgcagagattctcgcgcccgatgcaagtcattgcgcttggagtcccgatgggatgttcatcatgactgcgatcttgagtccaagattgagggtcgataacgggttaaagatctggtactgtaccggtggattgatgcacgatgagaagcactcggatctctaccaggtttgtcttttccctcgcatcttactgttttcacctgtgatctgtagagatgatatatctcactctctcatctccttgggacatttcatcacaggccatctggcgaccgatccctctggtccagactccttcattccccctgacgattcctgccgcgccagtcccgtcagtttcggtttcttctcgtcctgccgctccggcagcggtcaagcctacaggtgcataccgaccccctggtgctaggggctcgcccactcctacgctcttccttcgagaagatcagggaggacttcctaggacaaactctaatggatctgtttcgggtcctaacggtggaatgttgggtcagcaacatcacctcgggtcgttcaacaggaaccaacaacgaagaaacatccctggtgctccccctccttccaacgacggccaacagcagcagcagcagcaacgaggccaaggaggaaagagaggcggaaacaaaaaaggatccaacggtcagaaccaaggtcaacagagaaaggatgactttgtgcccaccccggtggaattgggtccagtcattgaggtcgccacggttgatccggaggctgacccgttggcgaagcgaattaggaacctttccaagaaggtatgttttctctctactttcgtctcaatttctgcacatcgcgaggaaaacgtagcgtgtattcactcaacgaacttatggattgtttcacggacaaacgaattacagttaaaggctatcgaggaattaaaggataagctcaacaaaggcgagaaacttgaggctactcaactttccaagatcaagaggtttgttctcggcctcctcattttcatcataattttgcttctgtctggacgagatgaacagtcggctgaccaaattgcgctccgttcctgttctttcattcccatagtgaacacctcatcaggcaggaattggcttctatcgagaagtagatcgtcgtacccttcccaaagtttgttttccctttgttctgatctagctatctagtcggttcctattgtcgaggtggttggtggtctcggtaaggtgtaaaatgtatgaggaagaggggggaagagtatagagaaagagaagtcttatatcaaaaaagaagaatgatgttgatgatgttgatttaaagacagaaaatgaggaaagtgacaaatcagaatttcaaaagtttgtgtgtgatcattgttcgtcgacatctagatggtcgtccagcaatacaggctgtaataatctctattgagacctaggctgtctatccaatagcaatcgtttttgtttttctcttctctcctatgatcctgtatgcttcgatgtgtggaatattgcgacccacaggattcgtctcaagggtttgagtctactcctgttagatcgatccgtctcatcaattcaattcaagtttgactttgacatcctttctttctaaccggatggagctcgatacaatcttcacagccgacgacactcaacaaaaaacagttagtttgtttctcccaaccttacgaacatgttcaaatgaatatggcaagaggatgtgtcggatgtcacttgtctcatttgatttggctatgtacatgttatatcggaccatattactgtgctcaacagagagcgcgtgattgcaaaatgtttcaataagaaggttatgaatgctgagaaagggtttaacaggtgtaagaaggttctccaggagcaggcatgtgctcgagcaacgtatcgttctcgtccactccttcctatcatgcggaacgaagtagtggggtcgggtaaggacatatgcagattattcagcaaagttcaatacaggaaggaaagcggaagagaataaataagcgtaagtagttcatcctggtcttgattcaatcgaaccgatgaagcatgtgaaggaaagacgaacctcaacctctttcagatccctctccacaaccaacttcggtccttcgaacatcctattgacaaccgcgcttcgcttcatggtctctaattcgttcgtcctgtccgcaaaccaggctttgagaatatcaggttgagtggttgaaggaatcgctttgaattgatccttcgtgcggcgaacaaagtctttcagagcgcgatgagtaagaagagaaagagatgaaccgatcagattctagacaaacgagaatggggaacgacgacacctacaagaccggaagttgtaggacgcaaactggcgagaagcctgaagagatgacctgtaaagcgtctgaagctgagcttgcgtaggagcagcggacatgtatgacaaacgagtgtaagtgagggtggatgtatgtatgtatgtatgtatgtgtggtcaaggtgagtgtcaagagtgaaggtgagtggacgcagttggatcggccggcaagaaaacgatcaaagtcacgtgacttttcgttcgtaaagccgttagaacactttttggttgaatagacgatcaacatctcggaaggtcgttggtcgtttggcacatacacacgcacgcacatatacaagcactctcacactcgcactcgtactgtgaaggcacttgaacacaggccgtcgttcatatggctccctcttcgacttccaagagctccttcaatggaattctaagtagtataagacatcatgcccttgcgtccctcttgctcggatggattgcctaccttcatctttccggtctctacttgtttactaaagggttccttctcactaggcttactctggacgagatcaacacctgctctccttcctctcccgactgctcaattacacccaggtttgacaaagccgtcgtactcatcatcgacgctcttcgtttcgactttatctcgcccaatccttcgtcgcccaacgatcccaaccatcatcacatcctcactcttcctgccgagttgaccgcttcggacccaactcgatctgtgatctttcatgcacactccgacccgcctactactactcttcagcgcttaaaaggtatcaccaccggttcccttcctacgtttgtagaagccggctcaaactttgctggctcagccgtcaaggaggattcctggccgttacaacttcagcgagctggaaagaaagttggcttcatgggagatgatacgtggctttcagtcttcccagatttgtttgcaaagaatctttcggcccctttcgaatcgttcaacgttgaggatcttcacaccgttgaccagggtgtcatcgataatcttcttcccctgatggaggacgtcacaaagaaagacgaatgggacgttctgatcggtcatttcctcggagtcgaccatgtaggacacagagtaggaccttctcaccagaccatgaaggcgaagttgactcagatgaacgaagtactcagaaaagtcgtagacgcactcgacgacaatactttgttgatgctcttaggagaccatgggatggatcgcaagggtgaccatggaggggacggagaactcgaaacgtccagtgctctttggttctacagcaaaaagccctcgtttactccttcaaacccgcttgcctcggttcctacatacacactttccggagcatctgttcctgctcggtttgttcagcaaatcgatctcgtcccttcgctttcgcttctcatgggacttcctatcccatacaacaacctaggatccatcatcccagaactcttctcctccaagcgcgagcttgcacaggctttcgatatcaacgctgctcaggtctggagatatctgcaaagctacaggaaggtcgtcggctctggaaaagaggccaaaaaggctgttgaaggattgaggagagtctgggacaatgccggaagggtgcagaatgatctgaaatcagcggaagctctgcccactccatccatcgagcttatgagcgctcagcaagcattccttctcgagactctcactcaatgccgtcttctatgggcccaattcaacacgtcttctctcctcctcggtctttgtatcctcctcctctctttgccgaccatgtggacagtctacttcgcgatctcccaggaacgatcgaattgggaacagtgggctcaacagaacttaggctctgctttttggggtgctcttgggggtggcatcgttggtggtctgagctctgggcttggatcagtgctaggtggtaacaaacaggatgggctaggaatgggtgcaactgtactgtattcggcggcattcgcttcagaattagcgattctagttccccagttcttgccgtccattcaggtcggtctatatttctgctcttgtctttcattttttttaaagctgagatacgttagaactcgtgggactgatggtttcttcttgcgctatctttacagactcttcgaaccaacattactcgatttggacggcctactctcttcagcctcatcggtccaatcattcttgtcatccactgcattggtctttctaccaactcattcatcctctgggaagatcgaatcactctctacttcctagtcactatttctctcctaagtctcgcctacgcgccagctgctcctatccccaatcttcgattgcgactcatcggtttctcccttctcttcgccaccacccttcgactctctggaggttcgactatatgcagagaagaaaacggagcatcatgctcagtttcattctatcaacacgcgtctacccctcagtcgcctagctggttgctggctttgtctttccctgtagcctacgtgctaccgagcattgttggttctttccttgggatctcaaagtcttatgccggattagcacccaccataaccgggatgttatggcgaggtgtgatgctagctggttcagtctactggttgtttgaaaggggggaaacatgggaagcggttaaccctgcccggattcctttgttgaagtcgtcgaaagtttggttggccaggctggtgtttgtcgctgtaggagtgatttactttgtttggtatatttctcctctctgtattgaagcccgtcgagctggcgaggaaaccaagaccggcgctgaagaagaaggggaagaagacaatccgctggctcctcctaagcccaagaaaggtcaacttatcgtcttgggtttcgccaactctttcggatcaagctatcttctcttcctcctcccattgttctcccttctttggatactagctcaaccaactggccaaatcgtcctagcgctcaacctcgtcgctttgctctcgttcttagaattgacagactctcaaagagacgttaaagctgttgtacaagctttcgctaggtcaacagaccctgcaggcttcaacggcccggaagccggaacgatcctaccacccacgttcactgaagcttccaccctggctcttctaagctctttgttgttctacactaccggccatcaagccgtgctctcgtctatccattggtcgaccgctttcattggtttcccgacactcactcaacccatagctaccctttttgttggactgaacacctggggtccgttacttttgatcacgttggccgtacccctactcggtcattggaacgtctccccaagaccaaaaaaccacgtaccagtcttgcctgattctctcaaagcgattcttggctactcgatctatcaatcttcggtcgcgatctcaacgatgacttgggccgcctggcacaggagacatctcatggtctggccagttttcgcaccgagattcatgatggcggccgttgggttggtcgtcgttgatctaggcctagttttcgctgttggagtgggaatgagactggtcgataagaaagtcaagaaggtctttgccaccgtcacttagatttcagttcttcttctctcctcttcatacaaaagcgattaaacgatgtttagcaaacaaaacgatgcttgcgcttgttgttcttatttgcatttgtgtttatgtttacccggaaaattcttttctttttcatatcattattataaacgagggaaccaaggatgaccgccatccgcctggtccttcttgcaagattcgattaattgcgcttgatcctaatcacaaagtaagagacaatcccaagagcgataacagagttcgatgcgaacagaacgaaggtgttagtacgctggatgaatctgaatgatgggcgacgagaatagggaacatactgcttcgagcgtcatggtaatatgttctggaagcgggcttgaaactatagacgttgctttagtcgggaagtcttctaaaggatcgttcaggtcgatcgaagccttggttatcaagacaagacgaaataagacaacataagagatgttagatgctgcacccgacgtatctgacacaccagttatggtaaaaatctaaggggtgatgcaagaggggaaacaactaacaagaccaaattgaatagcttgacaatcctgatgataatccgaccaagttaggatgaatcgatcgttggtcatgttcgaaacggaaacagaggcggtccagtcgacccatttgaatcgacttttgaacctcgcttggaggacttgtggcggaagagtcgcccgaggaagagcggcctatgatcaagtccagtttagagtttaaagagtaagagtaagggtcagtgcagaacgtgtaagggttattcccatggttgatgtaacaaggccaggaaagagacataccaagaaccgctgcctagcgagcgctcctaacgcccgacactgcatctctttcgcctcccaagcagcctctttatcctcctgtccttctaattgattcaacaggtttttctttcttctcaaagagttccacacagactcttcctctccaaataatctagcgccagcccaaaagatcattgcgtgttcgggaggatcatacagttcaagctcaaatccggaaaagatcacatgtcgaatgaggaacagtcgatgggcgtgaagcgcgagggggataagacttagggggatcgtccggctcgctgactgttcacgcgcatattgtagaagaagggagaaaagcggtcaaattcatatgcacatggagaaagcttagccagcaagtagaagaataacaacggcagacgatttggttttgttggaagataagttgaatttggggtatcagatctatagcctacacccggtataaacgatacacgagcgtagaagaccatcggaggtcagtttctgtacttgagaaggaagttggtcaacagaaactaaacatacttcgtcgtataattcttcccattgggagatagatttcgcaatcatccgcttttgtctaggtcggttctggcaaaagttgatgagcgtgtttaccagaaactaaaccagtcaagagcgtgaaagagtcgaggaggtataaatcagtgattggttgtcagcaaacgcgcaactatgaatagaacaagattgagggtagtcgagaagcatggcgaggtgggaaaggaaggtgaagacatacgccagagaccctttgctcgaataccttgacggcattacctaaacacggacctggtctgacgtctcccgtgattggatctgaccatctccattgtgggggatatacttcatctccaagctcgaccgcaagctcgatcgtccgtggagggagaagcgcgttcgattcgaagaaatgatcggatagaatacgaagcggatgggagttaaggactaaggaagttcgagacgagtagatcgtcgactaagataggaagtaaacagtcagagctcaacctaggatatcataaatcaaaaacgggtagaggaggaaacgtacgatagtcagggatcgaatgatcggtaacgtctgaggacgagttttggagacgatggaccaagccgacatgtattccttgttttagcaattttaccccaatcataacacgtaaagattagcagaagagtgttaggggttcagacataatctcctaaacgtcaataaagatacaatgggaatatataattaacgaaccaataacccctcaggtccgccctctcctagccgactcacaatctccaatccacttcccaaattctttaccatgtcccatggaacttgttcaatctctagcactcccagcggtacatgactatccagtctcctactgactgctgcatcgatcgccgcgtgagctctgctttttgacgtgggcgtaggtacatgtgttttttgaagagttatatgaagggaattgatagacggaaggagggaggaagacggggaagaaggtgcttgcagggataccaggagagcctgttagaatccataatcagcgctaatcaagagaaactggtcaaaccaacggatttctaaacttatagacatacatgacgatagttcagatgatgcatcagtactgttttccattcgtcttcgactgaaattgatgaaacgatcacaatccgtcagtctgatacttcgtaggtctccaactaggaaaacacaactcataacgaagaggacaagctagctgtaaactatactcaccagaagaagttgagagccattcttgagcttgttggatcaaatctaatatttgggtcgtgtcaacatcatcacagagggctaggccgaagcgatcgcctgagaagtcctctccctatattcatgtagaataataaggaagcaagcgtcagtgttaccggtaacttatcatatgcgatctccagataacccctctaaatcatgaacgcgcgcacaatcctctacgcgcgagtagacatcgaaagcttggttctcgaataaatcgggaggaactcacgtcatacagatttgattttcgaaattcttccaaggtcaattctatcgatttgcaaacacccatcaggtaccctcttaagaccaaccctctcaactgaactgggcatctgttttcgatcggacgcgtctctacttctgatgttgatgattcgaactcctcgccatcatagataggatcgcgctccaagacttttgacagcaagttttcgagatcgagggccttcaaatttgttgggtgaaggggaagaatggtatatacggtttgggcgagtgtagatccttgatggtaagccatctgttgtgaaccgcggtcgtatcatgtcaattcgactaaacgcggaaagttgaatctatggcaggaagaatagatgctctaagggtgtcacagacctcacatgctaggactcgctctaagatccaggctatctcctcgggcagcagcggggcgaatggatcgtagtcttccctagctgtctcttcaggaaactcgacgccagtgtccattcgaggatccataacttttcagttcgaaggaagaaaaggtggaaaccgagtcttaagcaatgagacaaatagtgccgaagatcaatcatcaaaaacagagacatactctctatagcattcatcgcatcctgccgattgccaatgttgacaggtaatttcgggcatgcccaacaaggttctgtaagtcataggagaatccacaaccgcacgatgacaagtccacaaggaacgaaccataagagtgaggtttggcagcttgacaagctgatcgatctcaagctccgacgttccatcttggatgagatcgatagcagagacgaatgttgagggcatgtatgttgatggctgatggctgatgccttttgtatggtctacagaagaaacaggtaagaggtagaggatgaagtggtaaggctgtgtacttgacaatcacgtgtttacctcatgtggcaatatccttcatactaccttcaaacgaaacccggccgaagcgttttaccatcgttcaccataagtgaggagtccccggtatgtacgcttgttctcgtcaccttcagagaactacctcctcggtcacctcttgctcctcagctccgaaccggttactcggctcgaaaaactctctttctgcagaactctggagaagcaacacgtactcaagatcacctggaggatacagcgttagatcagctagttccaaaaatgggtctggtggctttggctctttcaacaatcggggaggcaacaacggtggtaatacgagaggaggaactgaaggaggtttcggtatgcctggtagacctagcccagatgcctggtcatccttagtatctacaaacaagaagcctgcgttctcagcattcaacagtgtcgcttcttggtcaaacgctaattctggtgctgaagacaaagacagaaaggttggaggaaacagaggatcaggtatgaagggtaaacgacaaggatctttcagcgcccctcctgccgcatcggatttgccgccgaagccttcacccacgccctcccactcaaaccagccctcaaatcaaacccagaatgttccacgcagtggttcctcctcccctagaccacagtctgtaccttcgactgatcgaagcagcaccggaaaaggcaaaggcagcaacaacaatcagagccagaatcaaactcagaaacaaaaccgaccttcgtcttctcagcctaaaccaagacctggtcttcaaaagaaaacaccctctgactccaataagacgaacagtaattcacacagaaaacagcgcgtccctcgaggcgatgtatacctcccttactcgatatcagtagcaaacctctccaagttggttggatgttcgctccgtacgtacaaacatctgtttgaatgattgtgttggagaaccacgtgaaccaaacactgacatcgtcgagattcttaccaactgatttaaattcaaaggtcggttgcagtatgtcataaaggacgcaggcttgcctcatgcggatcctactcatcgtatgtttcccgcttctcgattcgtccttattgtttcaaatctcacgtgtgccttcttgttattggttctttcctgttttcttccttttcctctccgatccgcgctttctatgatgatgttcatagtgatctcggccgatgacgcatcgctcgtcgtttacgagttgggattcaatccggtagttgacgcggaaaagtcgttcgatatttatccagagtatgtttatttcgtgttatgtatcaagtttctctccaatgcttgagagaacaagaagctgacggggttcgtgtacgctcttgattattttataggcctgcgccggaagatccaagttcgttgccattacgacccccgatgtacgtacattcctcaaatcatcactttttcagagacctattccatgaggctaatgtgtgccatggttttatagtgtcactatcatggtttgttcgccgtcttttcactcacttggttcaacccaagaaacgtaaggcgtttcatgttctaaagcgcttccttctcttcttccatagggtcatgtcgatcacggaaaaacaactctacttgatacccttcgaaaagcggctgttgccaaaggcgaagctggaggaatcactcaacatatcggagccttttctgtccctattgcctcttccacccccggtgaggccccccggacgatttgcttccttgacactccaggtcacgctgcgttcaaagcaatgcgcgctagaggagcaggcgtaacggatatcgtcgtgcttgtggtagcggccgatgatggtgtcatgcctcagacgagagaggtcattcagcttgtaaagaactcgccaaacgttcagctcgtggtagctatcaacaaggtcgataagcatggtgccaatattgttcgtactaccttccctcaaccctctataagactcgagaattgacgctattttattctaattatgtatcgaaccatgtccacaggaaaggatcaagaacgagctgtcggcaaacaacgtatatttagaagattttggcggtgacgttccagctgttgaagtgtccgggatgacaggtcaagggttggattatctgatggagaccgtatcaacgatcgctgaggtggcagagttacgagcagaggtagatgcccgagcggagggtgtcatccttgaatctcaagttgacagaggaagagggttcgtcaatctatatcttccttttatatattctctgcttcgagagaatcttcttcagagtcacttactcgatcacccatgtcctcccttccaaatttcataccacaaattgatcgacagaactgttgccactgtccttattactcgaggaacgctcaaagcaggttccatcttagtcgccggtcagacgtggtgtaaagtccgtcaacctcaggatgacaagggcaagccgatcaagaaagctacacccggtacacctctatcatgttccggttggaaggatcttccgtctgccggggatgaagtcttggaagccagtggtgaggaagctgcgaagaaggcggtggcaaatcgaatcagagaaatccagcttcaggcccaaattcgagatatcgacgtgatcaacgatcagaggagaaaagcatcagaggaacatatggttgaatctcagcgaaagaaggatcttaaggcagctagacgagtagctttcatgaccggtgagaagatgccgacacctgaatggatggtcaaggatgaaggaaaggaagacgagatcaagggcccgaaggagcttaggttagtcgtcaaaggagatgtcagtgggacggtcgaggcagtggtcagcacattggagagcatcggaaacgcagaggcgaaggtgagaattatctcatctggtgtgggggacgtgactcctggagatgtcagtatggcacaaacggttggaggtaagtctgttgctttttactctttacttctcgttcttcatcttgagatttctatccgtctcatgattctgattatgttggtcttttgttttaatcagctacgatcgtcggcttctcggtcaaatgtgacagacagaccgccaatcaagctgcggtgtcgtctgttccagtctatctagagggtgtgatttatcgactagtcgaagaagtcgtctctcgatgttccgacttgttgacaccaatcatcgaagtcaaagttttaggcgaggcattatgtcagcaaatctttgaaatcacgctgcccaataggacggtcagcaaaatcgcgggttgtagggtaaataatggtctcgtgtcaaagggtgaaaagatgcgggtgttgaggaagggtgaggaggtgtttgttggttcgtccatgtgtttctactcagctgctgcaatcgcttttgtttcatcgatttgaatcgattgtaggagtactaatgatatgtctcttcttatctctgtgtgtttctatcaggtcctatactcacactcaagcaggttaagaaggacgtgaccgagattcggaagggatctgagtgcggaattcaattggtgggcttccaggatctagaagaaggcgatgtgcttcaagtcagtctacttcccctcctcatctctatgctgggtacggccgatatctgacgagattacgttttttcatctcttcattcctgcagagtgtgcaaattttggaaaagaagcgttctctatagaaacccgtttttggcttctcatacatgcgagcatcccccgtcacaagagagaaacccggtagaatgagaagaacaagggaaaggctgagttgagaccaaaccgttggagacgcgtgttaacgcgtgtctttgacgcgtcatgttcagtgaacatttctacctttccatttgcggtcatctttcctcttttttcttcttcaacttctacttctccttcttcttcttcgttttccttcatcatctcttcataggacgcctggtgcgccttgtaaatcaacttcaaccatgtttaacccttcctcccctaccgtatcccactctaccttccagcgatccctccccccttcttctccctctctttccttcaaccaccagtcgaatgctggtgatgtgctacctacattcatcaaaccctctgctcgcccttccgtcaaacgcgccggcctcgctacacccgctccttcttcatcttcgcctataggcaaatctaagagttcatctatccgcattcttggttccacaaagacggtgtcaacagcagaaaagaaacgaaagttgactacaaccggcaaaggagacggaatcagaagattgaaggtcaaagtgacggatggatatgtctcacccgctacatcttcgcctgttcagaaaagatccgaaacattcttgaaaggtcggagagttttggacagggaagacgaagaagagaaggaggatgaggatggtgacaagacagaggatcctttgtccgagattgatctagggtcgcgaccgttctcctcctccgtctctccagccccagtctcacctgtacctatctcccgtagcgcatcaagcctggtttctcctagttctttctttgcaggatccggaaataaccccctaaagagtcggccgtcaacccgattgacgaccgaacgaactctccaggtctttccaaaagaatttcttcaatgttcactaccagttctacatagttccgactctggatcactatcgtctgtgacgcaattgatcctctttggacggacgcaccagccgtccaatccactcaataaacctaccctactctctccttcatcctcgactcgtttggacttttcatcgtttacttcttcgtctaccccggaacgttacgtgttttcgctccctcgaggatctcctcatgcctctaggcaacacgttctcctttcccggtcctctcaatacccacacctgatcactcttcggatactcagtcggaatggcgcgcgtatcaacggaaagcgtgtgcttcagggaaatattgttgtttgtgatctcgagaaacaaggagaagtccgggtgagcgaaccggagggtaaggaaagaatcttgaggaaaggaaagggtggaagacaagactgtttgaggattggttattggggcggagaagtcagagttgagattcagtctgtgaacaagcaagttcaaacagacgaagaagaagctctttcttctgagatagactctgagtctgaggcggaatcttcggcgctgtcttctacttcgtctgacgaagctgaatctgaagccgaggctgagtgcgtgagaacccctgtccgaactcgactacctacccggacaccctccccagtgttctcgcccagtccttcacctcaaaaaccgagtttacctatcccagctcgacctctcgagccatcgcctgtacctgccgaggttgatcttgcctctctcctctcgtcagctttggtattctcgagacagacatcattaactctgaaggatctgacaaaggcggtgttggacggaaacccggcacttgtacagttgggttcggaacagagatgggaaagctggctggagagcgagttagagagtgatggaatgtggggaagaatcgtcagagttggaaaggttcgattcattctttcttcctcttgttctgccgacattcttcgtatcctgcaagttctgatggctcgatcgttttgaacatttcttcggtttgtttccttctttcttctctgcttctgcgtctcatgaatctaggatgcatccggtcatcctcttctagatcaattcttctatgatcccgccaaagacgcagacaagacccgagcagcagagctcggcagtcttatgcgacccctccgaggaagtaagtcgctattctcttttcctctccctctttcttctcttcgttggatattctcttctgacttgaagctcttctgtctttcttctatttctcctcaacttattctcagctcaacggcaaggaaaaacatactttttcaaaagaccatccactccgggaaagaaacgtagatgacagtagaagaacgcaatgtttttctttctctcttttccttgccattttttccctattatctttcctcgtatccgttctttccttgttcgtgtattcgagcctttccataatttcttccttctccttcctgagctaggcgagaaggcaaaagaagaagggcaagaggtatattggattgaccctgcgggtcaagtcttttgctctctctctgggttgtaggcgcttaccggtctaagcctgccattcgtcccatccgtctctccgcccttccagttctcagactgaagaacagaaagtgaacaaaatcaggaaccggttctgtctctttgcatttacctttctcttttccttacatatatatttagttagttagttagttagttggttagttgagttacagtcgtatcagatgcgcattttgttccattctcttgcttccatagtccctttgtcgttgtctttgtgttttagtatcatcatcgtcaattccttttatgccgatttcctattgacttgatagtaaatcggtataaaagaggaataagagaatgcacatatgttccacaatgggggatgatcacaatggataaacattcttctccgacaaatacaatttcaattttatagtgtacaatgtacaaacaaggactttacctagaaacggaatatgtcaccgaaaggctcacttcaagaactagagacgaatgacaaaaaattgtcggtttgagtgaatcaccgaaggataaaagggctcaagaggcaaccagaacggaaccagaacacacctgtacacgttcttcttccgagacatcactcaatctgaattctgaatcctcgttgacggagatcaacccaatctcctctccttgcccttggttcactctcgacctcgcttcggataggaagaacgtccaaaaaccgggcaagttcggattcgtagccgccgtgcttgatgagagacatgtggaccggagtgaacgaatgaatctgtgaagaaggaaaagataagatatcgcgcaggttaggttcgagccaagagaggtagagagaacggggagacgaacccattgaatcggggggattcttcgccctagaatccaaccgacatcaggagaagaaaccactcgaacattacgtcaacacgcgtccgttctctcctcgcgattcctttcctggactctttgtagcaacatgaacaagaaaagacaaacctctagggattcttttctgagtttcaacaaacaatccaacgcgcgttcgttggatcctgcttgaacgagtctgaacatatccttctgtagacgctccaatgctgttgtcctcacggtccaaagattagaagacgaaggtgaacaaagcttgattggatctgatggggagtagagacagaaagatgaataaaaggaacataccaaaaacagtattatctccatcacgcttgatcagcttatcaaattcgctgatgggatcctcccggtcttcttcccttccatcctcttcatccatgtcttcatcctcgtcctcatcctgggtgatggaaccatcgcttgcttcatctcccactgccgttgtgggaatcttgatagttctatcgggcgagagatcaggcccggctgtcgacccgcgctgtttcttgatagacacctcggaagaaccaaccggacgacgtctccctgagagtcgctcgagcgggagaaacggagggatgggatccagagtggattgtgcaaacgtttcgcctgcctttgcgttggccatcgacgaagaagcgtttgctcttgcggctgctctgttcttaatcaaaacatctaacccttctcccaaactatacgtgaaataagattcatcaaattaaacatcagtctgaatttttttcgaatacaaagagaaagagatgatgtcgcgcgaaggataagatggagaaagataggggaaacatactctatagattcttcgtcttcttcatctgggtttcttctctttacacgaacgactgttcaaccatagaaggaaattctgtcaaactggtgatcctctgacatggttggaagacaggagaacaagacagagaaagagaaggactgtcatacctttatggacgtcaaacacgtcgacagcagtctggacggtctttgccgctgcttgaaccagctgtctcggagttgacagatgactcgttaggcttggatgggaagcgcatatcggttgatcgggggaggcagtgaattcatgatacatcgcttcttttactcgatgtagtcctgggttgtagactttagaaggatggtaccatggctggctctctctgatgttgttttcaggacgttttgtgccaaagaaaacgaaccaagacaacaagaaaggggcgttttcagatatgcagtccaccaggaaaaaggggggggggggagaaagaaa

SEQ ID NO: 232 - DNA, 28473 bp, Xanthophyllomyces dendrorhous
gggggggggggagaaagaaacgcatggcaagaactgacgactctgtctttgtttctagaaagtctaaatccaacgcgttgacaagatccaacatcgcgttgttctgctcatccgtgggcagatacgggtgttcctttacgatatttccgtctgtgtcctttagatgcagcagagagtcaaaccagtacctccgataatcatccgcgaacgggacttgaacgagttgtaagccgtgctgaccgtcctggtagaccggtttgcctaccatcatcctgggcgcagcgttttcctggtacgtgtacctgaacagagcgtagacttcaccctttggatacgttctcatcgctttcaccaagctggaaatttcaatttgtgattttgttgatttcggattcgcccagacttggtatacttcgcccatttctagttctcgttcgaactaaagcggaaaggatgaggagaagcaggatgaaaagggagaggaagggagaaggaagcaggatgaaaagggagaggaagggagaaggaagcaggaagaagacatcctgttcaggacactcacttcaggactcggcaaaaacagaaaaagtggaacacaccttatgagcgggcataaaccggtaaagccagagcgccttcctagtctcgaaccttcctatgtctgaatcctcgatcgagattggtaaccaggtgtttccgaatttgtgcgatctagtcaaatcctcaaccgccctgtcgaccttgacggaatctttctcggtctcggtgccagcctcggtgtcagtttcagtttctctggggagttcgacgatgtattttttgataggtttgagcgggttggagatcacatcatacaggctagccgttatctggaatgatccgtcgtatgttgaggaagaagagccggattgagaaaccgatcggactgcctgggaggatgatccggcggggaaagtagaggtttgagattgttcgatcttgacggtgggattctgttcagggtcatcatggtgtgagtcctgagtgactatttggcttccgcccaatctcactcccgctccgggtctctgtcggaccgctatctttttcgaccctgggggcttgacgagagcagtcttttttccaattacgacgttaaactcgagatgactggttacggcctcatggttgacgtccatatccggatcaccgataatgagtgagatgctgttcatcatcggcttgactgtcttggtgcttggcgcgcgggcatcgaggacacttcgatcgagggacgttcggatgatacgttcgggattttgtgcaatgagcccagacaatatttgctcgttggtaatcttgaatttaaaagagagaacccccggtcgaaaggtcagctggcttagctctctttttcttcgcagagagcctgggagtacacacaaacatcttggtcttctcaaacgaactcggtccagcgataaattcccattctgggtcatctgttccatagactctatatagaaggatgagatgagactgaggcgagggtttgtaattctaaagaagagtttgttggaaagattaatgttgggaacgcacgaaaagttcacagtcgcgtttatcttggagagacaattagcaatatggtcaaccagatcgtccgccagagcgccttgagaagctgggtggcggacagggaaaagacaaaggcgaaaagttaggatggttcgaggggaacaagaaaaaggaggaattgacggagaatttaccgtctgtcaaggccaaaaattcgtatgaccaggttgatctgttcctagcagccgtcctgtctaactcgctcaacgccagggtgagtccgagaaggactagagtggagaggaagaggagaaagagagcgcgcacatcagaacaagaatctgaaggagtgcaggaagagaagaaacttgccatccccatcattcgtgccgtttccaagcttgagggatttgaccttgtcaaccatccatttcgcggcggtggccggttggaagagaacgtctacaccttcatatccttgagtttgtgggttgttggttcctgagtgatggagagtgggtaggtgtgtgggtgcgcggatgtccaacgcatacaacgacaacgaccttctgtcagtcagaataagctggtcgatggcaaggcgagaccaaacgagagcattactcacggtcacctgtagcaacgaccatgacgtgttcggtctttcgttctctcataatctatctcgtttgggtgcatacacacacatatacatgagatggaaatccgatatatcagtttctgggacatccaatctataaatcccatgtatatgcgcatatatatatatgtgtgtgtgtgtgtgtgtgtgtgtgcgtgcgtatggcttgcttgagtgagccaatcttacttaccacagacacgatctttctcataacaacctctctggcgagctcaaacttggaaacgacggctgagtgcagatgcggattcgaacgtttttccgggagcgactgttgtgggtcttggacgagtgcacccatcggctgagagcaatcgatgacaaacacatgggtggtgtatcctcctctgtctgccatgagaggaacggggtgaaagagtgaacggagtattgactgggcagagtgtggatgtgtgtgtatgaaggatcggattggatgattgaggctgaatggttaccgagggaccgcgaccgatggtcacaggcacgatcaggggcacggtcaaaaggaacggtcaaaaggcacaggcacaggcacaggcatccaaaccttgatgcctaatcaaggcgcattctgcagccgtacctgatcgacagagcgaccgaaagaaggaacgagtaaaataaacaacgaggcgctttcttggctactgtagtagagtttgctcgctgagcggccagacctcacggtgagaccggcgggcatgcgcagcagacaggcacactgtttttacactctccgtcctgtttagagttgccggcgagaacaagcggacaagcagacaagtaccatcactttattattccagctaacgaccgacgaagcgatcggtctgttgacgtcggagtgataccgacaagcacaacaacactcaattaatcaatcacttacttcatttaggtttgagaaaaaaccggagaggaagaagaagcagaagcagaaacagaagtagaagtagaagaagcagcaagagaagaaaagaggaaagaagacaacatcatcctcgataccttcgtgatagccttgttccttctatacaacctgctcggtacagcctccgttccttccagtctctctgttctgtgtccttctaaaataaagccatcctaggacacccatcaatcgacggaaagacaatcggcagacgactcatacataccgcacacacgtccagtaggtcttctcttttcttgtctatgcacttgcttttatctttctttccttctttctttctctctctgttcttccctctgttcctcttcactctttttagagcagctcagagcagccaaacgagcagtcaacatcgctcagacgatctcgtctgggccacttctacgtcttgctcaacactttgatgtcactcgctgcacagagctcaccgacggctcgacatgcatacaccttgcccgaactttgttcttatgcttgcacttgcacttgcacacatacacgcacattcacaacacatatcacacacccactctacttgacatgagctatgtgctgaagactgtccatccttgttcttcctagattcacaaccgcaatcgtccatctcgtttcccctccaatatggcgccctcatcattcaaacagccacggatctccgtcagcgaatctttccttcctggcccagggttttcatcgcggagaaactcctcgttcagccatcatctccctggatccaagcgaaacagacagcgattctgtcttggcttgttcgctctcggcttgaccgtcatgcttctcacctactcgaactcgcctttttctagctcattacaatcaagtagtgtgttccaaagagaaggccgaacgggcgtgtcggctcctgcctctactccagcccctgccactctcccagtacaaaccaaggacaagcagaagggcatcctcgccggctggagtctgaacggtaaagaaaaggcacaagaggttgagggcgagtacgatcttcattcaattgccgaaccggaagacactgaggagactgtcgtggctacctatgtgcctgttcaagaagagcaaagtgagctttcgttctcttttttattctttttttttttctcttcattcctccagttctcttttgccctttctgttttctcactcgagcgtctttttttttggcttcttccttatcctccttgaacagaacccaaaccaatcctggcgcacatgaccccggatggaaagattgaacagatccaaacgttactatactttctcctcgacggaggtaccctaccctctacagacaagctcgacttagataaacccattacattagagactctctcctccttgggcatcggcggctcgacgggaaccgtacaggacgaaagctggaaggcgatgctcgcaaagagatatcctcttgttgtcttttcaaaggcaagtcccgttgctcctctctccctatctctctgttctcgcttctgtcatgcccatacgctccctgggcttatcttttatcaacttttctactcttttttcccttccttcttcagtcatactgcccgtactcaagaaaggcaaagacgattctgaataacatgttcctcaccccggaaccgctagtgatcgaggctgatctgcgccgttcgtgtctttttctcgttcttttgctctttccctctaccctccaatgcgcttttctgatatgtttttcattcctttttttctctttcctttctgaactacagccgacggggcagccttgaagacattactcggtcatctcacgggtcggaacacgttccctaacgtgcttatctcgttcgaatctattggcggtggagacgacgttgaaattctctactctgaaggtgggctcatcaaaatgttgcgcaaggcaggcgtcagcgttcagaaagcgtagaccgctcttctatcgtctttgctctttctctttcttcctctactttcgatcttgcttggttctattttcttttttttcttcttgtactcttttcggggcttttcttctgttttttttttcctttaaccttcatctatctaccggcgcgtgaacgttgtcagtcagttgactctacctacactagttgtatttgtatttgaatgacattccgaaaagtgtcttcctctttgcgtagcatgaacaatagctcagtgacgaaagaatggcagctggtgaatgggtcagatggaagcgaggtgtttgctgagatgtaacatggatagaccgtcggatgaggagaactcggtcgggtataaagcaaaggggatatcgttgtatgccggcttaaaaaagagattacacacgcgacgattgtttcgtttccacgctcattctaacaacctacggccatcctctctccttccctctttctttattcctctcttcgtccgtgtttctttggatcaagaggaccaggacgttggatcctcgatcgacactctcttctttgaactcatatcttcatgcccatgcctcatccgtcggctctgcctctacatatactccggctgatcgcactacatcatctcgcgttcgttttcaccttcctccttcgttttctttttcccttcctttcctttcctctcgcgaaccctttccttgaagactgattttctctgttcgcttctctgatgtcgctgcttcttggacttcccgatctgttcataagtcaacatggattctccgcatcccatgctcaagcatccttagcactgacagatgtcctcgccaggtttctttcccttctatcgagtgaatctggctcgtttgccgaatcggcaggaaggacccaagtcagtcttcaagatggaatagcttgtgttgaatcattagggatctcggtgggtgatttggaggccgtctggagaggagatgatcgatcgagggtggagagtgcgataggtctgaaacgttcgtctttgctttcttcctcttctttcttccttcttgctctccttctcgcttgcctatgttgctttgtctgacccttcgttttacacatatctcatctatttctccgtattgtttcatctcgaaaagattacctgaacgaaggacttgacctagacacgtcggatcatcagcattatatctatactgacgtcccgcccgaactagaaacactgtctccatccggacgaaaacggtcggcgtctgacgcgttcttggtcgatagtctgtctgatcaatccgaagcagagtcggatgagcaggacgaagacgaggatgaggagaagataaaagaagggcagaacgtgtcggtcaagcaggaggaaaagaaggatgtagagatggatggaggatctggaagttcagacgaagaagacgtgtctactcctttcggtggtcagcttagtgaaggtcagaaacccaagatctttacttcggaagaaccttctttcgctgaaggaatcaaggacgaaggcgagatagtggatgagagggaggaatggaaggcagagacattgagggaggttgagttgggttgggttcaatcgtggaaaaaagaagagaacgatggtccgtacggcagactgtcaacctttcttccgcctctcccttcggaagaggcgtacgacccaatcccactctcgacgcctggaccgctgtctggtttggccatggagaatgataatgaggacgggaacgggtcgttgacaccttcattagaaccggtccttcttgaacctctccatacatctctcgtcccttcgttcctacatccttcagcattctcttcctcttcatcgacaaccgtactgccaactctgtcgaacgacccaccagctccccttaccacttcgtccgctcctaccttcaaggcgctcaaggcagcacatgcgtcccttccgccacctcagaccgtgtcgtatctatcccgaaacccaaataaacctcgagttcgagcggcctacctgttgtcgctcgtgtcgaacccaccagaaaattattcaccaacaagctcactcttcagttctgtccctgtgcccgcgcctagatcaaccgggatcgtccctacgttacctaccgacccgaacgtcagtcttccccccggagcgctcaaatcgaaaccgacggccggtcatctcccgacatcagcgttatacccatcgactccccatcgctacccggcgttactctcttcgttggctagacatatgggtaacccaggtttagtggcacgtacgacaaacatgccgtatccagccccgttgatcgacaaggggaacccaaagttctatggcttgccccgggttggaagagcgacgatcgtcaaaccggtagaagtagaggagggcgaagaaccggaggaaggagaagagatcaggttggaagcaaagagtctagatgtagagttgaaagctaccgttcgtccctgctcttccctttctctatctgtttcttacatgcgtcccctatccttgctctcaactgagtaactaacgcaaaatgattgtctacttctgttatactggatggggcatctttagtgggacgcgccgatcagagattggacggataccgaacttccgtttcaaaggaaacgaccgccgccgcctcctaagaaagaaaaggagaaggtcaaggagtaaaatggcacagagatcgatattgtatcatctcccccctattattttcaccaccggttcttttttccatttcttgtgctctatccctttgtttcgttcgtctctttctcttctttctgcatccttcatatcacccccaactcacttggcatccacgattccctctttcctcaatccctgataatcgcatacgcatctcataaaaaggaaaatccttgtacaactgtgtcctaacatatactctcatacgcaatacctgcccacctatctacactacctatttggctcgagagagcccttcgcgctttttaatgaactttgacgatcttcaacctgacctctactcctcccgttaaaataaaccaaagtagagcaagccatacaacagaatatgaaacgtgaccacagatcacggccgacccataggagaaagagaaagaagaagaagaagaaaagattctctatatagaagaaaccgcactacctgtatcgaactttcgaggatcacctgctgcttcccagcccgattctggtgagaatttcacagcgcatgcaaccgatagcccctttgatgttcatccatcgtccgtcatcgttttaaaaagagaagagacaagtagaagaaagattcaatgtcaattttatttctttccatagagcagttcgcatcttgaaaggaaattgaaaggaagaagcaaagaagaggggacatacagtaggcacataagtcacgttgtgccccaacgacgacagatagtctctggtctccatcgagaatctatcatagctcagaacaatgacagaaatagatatcaatatcaggattctagaacaaaactcaaacaacgaaatgaaaagataggaaagaagagaaaatagtcggaccctttaaacccaagagctggcatatcctgctcgatagccgtgacggccggatagacctgatcatgcaatctaggagctgtcaacgcttgtactgtaagatccaccaaacggttcgtataaataacatcttcagatcagatctgtcgatcgctctgcgtgatcgcggttgtgacaaataaagaagagaaaagactgacgagcagacattcctcgatcctgtacgatgagaaccctcaaaagatgttagtctggcatcgtttgaaaaagatccttttccagttcatcccactctctctgggacacaaaaggataggacagaaaatcttcgtgacgtacaacagcattcaagaccatctggatctgagccgagatgattctcgatccaccagcgcacgagctcgcaaacatgaatttccctgatggatcatcgatgatgagaggcgacatcgaagacaaaggtcttttgaagggaacgactggtgagaggagggggataagattggcgtaggattcaagtcaatcaaggctgaggttaaggttgaggttgaggttaggatttagtaaaaacaaaattggtgggacttactatagttcgcaggcgagggctgtcgatcatgatgaggacaaaggcagtgtcgtgtcaaaaatgaagctgaaggcgtaaagaaaacaaagagacatacgatgtaaccgaaagcgttcctccttcctttcacactaaagtcgtctaccccgtcattctacgcagagagatattaagcggcatgaaagatttaagtacattgagtggttaacggaaaacagaaagaaagaggtgaaagtggaagaaactgacaaggatgactccatattcaggtgtcatgatctgttgatcagatagaaccaacagcacgtctcgattagtcagtaagtcggctctgaagatcgcatactagaggtgttcgtactcttgatccccagtacctatatgccccatccaaccagaccgaaaagaagcaaccgaagtcaatattgttttccatcaagacagaaatcagccgagatgtaccggacaaatcaatgaggaatagaaggcctttacaaattaacagtcgtcgtcaccgagacggccaaaccatcttcgtcgccgacgactaacgcgctcgtccctttgtcgtccaacacctcccatccctctggatcatagtagtcgccttcatgagtggtatggtcattgatgagcgatctgacatgctgggcggtcgaaggtaggagaaaagctcgttgaagagtcgaggcgttggtgtatccgatgtctcccagaagtgttcgttctccataagcaaacttggtgatgaaaatatagacggatgatcgcatagtggaagaagtaaagaaaggaagaaatgagtaaatatcagatgatgcttgtgcttccttaacatgatgacgtaccttcatagattctacaagtcgatggatattgacatctgaaggatcagcctcccgaccaaaaggttcatatccgttcattgtgttcaacgtcgagagcaccaagctacctgacgaaggtgcttggggagcataaactgtatggtttctatatctcatagagagcgccggtcgaacatgggcttgataatctgggttgaagccgtcagattcattcgaatgaaaagaaataagcaggtgaaaaagaagttaagatagtgtcaactcgagaaaaagaacatgatgggagagagggagaacgaactggccatgtcatccaaggacaaaacaccgccattcttccttacgctcgccactatgtcttctgcaatctttccgttgtagaacgcgtctggcccgtggtctgctacggcctgtaacgctcgggcgtacgtcggcctggtggtgagtgagccgacagagaggagtgtgccgtttggggcgaacactttcgagagctcagagtcctatttgtttggcaagcgcgatcaggatgacagaacaaaagaacggtctcagatgggtgagacaacacgcatagaagatgaggaaacgaacggtgatcaagaaggactcgttgtagcctggctcttgacctggtacgagtttctcgtttgcatatagcagggattcgcctttgaagtttgtcggccctctagattcaggtcgagtaagattcattgcctacagttcatagcatgacaaaaaaacagatagtgagcacgagaggccttgaacacacctatagaaggaatggatgggatgacaataggataaagactgacgacaaagaggtcccgattgatctcaaacccgtcactggcaagcttgatagcaggctggaacagatctttccaaggcaactttccgtgttttttgtggattgcctctaatcctcttagttcacccggcacaaggaccgcgagaccaccaaccattgtggattttgttgggtcgtcttcgaatatcgttccgttaagagctccctttgggttgtcaagattagacaaaacaaattcatagttaagcgacatggatattttcaattacgcgagagataagagggaagggaaggagttagacaaacaggtgcagctcctctgaaatcaatggactcaaacgttccatctggtgatctaacgagagcgaatccacctgatccatacagagtttcgtagttgcgaagcattttaagcaaaaggagggcaagtctcaatcagctaccagctattggatttcctcactctacatatcctgagaggtgtaagaggaataatgtagaaggatgaaggcaggataactagtagaaagagacagagacagacctccaccaaaaccggaatggtaattagctattgtgcctacacatgctaccataccgaccatcgcatccgccgcactccctcctttctggaggaaacttgctccaatatctgttgagaaggttttaccattagtgaaattgaaacagagatatatgttagggtattttccatctggatggtcaagagacaactttgttcggagagagaagagggagacaaagtgagacaaaccggcacatagttgaacttcacacgaggccgcccctttcttcggagtcggtttggatgtaggttgtaagagcgaaagggtgggtaagagctgaaggatcagttgagggatgtacatgtattgctgcttatactattattgttctgcttcttctcttgttctcgatgatatagacttgatagtgggaaaagagagagagaggaagaggggggagaaggagtttgttggtgttcgtcagaccaacggagttggccgtcagataaaatccagcaggcgataaacataacaaataagattgtattcacatcctccgctatcatcaccttgccatacatcaacagtcccttgctttggcacaagaacattcaaactcatcagatttcgcatacacatacacgcaaatgaggccatcagaacgttggaatgcatcttgtcgtcacgttttcttgtgcaacacctttcattctggccttcgtttcctccagttcttcaccagagagcactcgcctgtctactctctgaggactattgcgaatcagatcaatagtctgcagaaagcctgttgaatatatctaagagataattacagaagctcagactcgcttagaatcgattgagggaggctgagttggggtgaaatattgagatgccgagaaggtatatctgacggacattcttcaaacaggatcttggctgacatgtcaatgagctacaggtgataagacatcatgacacacccattgtgagaggcggagagtctatgcgagaatgcaaccatatcgagcccgaaggcagcatagtactgagaggggtaaagtatgatttttcatatattaattatgtttgacagatcttgaattgtttctcgatcggtttgttcttttccagttcttttctctttgtacaaagagtgtttgcaagcgtggttgctttctagagaccgaggcgatttttatgtaccgagagagggaagagcacacagaaaacagagttcaggagaggaacgctgataggatttctgcgtgaatgacctggacgagaagtgctagatgaatgagaagaacagagaagacatattcagcatatcgggaaaggaaagaaggtcttttagaaacgacaggcaatccactcacgaatcacatagactctttcacctcatcttcatgtgccgcatcatcggcttcattcttgttgtccttgctctcctttctcgttttcttccttctctatctctccttcttctcccgcttccaccccttcctccccttcctcatcgatcataccacccagcttgtctaacaagcggtctagcatgccctccagtccatccgcgacttgatcagcctcatcgagcttcttggcgagttctccggctgcgttctctccttggtcttcttctgaatctagtgtggcggtctggttaaggagatctatcatgggttggagtagtgcgagatcttctggcgtcaggcttgacaagtcgatgttggctagagatgatgcggcaggaggattactgtcgacgcctttgctgttgctattgccgttgctgccgttgctactattattactgcggtcgttcatgtaggacattgagtctgctacaagagagaggtcgaacgcgtccgagtctgaggatctagaagacggcatgggtatcagtgtaaggtatgggtgtatgcttggacaatctttttaagacgttcgcagaaaacagagatgacgggacaagccaaagaagaagtgatcagacataaccctaactgcatcatggtcacgtgaaaagcaattgacgagcacccgcgatctcgaacgcgacgcgttcagcgcgtcaaatcggatgtaaccacgcaccggaacgtccggcccggagacgattgccgaccgctggcccaatgatcgcggcagataggcaagggtccctgcgacacggggcaaagacagatcactgggagcaagtcaacgggaggcgaatagaaggagagaagcgcagccaaatccgtgctcggttccctgataaatgaggtgtaaccgaaccggcgtaaccgtagccgctcgtggtttcagccggtgggatgtcccgggttcctgtttggggtgttttgtgtgtgtgcctgtccctgaaggtgtgtcggtgtatgctttgagcgctcactccgtcgtccttcctcttttttctcttcttcgttatacctccgtcgggttttatcaacggcagggattagacaacaacataaaccaaggtaaaagaaatcgcccttttttctctcttgtcagtcaacaaccatcatccatacgttcatactcacactcagttgtactcactcaccgtcgtcgatcgtgtgctgacgtgtgccctctggatcatctgaaatgtctgctactcccggtcatgtcaaccctcccaggacagccaggcctaccatcagcaacagacaccgatcaaactcatcttctaagaccaacaaggctctttcgacttcacctatcagaaagtttaccgcgttcctgaacgctcgaacgaactctgcttcttcctcatcttcttcagtttcttcatcctcgtcactggtcttctcttcaccttcggtacagaatccgtcttctaacttagcgacccgtcctagatccaactcgaccattcccacgaccggtgtccgtcgagagctcactccgtccaatgcgatgagtcttgattctactccttcgccttcatcctcttctccttcatcctcctcatcctcctctccgttcaatggctcctctcctcttccgacgacttcattttcatacacacctagctacaactttgtcaactcgttcttctccttcacctctcctaccagaccatctgtgactagaggtcggtccacctctttcggtggtagaccaaagacggccgagttgacgacagacgatccgtcgtcaagagaggtccctaaaaagagctggcgaagctcgcttgtgaatctctctccattctctggcgcgtacaaaggaaagggcagagagatcggcggtaacagcaattccaaccgaaacgtccacgatgggtccgtcgaagatgaaggcttctgggagggtaccggagctagacgctttggttcgtcctgtatctgtggggtttcagacagccacctagtaacgagtcaactgacggccagtcaaacaatactttctacttgagagcagacattctgagtcaactccctacagagattgcactatacatcctactcttcgttccggcagagactcaagtgatatgcagcagagtgagcaagaattgggctctcctcgcgtccgataagtgagtcccctattttgttcagtgtatgcgtgtacagtttttgttcaataaaaacagcgcatacatcgacgcgttcatctttatcgagcaatgtcaagactaatccacagtcttttcaatacaaattggtagcaatctctggagggatcggttccagtccaatcctagatggaagctccgcccgacattcctcacgacgatcgaaccgcctgtgtctgtgcctagcagcctagtcgcacaactatccctgtcgccgatagcgagtcgttcctccgtcatcaccacagccactattgcttctacgactaccgtctcccagcccatccgaccagctcttcagagccgaacaagctctttgtttggacgaccccaggaaagatccgggctcgctacgctcgattggaaatatctgtacagaaagcgacgctggttggagaacagatggggcagatcagagcttgggaaagagactgtccttgagggtcattcagactctgtgtatgcattgcactttgacggttccaagattgtcactggatccagagatcgatcgtacgttctctctgtgccttcttatacttgcgaatgctttgtatccatcttagctgacagaaagatcaacataacaataaatagtattaagatctggtcggtggttacaggagaatgtatccagacgatctcaaatgcccatgacgcctccgtgttgagtttggcatatgacgaagaaactggacttttggtcagcggagggagtgattgtaaggttaatatctgggatctcggaggttagtcttttttgtttgtcgattgagattcgattaatgaacttacttatctcattgtttgatacattgtaggacccggagttcctcagcgggaagtcgtccggaaagcgacgatcgaaggccactctcaaggggttctcgatgttgctctcagtacagactatattgtttcctggttcgttccatctcttcatgcgaggatgggctgtttaatttggctcgctctgccgctgactatcctctgcgcatctcatttcgacttctctcagctcgaaagatacaaagctcaacgtattctcccgaacagactacactcatcttcgatcactcgtcggtcattccggacctgtcaacgccatcgctattcaaggcaaccaagcggtttctgcctccggagatggaaagatttgtctatggaatctcgacgcgggcgagtgtatcagggtgtttagaggtcacgaaagaggactggcctgtgtggactttaagggcgatttcatcgtttcaggaagtaacgaccggacgtacgtcatatgtcttttctccaacctcttttgttgctcacgattgatatttgactgatctggtcggtgttcgttgcgatttcccaccgaataggatgaagatctggagagcgtcgacgggtgagatgttgaagacgttagtcggtcatgaagatctagtccgaacgctctcgttcgatccaaattccggaatcatcgtctctggcgggtatgtgaccggttttcttccaaatgagagaagagaagaatgaaccagagcgaaactcatcaccgactttggttgactctttctgtcctacgaacatataataggtatgataaaaagatcatcatttgggatatgcattccggccagataatccgttctcttgaagaagatcatactagtttggtgtttgatcttcagtttgatgccggccggatcgcgagttcttctcatgataaacgagtggtcatcactaatttcggagatgctgagacaaccaaattatttgtgtaaaaggtttctttgtgtttgagattcctaccatctttctctctttctttcttatcacccacttgtttcgtcttgtcttacctcttcttctttgtttaatttcttccattttctgttgtgtcaaccgctcgtaaaaaagaaagaaattgtatccctttattttcctggtgtgacgctggtctcatctgtgctatctatatccatgcgcgttgtaactctccaccttctccgtttcagcctcgaccacgagctttgagctcctttgttaaaaggaaaaagaaaaaaagacccctataaagaatctgggaggtacgagaggacgaaaaggtatcattttacatttttgtactctgtatttatgttcatatctttccaagcacgacatcccgttcatcaacttccatcttctcgtctcctccatcgggtccatcagaacgaccgttcgtgttggtactagcgccagtagagaacacgtcgatacccgaagtaagggagttgatcagtaggttaagcctagatgatgtcaggcttggctcctgtgcgagtggaggagggaacagtcaaagattatcaatttcaataccagcggagagaaggcaaataatcagattgagggcaaggagggagatataaatcggttaggatccattaaacgaagtaagagaggagggaaagagaaacatggggaacgaacctgacgaacagtgtcgagatcttgaccaaacccgacaaccatcttgcccatccaaaactctctgaacttctttctcttcaactcttcttctgtatcttcttttgccaagtcttttgtcgagttagaagcagagtttacctccgaagcagcagggggagcaggaaggaaagaaggtctagttgaggtattaaagaacgaagggattctagccggaggaggtgaaggggaacgggaggtcctgctgggtttaggtcggctcaaagcgggtgtggttgtgttggtggtagaggatgagttcgggttgagggcaagtttcggttgggtcgtgtttggtttttgggtcgagcttgcagacgaagcgcttgatgaagaggacgaggacgaggcggaggaagaagaggaagaggaagacgaggattcatcactactactgtcgtcttcatcggcttgaacctgagcgaccaccgcagctaaagggacagatccttctgcaccaaaagctctttcctttcctttcgctgctcttgctgccaacaaagccgggacgagaggagcctcttcatcggatgatgaatctgaaccggacgacgacgaggaagaactatcggatgccacccgacgatttctctttcgcgctcgcctctttgtctttgtgttaacgtcctttgggggcattctttacctttaagctggggtgtgtagagggttgtgtggatgtgagcaagtaagtaagtgagtgagtgaatgtcgtgcaacagaagcaacaaatagcaatttcaagttttcaagctccgtcattttttcttctttttttttgggagtcgctcgcttttttccttctctagatttcaacactcatcaccagatccgtacaacacacgatgtctgcttctcttactttgcccgttagcctaggagccttgccctccaactggtccgagtcgtccaagtcggccggaaagctttcctgtaagagaattgttcttgtttttggtcctttcagccgcagagattgatactcaacttgctctttctttattcataagcccccactaagcactcgatcttccctgccggaccctccttcatccgatcaaccgttcgaaccaagctccagcgatcttttgccgaggatgacgaggtccactcttcccacgccgcttccctcgcttccaagtctactgaggaggagctcggacccgagtttgatggactcggagaggagcaggagagccgtgatgttttggatctcgacgcgaaggaatggaagaagcaggatcactacgccgttcttggtttgggacacatgaggtacaaggccaacgatgaccacatccgagtcgctcgtaagtttcttgatttctctgcagaagtccatccttccgaggtttggtgactgaacaactcttaacgtgtcttttcttctccttcccctgacagaccgacgaaaggtccttcgacaccaccccgacaagaaggccaactccggagacgccaacaacgattctttcttcaagtgcatccagaagggttcgtcggaatttattgtttgacctacgtctctattaaagtttcgccaactaatctatttttccatctgactgtgtagcccacgagacccttaccaacttggaccgacgacgacagttcgattccatcgattgggagatcgaggactttatccccgaccccaagtctgtcaagcccgagaacttcagtcagtattctctcgttatcttctctttaaccctctccttgaaaacaagactgatacctccactcttcgggctacttttttccatcctctctatagtcaaggccttcggacctgtgttcgaccgagagggtcgattctccaagaagcagcccgttccttctttgggcaacatggagagctcaaagcaggaagtcgagggtttctacgatttctggtataactttgactcttggcgatcgttcgagtggcacgataaagaggtcaacgagggatccgacaggtttgttcctttctttcgttctttcgttcttctcgctcttctctatataacggcgcgcgtctgtcggtgagaggctttgactgaccggacctgctttcgtacactgttctcaatccagccgagacgacaagcgattcactgagaagaagaacaagtccgagcgagctcgaagaaagaaggatgacaacacccgactccgagagcttgtcgacaacgttctcgcagtcgatccccgaatcaagcgaatccgagctgaggagaaggccgctcgagacgcaaagaagaacaagggaaaggcccctgtcaagctcgaccccaaggctgttaaggaggccgaggacaagaagaaggctgaggaggccaaggctgctgaggaggctaagaagaactctgtcgaggacaaggtacgtcttgtgttttcttttcccctttctttctcttgttcttgattcgtccttctcgtattgttcatcgtcttacggcctccctttccttttcattatcctctaggccgctcgtgaagccgctaagaaggccaaggaggccgcccgaaagaacctcaagaagttcaagaaggccatccagacctctatcactaacgtcaactacttccagcccgccggtcaggctccttctgcctctgcaattgaggcttccttgaacgagcttgattcgctttgcgcttcgctcgagccggaagaggtcaagtctgtcaaggatgatgtggagaaggctggaaccgatgctggggccgttaaggctgctttggcaggttgggttgccaaggccgtcgccgctggaaagactgaggacgccaagtttgttcagttcaagtaggagaggctcctacttgaatcatcttcagaagaggagagagattagattctctcctcttttctcatatgtgtagaccaggtttattctctgccgcaacttcagctagaattttagatcaatgggctattttctaattgtacaggtcttccccttcctcttctttcgaataggggaaggacctcaaagtgaaagaaaaaaagaatatatatatatcaaaacgtcgcttcgaacctagttgtctcgtttgcgcagagatacatgcgcttgatacagctcccaaagaagagaacgtttgatatgaatgcctcgataaagattgataagtataataatgattgataggcaacgatagtaaggtgacaacgagcgatccaacggtcttttgatttaatgctttgtcggctttgcgccgtccacaaacatgtttctcgtcgcgctcggcaaagagacagagatcccatccatctctttcgtcacgatcacttgacaacctagacgagatctgtttttttttgttggtttgcaacagttgcaatcgaggagggacagatgtgcgtacgtgcgcgtcaacaggaaacggaccgagaaatcaggccaaacaggaagagaccgagtcagcatgctacactaaatttctccaaatatggccaaaaaaaaacagaagagaggagagaaagagaaaaaaacaacgtacgtatcggttaagccgaaagcgaggtctagcatgtcgttttcctcatccgacggctcttcaatcgcatcgtacatttctggttcgaggataacatgacatgtcgaacaagcaaccgatcgctcgcatgcacctatatatttgttccaatttagggtgagaaaacaaaatggtcagattgatgatagcttttgactacgctcacataccccacttcaacggaaagccttcgaggatcaaccagaacggatactgttttgagaaggaacaaaatgaacagacgaaccttctagatcgacatcgtgctcatgggctagcgtcaataggtcgtcgccttcgttcgccataacttccctgaggacctttcctttcgaatccttgtagatgaccttgactctatgtagaccatcaatgaacaacaatggatgcaaagtaagcgagcagatcttgttcaagcgatggcatccatgggtagtattaaaaaaaaacgagtagacgaacccctttccaggctcgggtggagtccaatcaccatgaaacgaaactggtttcgtcggtgatcaccgagtcacaaaagatttttcccagaaaatgtgaaaggaagaaagaggcaagaaggaataccggatgaacccagagattatggagtccaaccaaagagagaagttatcaagagatcagtactgttgacaaaatcgttcccttgagtgacaaacaacggcaagacactgactaggagagctagagaacgatcggccggcaagagaacagggaaacagagtggttgaccgtctgagatcggagaatgaggaaagagctgatgctgatgaaaccgaagcgaaggcagaagttgaagagcaagaggctcgggaaagagtgggcataagagcacgacgagtgaacgttcggatagacatagtgtttgccggttagatttctcgattacgtgtgtgggtggatggatggatgaagtcaactagagacggcttaattggacaagggagccacaagggatattcaaaaagaacagtatgagtacacgatctcgaacgcatagagttatggagatcatacgatcctacctgaaacgaaacgggacaaaacgagacgatggctgatgggtgattggcaaatggttggatgagagaaagaaacgaatgaagaaaaacggatgaagacgaaaaaaatcgcacagccaggccaatcagaacaccctctttcgatggaaatcctttctcttgcgctccctcatccatcacgtacactagcatcgataaacacaccatgagcatcaacgggctaggctaccagcgaccaggagctggaattgaggctcaggatatatcgagtgtgcggtcgggcgaagacgttgccggcgagtcggcaggaaagacactaagcgtcaaggtcgagttcgggtaagcacctttccttgctcttttcgcttcctttgctttctctcttcttcttttccttcttcctcctgttcttctgctaaggaaagagacatcttgaacaagatcatgatatgatactggcaatctagaggccgaaccaaaatgactgaagcagccgttcaaggctaggctggatagaactcaccttctgtagactacacaagctaaccaagaaaacctccttgttcatcttcatcaaccttgtgattcttcaaccttacaaaacaaatcagtggaggactcgacttgttgttttctaaacagcctcgacacaacctcagaattccggcaaccgcaccttcaacagcaacgatggctgaacgaccgaccgatatgaggttcttgatcgaatttcttgccaagaacgttctccaggagagagaagaattatttagagagggagagactgtgtatgtcttgtctttctcttcccggggaaggaaacgaacctattaccctgaaaatctaactgaacccgttatctgtgttggtctgggcgatctttctctctacttcttttgaactccttgtcttggaacggacgaccttgtcctctccctgtcacctctcacagccgacctggaattcttgtgttgatcaacgatagtacgtatttgacttgttaggatcgagagtcaatagatttgagaagatgcgcgatgttgttctgacttagtcgataacttgtcctttcgtacattgcttgtacagccgactgggagttggagcacgaactagagtatgtgctagaggatggggacgagtgtgtgtttatcagtactcttcatggaggttaaggctacaccgaacgatcatcttgcctctcatatgtcagggagagagagaaaaaaatagacagaataacatagaatcaaggacggttatatgatttacaacatgatattacaaactttaccccacaatacagaacgaaacggcatccttgttggtacaccgcaacagattataaactcagagcttggctggaacgatctttgtcaacagctttccctgatttccaccggtatagagcgtatgccacacttttggcacatcccggaatggagcctcgacaatggtagacgagtcctcggtagaaatctttccttcaatcaccgcctgggccagctttgcggagaactctttgtactttttcgcaaagtcaaacacaataaatcctgcaagaagggggtaagggaggaaggtcgatcaatttagagaagcacgcagaatatgaacggagaagaaaaggacagatatggaagaagaacgaacgaaccttggatggtgattctcattgaagtgacctcaaagtagttgttcaagttcatagtcgtcgggtcgttgtagcctacgtcgccaaggtcgagttgtgagagatgaatttactaagagcgccatgtgtatgtatttccgagataaagcgagataagatagatattacataccactgatggcgccgcaagcgatgatcttcgaatacctagccattcgcttgaacatcaagttcaggatttctcctccgacattatcgaaatacctatgttgttgatcaacaaggatgtcacgctatcagagcaggccagctaataccagagagaaaatgagaagtaaacgaacagatcgacgaaatcaggagtagcagcgataagatctttcctgaacgtaggcgacttgtagtccacacactcatccgctccaagctttttcacccaagcgcacttctcaggtccaccggcgataccaatcactcgtttacagccgacgatgttctttgcgatctgaacgacaaagaacaaggcacagagaggatcgatcggtgttcattcttgctgtacggataccaaagaagtggtggggaggaaaaaggcttacttgaatggcgacagatcctgtggcacctgctgctccagaaataacgacgacctgatctttgtgaatcttgccaacctcgaataacccaccccaagcggtcattcctgtgcgcataggagtcgtttcggataggtaagccgtgtattgatcgtcgatccttgacgagtagagcaagaggaaaagtcaggcttaccagtcattcccagacagcccaaagcaagctcaggcgccttgccaggtatctcactaccagtaggagagaagtatgaaagaggggtgaaaagaaaagtcaaacgtagcaaagcagatacaacctcagcatagtcttcggtagattcacatcagaagacactcgcgatatatatgtgatatgaagactcacggcacacggacgacctcggacgcaggaacaattgcatactcggaccaacctcctccccaggaggtcaccaacgtaccctccttgaagtcagacgatcgactcttgataacttttcccaaagaaccactgagaaaaccagacgtaatgccaggaagatgaaaacaaggaacacattcttctttagtacgattctgtctgtctatcctgtttgctaagaacaaaaaaaaagaagcaatgacaacgacaacagtatcagaatagaatacccacctggccatgacgtctcctttcctgacaacaggtccgtaagcgcgctcgactttcaacccggcctgcatccaagttcgctgagcgggatcgttcgagaagaaaagactctgtagcagtagttctccatctttgagctcgggtatgggcaggtctttctgaagagagaacgtatcctcctcgaccgcgcggcggggagggttactgacgatccacttgtcggaggtagagggaacggaaggcatatcttgaaagcaacagagaggagtaatatgaaaggcgatgtacagaggctagatacgttcaacagagatcgaacaagagtgaggaatgaaaggacccatcctgggaatccatcaagactaaatccttttaaaggcagaaaacgggatatgcttagtcggcctgaacgtttatcatttaccgattaccggttaaaagaaggccgataaatgtcacgtgagaaataagcaatgcaattcgccgagtaaccaggaatggtaagttgctttgtgactatcgtaacaacgttcgggagcttgctaaagatgtctccttattcagtccgagttgaacataagtattcacatgaagtgacactacagatgaaagagggactgccgagtttgttcattgattcattcatattatcgatacaagtgttgcaaataggaagactatgtaaatgatgaaactaggggttggttcgggaagccttatcttcatcagccttgttggtgagggcatcggcggatccagaggcggcagaggcggactggaaggagtacacgcaaagaacggtaagcgtctctgatgaggttgaagcacgagaaatagaaataaaacaaacctcgtcggaagatcccttctcggtcttcttgtaatcctctcccttggaagcaaagaaatctaatagacgcaatagaaaaaggagatggattagctgacatgcagcgagtgcgatttgaaacaggatgaacaggaagactaaccaggtcgctgctcctcttcagaggcaccctggggcttgtcgccaccaacggatccctttccaaggggctgggtatcagaaagctctgtattggcaaagagatgacgtttatagtagagaacaagtaagagaaagaagaaacaagtgaaagtcagtaagagtcttcttgtagaacacatgcaccatcctgatctttgatgagtagatggaaaatatgagggcttaaaaaaaaaaaagagagatggactcatgcgcccgaatactgactaggggagggaggtccaggctgagacattgtcgagagagaaatgtgtgttgtttttaaaaaggagttggaagtgagtttggagtggtggctagagagaaagagtgagagatgagatgaaggaaagaagaagagaaagaagaaagaaaagaaggatttcctttttcttttgaaccgtacagatggagaaatccgatagcctttctggggtagttctcattcttacgtcattcctctctttcgcggaggaccggatgagagccagctaggggtgacgttagatagcgatcgacagcatgaatcattcgaatgaacatcaatctagctagctggctaagtagtatttcatcccatcttggttgatgcagtcttaattgccagacatgttgctgttgccaaccgaaagaagcatcccggtgtccaagttccttctagcgcatagatcgtttcccccaccttgtaggcatcatcagatagagaagaaggcacagacagatggttacgagtccttattacgagaagtaacaaatgaaccatgctgcttagtcatcttgcaccatacgtagcaccgatatcgatggccgtaaccattcacagccatggttacgatcctaatccgtccgtctcgtctagagggatttttctttctgatcatcttctctgactctttggctttctcactctttcacacctcagctcagtcgatagtccaacgcacacaccacacatagagatgagggcatctctagcacatcgagcctcgcgctcttatctatcctttgctcgatctcaaactagcctgcggtcgaacttgatttctgctaccaccaccaccgctaccacccggttccttgtccaccctcgcgctcaactccaatcccggacattccttagcaagcttcttggaacagccgatgacgagcctccgatcccaaagaccacacctcttgcacctccgtaccagcctgctccggatccaaagatcattcttgagcaggataacttgtttcacccgctctcgacctcgccttttgaggatctaagaatgagggcagagagaatcaagatgatggccccttgcccagtctgtctcgatcacttcggagagagaaatctggtcacgttcgactcgcctcaggctggttggccaacacattgctcagaggaacactatcttgccgatgaggaacatggcaagtatgtagacaggctcagagaggcaaatgaggatgagcatgatctcagatccggaagatatctggccgagtttgagaacttgcccggttcgtctccttctcttcctccttctctcttctttctccttgactctcagcgtcgtcacctggacatttgattattctttattgacacaatgactgacatttgtccgcaaatcgacatcctgaaaccaacggtaatgtaggtttccagccgtacgaccaggtcgttaactacaccaactgggatacctttttctacacccgaacattcccctccatggacaatctccgtgtctatcgacacatgaccaaagttcttacctaccctatcaccattgcctccacgcttgatcagttcagtccttaccttaagaaaactggtcggctgactcaagaagggcgacggtcaatgatcggtaagaagccttcacgattgtctggtgtaatttgattatgtagctcacctgatgcctctatcttgtctttacaatacaaaacaaacgaacgcaattgattcaacgataatatacagcccttcgatcgactcttcaccctgagcagactcctaagcctgttcctgggctcaacaacgtcgtccgaatctttatccttggtgctcgatcggaatcgtctctgcctacggccaattgggaacagctctctcgaatgttccccaaggcggtgctgaaggtatactttgtcggtccccaagctgcgttgcccagtaactggactccaaagccgacgtttgagagcgagaacgacccgctctacgaagaggagatggagaatagacgaaaacacgaggaggagctagagagggagcgattgaagtcggaaggagctgatccctttggtttcaactcggctccgacaaccggacaggccgagacaaaggcagagcccaagaaggagagcccattatcgaactcgccagccggtgcgaccggttctgt

SEQ ID NO: 233 - DNA, 27170 bp, Xanthophyllomyces dendrorhous
ctcctgaccgtcaacaatacccgtacactgaaagtctggccgatcagtcgatcgcgcctatcccctctcaacttgaccgaaactctctctcctctaccgaagggtcctacggcccgacgttcttcgttccgcccactcccgccctcgttcacgtgaacggaccccgaacgaacattcccggaagagacgaatctgccaactatggtgtccccgcatggacgattccgatttcaccagagatcacagtgtcctcgatccaagcgccttacgaagcgatccacgatcagttcggtccttttgatccgtactcggatgtgttctttgcgttctcgcccggattcggtttcccgtccagtatgtcacccggtagactccaggttcacaaggacgccgaatggggagagacccttcctttgatattggagacgaagtgcccgttgtttgttactggattttcaccaaaagatgtggagagagatgtcaaatcgttggaaggattggaagacgtggacggccagttcgactggctgctcaaccctggtgaaaacttcttcgctagtgagagatgggaagtcgccgacttcgatccaagagtcatggtcaagaccaactggggaatctggggtatcaggtttgttccatcttttatctttcactcccttcgtttggttcattgcgtccctttactaatcatgcatgtcattttttggacggaatgataatccaacagaggaaagatggactctcttaccaaagtcgaggaggacaagtggggattggtccagaagcagactaggaagctctgagagtgatggagaattattcatgtcgtttcaaatttaattcgccttctcttttcgtccgatttcagtcgctgtttccttcgttctttgttctgatgtctcttctttgatcgtagctttttcgcattcgacatgagaaacagagaaattggctcgtatttctcttcaccaggaaccagaatgaagtcctgatgatagctaagtgggagatgacatgacatagaatacgaaaaagactttttttcgggactgagacttcttatacccgttggctcgaatcgaccatcttgagaaagacgcgcgattcaaaaggaatcaaaacacacaagacgaaggataagcattccgaacgctacgaaagggaaagaaagttatgatgtacttaccctaaccaaatccttggaatcgatgacctgtttcccaccccctgataacatctcgacctgccactgttcatccgtctgatagaccgtgcggacttctctgcccctaaactgaccggcgatcacacaggccaactgttgttccgtctctggttctacaggcgccaaacaatcgggaggaatgttcattccctcggaacctaactggacgagtaccgtcttatgtccggcttgagcttcttgaaggattccagtctctccgttgtactttcctcggaggtactctgcacccgtatgactctgaatgactcgaactataacgtccttcaaccccactaaccaatcaacagctcgacctgtgtgttcaacaaagagaattgtcggacggaaagaaggaacgatgtttatgagaaacggcatacagacagacgaaaactttagagaacgagatgtttgggaaaaccttacctgaagaagacattggcatcatgcctccatggtctctggcagcacccggcgtaggcgcagaaagaccaccaggggtatagtatgctccgggggtagtcgcgctgaacgctccaggagtgggtgcagctccaggagtaggcgcggcgtagcctgcacctggagtgtatccggatgctccaggtgtaggtgcagtgtatgctccaggagtaggtgctgccagagctgcaggagtaggtgctgccgttcctccccatgcagatgtcttcatgtaggtaacaaggagggagaaaagaagaaagacatcagtccgactgatacttctcagtagttgtgttccaaaaaagaagaacatacctcgtagccagtattcagatgagatccttttgtatcgtcgccccaagctgcataagcaggttcgttattcatagcagaagctcccgcccccgctggcgtagcgctcgtcgcgttccaagccgacatcccagctcctgccggtgtccgactggaagatgaagttccagcaccgaacggcgttcggctatctgcactccatgctggtgttcgagctcctgatcctccgtaagcgggagttcgaccatcatttgcagcgtaacctggggttcggttcccaactgcatacgcaggcgttcgtgcgcctgccaagtgaggtgtcgcagctccggcagaccaaacaccaccaggcgtagctcctgtaaatcaaatcagttcataaaaataaggaaatggacgagacggtcaaccaagtttgctcttttccgacacggggaagcagaagcagtgagacttaccaccataggcatttggcgttttgccgacgttgaaagccggagttcgtccaccactggaagcgtacggatttggtgtacggccagtgatgcctccagaatatggagtagaagaagaatacgggttgagaccatagcttgaaggaggggccatatctcttggtgcaggtcgagggccagagttggcaaattggccagagggcgcgatcagttgggatgtagcgcctgttttgggactgggaataagaatagccgccgtgccataagtacataggcgcaggaagataggaaagctacaaaattactcactcttttctcatcagagcagatttgtttatcgtcacagtcttgttggatgattgtagctcaaccctagccatctctccattgatgtctttgattaacccaactaaccccttattaatccccttaatgatgaccacagtcgtatccgtcaaacgatcccttcctcttgatactggaccgccagcattgacgggattcatcttgaggttggcgattgctgggttgagcgatgcaaagtcagtcttgaccgcagcctttttggaagcttcggagagcaatcgatcggatcgaagaacgaaaactccattgttctccaagatatcagagttgtgaacgaaaacgtagcttccccgatatatatgaaggatctgtccttttcgaggctgataggcgcattttcaaaagataacgaaattaacaattctgtttttgaaaagtaagaaaagaatatgatgaatgccttacgttatggtcaactcgttcttgaacagagtccccgactttgaggttcactccagttgcatcgctcgcatgagtaaacctcgagtctaatttcatgttaacctgcccaggcttgacaatctgagacgttccctcctgatcaatgacctggaaagcttctcgctccaacttgcagatgactccaacgtttctagaactgtttgagtttgacagcagcaaacccatagatagaagagtaagaacagatgcttgaagttgaataagactgatgagcttgagacatacgaaagctggactaaatcatgaagctcgtattgagctaccacagccgaaccgtttccaacttcggatgcctcacggatatctcgcgcgaatacaacaacctagagcatcagaggatgatacggacgataagtacttctgagcacacattttatatgacgaaaaagaagagaaaaaggatagataactgacctcttgttgggacaaatcagacaagaagatgacttggttggctgccaccgagatgattagaccagtctcattcatattctttccagagataaccttgatatgatctcccggcttgaagttctttctgactgttcgtccaggagccgtgataatcgttccatccagttctccgtggatcgctttaatagttactgtctcgccgataacactttccactaaacccaactgtccagcctgctgaccctcgaagatctcgacattgtctcctggctgtaaaccagagatggccgcctttcttgaagcttctgagatcatcgacagatcctgattcgagctgagtccaccgccaagagcgtcggttccggtgaacatctcgatctcatccaatgtaggtttcaccatttcggtctcgatcgcggtgatcttcatatccttctcgataaaaccgtttcggtaagtctcgccttggaagacaaacgcgccccctctcatggaaaccgctttagaggtatatatcttggaaacctcctcctgattgaaatacttggcctcgggtcgtttcgatccggacgcgactgttccaaatccccccttctttcgcttcttgtcggcagcggcagcatcatcggtcggggagaggtcgattctaggtataaatttgagtccaacttcgtctccattctccgtcacgtctagcacttgagcgagatcaccctggtactttccacgcttgattcggacccacgaacctggaagcgggtcgacccggatctgcttgatcttaagcaaaggagccatctcgtccagagggaccagattgatccctcgagagatgtatactccaacaagacctttgatggcagcttcgacgtgaccaggagatcgtgcttctacgtagataaggccggggagtgtatccctctggaaagcagagtaaatctccaatggtgtggaagaaaactcaaggtcgagtgccttctgcattaagctgagcacaatatctttttctcgacccgtctgtagagtaaaagcataatcagaatgatttagtcttgatatcttctgtatagcgcgtcaaagatgctaggagaagaagtgggcgtagaccgaccttgactctgagctgccatagatttggatcctccacactaggcattagcagcctctgaggggtgtgcgatgagcttcctttaaacctggcttgttgactcctgctgtgtcgctctttgaattcagcggcaattagctcggcgtctcggtcgtccatctccattcttcttcggtcgagcttctggtgctctctctcaactcgacgagcgtcgaatccatcttcgcctacgggtaaatcctgatcgatgaaaccctcgtctagaagttattgggggatgaaggtaagtcgaactatatgctgaacacgcgaagactttatttaaataacggaaggtaccagtacggtagacttactttctcgggtgtagtcgtcctcatcttcgtccacgtcttcgtcctcatcatcgaccacgacctcaagatccaggaacttgtttcgcttaaacttcttttttggctgaacgttcgagttttatgatcatagagcaagacaaagacggcatggacaatgaggtgaatgctttagcgagttctacacatgcatacgagaataatagattctacgcggatagaagcaaaaacgatatactacttacacgtcttcgacctccgttttgctcttcttcatcatcctcttcatcctcttcgtcgtcttcatcatcttcgtcatcatcttcgtcgtcgtcgtcttcatcttcctcatcctcttcttcgttgaccgctggccgggttgtctggttgggtgaaatccatgaaagtggaaacatgttgtttcagttaaaatcacccgaaggaaatgtattctcgttatctgctccagctaaattttcttcttcttctaatccgactcgattcgagagacaagagaagagttgaaaagaaaatgccaaaagacttaccgaaacctgttctgctgatggctcttcatcggactcatcctgtctgttcaattcgtctcgctcttggttaagtttgacatcgacttttaggtccggcttctcctcgtgcttcacgcccgagttgattggagaggacatgactgaacgagctgatccagatgatggtatgtttgatggaccggggctgaacgtacaagggagattcatccataaacggccaaggggcaggacgtacaacgtgatgatatttgattgatggaatttcaagtagttagggttctctaaggattcgtctagtatcaaacaattcagcaagcttcatcatatagtcttctcctccaacccaagacaaccagatcctccattatgaccaggttagtgcttggtactcgctggataggctgcttggaacgttctgttatgtatagttctagcttgttctgctcgatgtgttctatttgaggcccagtttttcatcagattcgcgtaccatcatgtcctccacacgttgtggacataaacgtaccatgctcctgacaaggcaatctttcgttctttttgtgtaatcgattcacccattagacacgccaaaaacagccattcgtgagtatccttttcacttgtgttttgttttcaatgctttgtgtgtttgtgtatgggattcatgtttgtcttgcccttattacagttcaccgttcttcacataccatgagaagtctatgtatgtcgtccctactttccgttcatcattttgtccggtcgcacccggataggagcacacacactaaacctgttgaatccgtgttcgttataaaaggcttccttatggaaccaagaaggttggtttcattgtttctgtctcttgtactacccattcgcgtaaccttatccacccttatcttgatgacataaatctagcaacgactaggtgccgagagtttcagaaagtttgatgcttgcatgctttgcaatagtaccgtccggaacccatgcgcatgctctgatggtcacatctactgtcgtgtaggtagcttcggtgtttcttcatatcgtgagaggttccgattgactgacctctggttactttccctctcttccgccgcttcaggaatgcatcttggagtctttgctatctcagaagaaactcattaaagcccaccaggacaaccttgaacgtagaagtaaggaggaagaggaagagaaagccaaggcgagagaagacgcaagggaacgtgttctcagggatttcgaacgcacgcagtctggattgggcgcaaaggtcggtggtagctcgacaaccgggacaccgtctgggaacgcgtccaaggttgagggagaggagcgaggacagaaaaggaagtttgagcttgatcaggcagatatcgatcgaatggctacagaggctgaggacgccgctttggccaagattgagaaggagcagttggaagctcgaaaagcgaaacttccggctttctggctgtatgtttccctcttttctgtcggtctaccgttcgatcaagttctgctctctgatttactgcctcttgaatatgacagaccgagtttggcaccggatgctggaattgagaagatcaaagcaatcaagatggaaacgatgtgccaagcctcggagcacccccatcctctaaggtaggttatcaggtgtgaatatagacatgcgtacgatgattgctaatgtcggtggcgggtgctattttccaatctacagcatcaaagggctgatccctgtcaagtttacgccgctccctacgtcgtcgagctcgactgccggttcctcaaacccaacagcgtcgatgtgtccttcgtgttcgaaggaactgacaaactcatctgtttccatcctcatcaaggtctgttggttgtcagaatacgagtttccattcttctcttcctggtttgtttagctgacctgtgtgtatatgccggcaatgtctccacagacttgcggacacgtctgttgcaaggcatgcgtggataaagttgtccgaccggggaagcagtgcgtgacatgtgactcgagagcaaaggagaaggatttggtcgagcttgtcagggatgggactgggtttgccgctgttggtaaagcagaagccatcaaggtttgttctggattttgcttttcttcactttacgatgagcatgttctgttgaaagcagtactgaatatcgttctgttttgtgtgtatgtgtacacgttctttctttttccttttctttttctttatggaatactgtagcaagaaactgctttccagtagaccagatatactcaagaagtgaaaaccgaagaaaagacagcagaagacaattgaaatctgggtttgcttctcaccgaaggaggagtgtttcggctttgagatctattccggacgacatgcggacaagcatgttggttgtacgatatttgtcaacagactgatccgcatatacgcatggtacattaggagaagcagagagagactcatagacacaaagaaacagaaactcgcgtataaagagtagaagcaaaccagtgcagatgatggcattcccacctaccaaggcatcagaaagtgatttttgttggggtgattatctgttgctttcaatactattcggataaacttcacacgccgggcggttccggtaagtattcttaaacgggaaggactttcaacggcgggacgtcaccaaccagcccggttcaaacaggtttgatctggttcgtgccggttcgatctggttcatccagacgtccgcgcagtcgatagatgatatcccaagccatgtttgggtgtcctagcaagcgtgcatctattgacttctcgcttacattctccatcttcctcttcctctcgttagagttcattctcttctcttctccgtctttgacactctttccatccatactttataacgactaaataggcttggtcaacggagaacatcaaatcgtaaaaaagcaagcctctcctcatccgaaggctgtcttgctctggcctatttctatctgtcgctagtccagcgttttagggttcgtacagcttgaactatccaaggttttttctcgtctaaaaaggaagaaaaaagccgaaactcatagagaaatagcgtcggcgatgagccatgtgtctgaatcgctcttgtgactgacttccttctcaaatcgcatctcttgatcctcctcttctccttcctgtcctctagcagcggccgacgactcgaacgccgaagcgtttcagccgaacaacatcgtacctttccctccatcttgtcccgactcatagcctctggcttctagtatgatggatatttccaagccttctattctctcagcagatccaagtgaagcctttcaagatcatcttctcggtatcctagctggtctagccaaatctattcccccaacctcacttcagccgatcgagttacctccttacagagccccagatgcgtcccttaagacagagacaatcttggcccagctgggcctaatcgcctccaggatgttcgacgcagaagccaaacaacaccactatgatcatactcctgcggctgtcctccctccactttccacgatgccaaacagatttacgctgaatcagccgatggacattgacgagcttccatccccccctcctctagacccgcctttggatgtaaaccttttgacgaggaaaggtcttgtagcctctcagccgatgagtgcatcaaatagcttgtcgggagaatccatcctgacgtctggtcataatatcaattccggagcatacgagagtgggctggggccggtcgaggaacttcggctactacgagctcaggttcaggacattgctcgagtctgtaaggtatgttggccattctcgaatccaatctagcgcatgtcctgtcaaagcatacacaatgtttatcgtgctaatatatacccaacaaacttaatgtacggacaatcatatacgatgcgaacaggctgttgctgctggtgatttgactcagaaaatcgtcgtcccggtagaaggtgttgtcatgattgagttgaaggacatcatcaattctatggtctgtaatcttaacactccaccccgtacttcgtgtcagcctttaattctgaagatatatgttttggacatgtgcgcatgtacgtgtatcatcattcgtctcaggtcgacaacctcttcatgttctcgtcagaggtagagagggtcagtgtggaagtcggtactgaagggttagtgatttgtatacgatcctgctacgtcgattgggcaagcagagaaatttgtgcgcctttgaaatgagagaactggatgatatctcagaccatttttgatttcatcttccttacagaaaacttggagggtcagttcttttctatactcgcgtcgatcatgtgtaaagattgaagattaaaaactcgtggtatctcttgtatctgtgcgctaataggcaagctgtggtcgaaggcgtccaaggaacctggagaaacctcacatctgtcgttaatatgcttgctgctaatttgacgagtcaagtacgagctatcgccaaagttactaaggttcgttgacttgctacttacaacagactttgcgttgggagttatataggcccagctgatgttcactgtctatcgtcatcttcttttcaaatccgagtgtaggctgtagctgtgggagacttatcacagactatcgatgtcgacgcgagaggagagattttggaacttaaactgacagtcaacaacatgtacgttacatatacaccaattctctgtctatcaattcagcttcagctcttgggtcttcttgtttaaaatgggacgttcggtcgcctatatgtgtatatacagggtattgcaacttcggacacttgcagacgaggtgtcacgtgtatcgttggaggtcggatctcaaggcaaactaggtgcggatctgttctctgatttagatgtcggatcagtcacatggacactcgaaggaattaacagcgtatcatacttgggatccaaacaggcggacaggccgttgttgaaggcgtggaaggtgtctggaaggaattgactcagaatgtgaatatgtttcctctctcttgttccttttcatctattcttctctctagactcaccgagactcttgacaaatactgtatccaattgtttttctaaggtaaatcaaatgtgtgcgaacttgacagcgcaggttaggtctatcgcagcagttactactgccgttgctcgagtacgtgtcaaatacccgttttcaaagttggctttttgtttctgatgaaactaataggatttgtttctcgatcgctaaaatagggtgatcttacaaggacgatcgccatcgaagttgatggagagatggcgaccttgaaggatactgtaagtgaatctgttcgtctcctcaagagcatgcgcggtcaagtcgctcatcgcgtgaataaatttcttcggacattctctgtatgaccaggtcaactcggtatgtaccttctcctcgtgatcgggttatttaaatacgcgctcaggtcgctaacatcaaagccgtttccgtaatctctcagatggttgctcaattgacgatgtttgctcaagaagtcacacgagtggcgctcgaggttggaacctatggccaggtctgtcgaatcctcgtctttctttcactatcacgaacaatcgtgaaaccccactcaacgcatgtatgtttctatgggatttacggtttcttgtgctcagttgggaggtcaggccgtggtagagggagtcgaagggacctgggctgatttgacaacgaacgtcaacgtgagtggtcaccgcattcgttcccttctatctttgctcacgggactgctcactgatcttgtaaacacgacgtgaattgagctgaaatagaatatggcagcaaatttgaccaaccaagtccgagaaattgcacacgtggtatgaaatagatactcatagcgttcgaagaaatatgcctctatatttagtggtattcaagctaattccatgcttctggttccccgattcatagacaaaatcggtagctcgaggagatcttaccaagacggttagcgttaatgtccagggagagatgttagacctcaaagtcactgtgaatgagatgtaagtcttgttcgagtcttattatggtcttattcgagcccggtcttactgcctcgtgctcacttccgcttggggtttcatgtatgcgatggactgccgtgtctaaatatagggtgagtacctcttttctattcttgtgcacgagcccttcttcatattcagccaactcacaatgatacgcttgttgattcggatcaggtgggtcaattaacgactctagctgatgaagttactcgagtgtctctcgaggtcggtactgaaggaaaactaggtggtcaggtacgtcttttgctgtcgtatccagcagctgctagacgtttaccgttgattaattttggtttccttttggtattacactcttcgttcaacaggccgtcgtgcacaaagttgaaggtgtttggaaggtaatctatttagttctccactcttatttgtttgaagattaattccatactgatgctttctttcctatccatcttacaatttttcaaggatttgaccgacaatgtcaatctaatggtatgttcatccatcgtatcaggatataaacaactcatgtcttccatctttacaacctccattgaccactatccatctatcatctttctttaggctttaaatttgactacccaagtgcggtctattgcggtggttacaacggctgtcgctcaaggaaacttgtccaaaacgatcgatgtaccggcccaaggagagattttgcaactcaaagtaggggtttcttctcagtagcttccacatatctcgaggcgaacaccaggctaacgatgcgacacgcctcattgacttcatttaaagaacaccgttaactcaatggtggaatctttgaacaacttctcttctgaagttacaaggtctgtagattcgtacatcatcgacgcgcacatatatgcacgacgatactaaattgttctttggctgctgggatcagagttgcaaaggaagtcggaacagatggtcaagtaagattgatgctcttctgtctctctttgtgtgaatatttcattgaaaagatgaccagcagctgatgttcttgcctttgtgcatgcgtagcttggtggtcaagctgtggttcacaatgtggagggtgtctggaaggtctgtctaaaacgtgaattctaacaagatgaatttgatggactgatcagcttctttgtgccgtggtaaacataggacttgaccgagaacgtcaacttgatggtatgtttccctcaaactgaggtcttcaacgaacttgaccaaccttgttgtttcaattgtcaggctctcaatttgactacccaggtgcgatctattgcggccgtcacaacggctgtcgctcgaggaaacctttccaagacaatcgatgtgcctgctcagggagagatactgcagctcaaggtaagtatttgtgttcagtctgactggccattaggcggtggtcctctatcgaagctcatcatttagggtttatatacgtctaggacactgtaaacgatatggtgtattctttgaatgagttctcatctgaagtgacaaggttagtcgtatcgatcccatatatcaaccgtattatatagcacgcgtttaactaaaccccttcctcgtacaatgtcttccactgacagaatggctaaagaggtcggaacatatggaatcgtatgtactgcgccatttaaaaatacaagtaggctgccaatctgacctggtgttatcgtgtatattcagcttggaggacaagcacaggtagaaggtgtcagcggggtctggaaggatttgactgatagtgtgagtccaattcatctacttcataggggttcactgagtctcaggcttaaacatctccattcttaattaggtcaacaacatggccaccaacttgacggtccaagttcgaggtattgcgcgcgttactgtaggttcttctacataccgacacagatagctagtcaatctaggaggttccgagatttttttctgatatatttcaatccacaacagacggctgttgctcgaggtgatttgactcagaaattcgagggagttgctgtcagaggagagattttggatttggtcaacaccatcaacggtaagccgaagaaggtttcttgatgcaagtagcgcggataatggctagtctgatcttgaccaaacatttttacatcataaggtatggttacctctttaacccatttcgcttccgaggttatctttgtcgcaagacaggtgggtacggaaggaaaactgggggtacaggcaaaggttcagaacgtagagggaacttggcaggaaataacgttcgtatccccttctcatattgcattcgcctttctgcgatataccaactggctgtgctgattgttttattctgcttgtagatcgaatgtcaatactatggctcaaaacttgaccactcaagtccgagctttcggccagatttcggcggccgcgacgttcgttcctcttgtttctttaaacaatcataacgctgcgcgcatactgatatcatgaaattgcattgaactcttacagagacggtgatgctacagagtccgtccaagttctggtttccctaggatggatgcttcttgtctagctgacttcccttcaaatttcacaatcaggttcatcactgtcgaggcgagtggagagtaagtctatcttcctatcatttgtatgcagcgagcacgctcacttggttctgacccgtatccgaatgatgtttctacaggatgggatcgttgaaacagactatcaatcagatgttcgcctttctcatttcttagtttgctcgtcgctcgcctatctgattgtaccatgtggtattattaaacagggtctttaatctccgagagagtattcagttcaacaactctgctcgtatcactgccgagctggcgaacaggagtaaatccgagttcttagcaaacatgtcccgtacgttcctttacggctttgcctggtttgagtttttgcgcttatcgttattctctctacatctgttttgttcgaatagacgaaatcaggtaacattctcctgttaactaaatgcaccaaccaatgctgctgatcgcgactgacttgattttttctcatccagaacgcctatgaacggaatcattggtttgacagttcttacactggagagcgagcttacacgtcaacaaagagaaaatctaatgattgtgtctacattggcaagttctctgctgacaatcattgacgatatcctcgatatctcgaagagtatgtttccatcttctctcatttttgagtaacacaatgtgatctacaggtttgctgtctaacatccgccttctccttgttttgtactctagtcgaggctggtcgcatgacgatggagacggctccattcactttccggccaactgtcttcggagtgttagtcgttcccccatccaagttttagagaggctacaggtttacatgttcatcgatctctgtttggtttcgcagtcttaaaactctctgtgtcaaagctgcccagaacaagcttgacttgatatatgatggtatgtgtttatcttctaaatagattttatattgaaattttaaatttagaggacgatctgattcgtttcttccctgcggacgcaaatagtggatccgaagattccggattgtcttctcggagatgctcttcgtttgaaacaagtcatcacgaatttagtcggaaattctgtcaaggtatgttgcatcacgtagaagaatacagtagttctctcgatcgtaagctaatctcatccatggtgctttagttcacgaccaagggtcaggttgctcttacgtcgagacttatcggaattgaagacaacttctgcgagatcgagttttgcgtagccgatacgggtattggcattaaaccagataaactcgatctgatctttgacacattcgcgcaggccgatgggtaagtcacatctgtcacaataaatctgaggtttgagtaaacccactcatgcttatctggatcattctctttcgctttaggtccacaactagggtgagaatttctttcagttccaaattactgtgttaggcgaaggcattctcaattttgctgtcttctctttttgcaacagaaatatggaggtactggtttgggtctatcgatatcaaggaagctggtagctttgatgaacggccgtttatgggtagagagcgaggttcgtatacagacctcttttaccagctgtagtttgcgtgcccctaaacagttttgcctacgtttgttttgcgcagtacggaagtggaagtcgatgtaagtgataaatagatgtggatagaggacgttgggtttcaaattgacttttctcctcttctcatcactcatgcggtgttacctcatcacagtcttctttgtacgtataagctgcactaaatacggaagaagattggctatcttactgaacagcctgcttttgtttgtataccaacagacgacacgaacagaaatcagtgaagttcagccaattacgatactagagagagtcgctccgtgagtgattctgctattgtcagatgtttccatctgatctcgactgactgaccccttttgaataatattcaacagctatgcgggccgatgcattttattcatcgatactctaggagacaagacaggcgtgtgtgatgtgattgaacagctcaagttgaagccccttgtcgttcactctgtcaacgatgtctggaacttgaagagtctgccagaaggcaagcctgctttcgacacggttattgtagataacctcactacagttcgtctggtcttgatatcttgtctctggtcgtatactcactgacctaggcctcgatctgtaaactcaaacaggctgaacaattgcgagaggtagagaatcttcgatatattccgatagtcctgctggcgccggtacgtgttcttcaatttcctctttactctttcgagacacgtctgctgacaaataaacaaataactaaacaaacaaaccaaaaaccatctgtgtttcgtctgctaggcgtcacgtccgagcaaccctcctccgccattcattcagatacctcctcctaaacgaaggttgttgaatcttgctcagccacaagaggaaggtccaccagcgattcctgtaaagagctgtctagacatgggtatcacttcatactgtactgcacccacaaatgttcaagagttgtatgtctactggcttagtctttatagcttgtgtgttttcaacgcctaacgtggtttacacttctgttgggtagattcaacgctttgacacctgcgctcgagtcgcatgtcgcggtaccaacttatcctgtatgtctcacatcttattcaatcagcgacctaccccctttttatgtttctcaacgtgatttgttctcgttgaatatttctttcatcaggcgaaggatatcgtgctggatattctgcttgcggaagacaataaggtcaaccaaaaggtatgtccaacagacgttgtgattgtttatacgcagctggggttctcattgagtttacctttacaattcctgtactagctggctgtacgtctacttgaaaacagtggacacaaggtcgaaattgccgacaatggtcagatcgctgtgaacttgttcaagggccgccatcaagaacgtcgttcatacgatatcatcctgatggatgtctcgatgcctacgatgggtggaacagaagccacgcgtcttatacgagagactgaggctgaattgggctacgggcgtattcctatcgtcgctctgacggctcatgccatgatgggcgatcgagagaaatgtctagaagccggaatggacgagtacatcaccaagcctctgaggaggaacgatctaattggcacgatcaacaaggttatgcaacctattatacagcgcaggagcgccagctcaggctcagagggcacggtctgatcgagatgtctcttatcctttttctcttatggggtttactatcatcattatttaggtttcttggtttcttgtgtctctttctccttttggttggtcttatcgtctgcattatcggcatcttctcttctgggtggtttacctgaattctcttctcttttggtattatctatcaatacttgctcttctcacactctcttcaggatcgttctcttctttctatccttattctttcttgtcttttttgagtggatacataatagaatgaacggcggtttcattaattgctctcctcttctggttcatttctggtgaacgcgtaactttctcgtgaaaccatcttaaactccagcttgatactcgacaatctccgactatcaactctcaactcactctcatccaccgtaccgacataacgaactatcgacctatctgcgtctaagaacgaggaagaaggaaaagaacaactagtgacagaaaataccatgtccaacaactctcaatctcaatcgcctgcaccagaaggaccagctcctactgctggctccccatctggttttttgaaggtaccgtactcgtcctttcgtccttattttcttagctctatacccattatttctccttctccttcctatgttccttttctcgcttgttcttggtcgaatcttataccttgtgatgacttgctcgaaggcgcatccgacgtgttctctggactgacgataatcacctcacacttacttttcattgctcgttatacgcgtatgcatctgcattctggaacgatgtcgaacgacaaataggccgttgtgggcaaggaagttgtggttcgattgaattctggagtagactacagaggtccgttctcatatttcttctcttcttcactttggatgcatacaatcggtttccttttaggttattgacattggcattgaaacactatgatgacaaaacccgccgcacacacccgtttactcacatgcgaacgtacacgtatggaatgaataggtattctgtcatgtttggacggatacatgaacatcgctttggagcaaacggaggagtacgtgaatggagtgaagaaaaactcatatggtgatgctttcatcagagggaacaatggtccgtgcttgttcgctttctcttcttcctctctgtctcttacaaaacaactaatcgtaccgagaaagtttcatttcttctttagtgctttacatctcggcttcggactcgttataaaaagaagagcgtgcactagatcctctggacgagatagatacgagcatataaaacacaatccaacagtctttttgtttcaaagagagagaaaaggtcctttctgaaggattgcatgcgtgagaaggattccttgacatgacttgttaagagaaagaggtgacaaggggcagattaagaggactacgatatgactgagaagaaatctcattatagattgatgtcgacttgcaatttaagataactgcttcgaattcgtgttgactatgtattattcactatccgctattcaccatatactgtctactactgtttgttgtgagttctcagaacaagagcgcctttgagctgacctctatcccgttgacaaccactgtgcccttcctactccctgctctacttccactttcttctgtccctgtctgagattctctaggcgtgtcgatacctgaagcaccgtcgaacccagcatcgtcgacgttgttgacagaaggcatggtggcttctaccagtctaggtctgattcctaaagatgagcagacaagtttgtattttgcccgaattctttcaagcagagcagagatatctacctcgggcgatgcagccgttgaagaggttggttctgtggaaaggagtgccggtgtggtggaaggtgctgaattagattcgtccggtgtgagtgactgtgtgggtggtatcgaagcctgattctcgggatcggatatgttgtgagtagggaagagagagatcaggtgaagaagttgattgatgtgattgatcgctctacttgccgacttgctatatgatacaaggggacacgacattgttcaaacggatgagctttgagaacaagagaagcaagaacaaactagccagccagccagccagccaacaagctatcaagcaagaaagcgaacaagaaaccccaacatacgtttccttgccgagtagatctctccagaacgtaccgacaccttcgtagaacccgacttcttcccagagttcgaatcctttctccttgcctaacgctctaccctcgaacaacccgtggagcgctccgtgctcgaagccttctctatagcctgtttgatagaatgtttcctccacatggttcaacgagtcgagcgaatcaaacaggtcggccatcgtgtctatgagggagtgtatgtgtacgtcaaggtgagtgagtaagtgaattgtgacgatcaggtacaggcatacgcacaggcgcaggcacagccgcctagtccgtcagtgccctgagtgttacgagcgtcggttactgggcgcagcatgtgcacagctttttaccgatacgcctcttcggcacgggtgcggccatctgcgttcggtctgtttattcttctcactttcgccctttcgcccttttcctatccttgcacacttacttcagtcggctttcctatccccctggttttttcagtcttgagttgtctgtggaactgcatgagatactcggtcttgggtggtcaatatctcgtctagaaggaaagaaggaaaggaagctcctcaggaattcattacagcgtcagtcgttagagagatctcggaccataatcttctcctgtttcttccctccagccgtgttttctcctctcttcctggatcttaccgcagtttatacccacatacaatctccttcaaagactgcagctcgtagcccgaatctcgtaatcttgcaaaaagattcttgagccctgctcgacgcgatgtccattctctcaagatccgtttcgcctagcatatcttcctcgtcctcggtcgggactagtggatcgatcacgagcctagccggcatacagtccgcctcatcttccgttagtgatggtcttcgagctgaaagctgggaggaaacaggctatcaggctggccttccttctggtagcgaggatgagcaggagagagcatggcgggatggtgtgacccttcgcaaaggatggcagtttctagacgcagcagccgctcaaagtgacgacatgggtctaggcaaccgaacgcggaaaaggtttagccatactgagggtccttccggcacgccaggacgtcaaagcccaggtggtttcaccataagcagttcttcgggggaaatgaacagggtatctatcgcagagactgtcaagccttcgttgtcgaacgtttcgagccacgaacaactgtccttcacgctcgaggggcagcaacaacaatcttttgtgccgtctccttcttccgactcgtcccatttcatgtcgccgataacaccgttagggagaaagagtagggcgtcatccatcagtgcgcttggtgtatcacacagtcttaccaaatcatcctcgtcatcttcatctccttcttcatcctcttcatcgccacccccacctccgccatcgtcgacgaaaccaacttgggtcgagctggcaagcccatcaaactccccggcatcagcatcgccattattctcatcatctttcggatttccccacagttcagcgagacattctccgcctctccaaaatattcaatcgttctctcgggcacaagcctacacgcccccatccggaacacctccgcctgggagctcctccactccttctctacccgcgaaacccatatggctacaatcaaatccgctgtcttcgtcactgtcacaaacatcggttttggagccctcgaatgccagttcatcatgttcaagtaccccaaagaaaccgtcgtcgtcgtcatcatcatcatcaacccgcaacggtaaaccctacactagctccaatcatacaccctactcgcaggctgtgacctcatctctctcgctgtcatccgcgccgcctttgcctcctcgttctcctcaaattcaaaagcacgtggccgaagccgagttttcttcatcttcttccaaaccgtccggtggtagatttggactcggcagtgggatcaaaggacggctggcagcgatcggcggtgccgtaggaggcgtggcaaccgggttttataacgagcgtagcacttacactccgtccttttccaatcagtccaactcgtcctacccacaatcattcaactcactttcctcctcctcttcgatttctactctctcgacctcgtccacgtctagcccttacctttcacaaccttctaccttccaacctgactcgtttcttccggctgtgccaaaacaacggacgtttcctcaagttttgtttagtgttcctgggtcagccgtcaggcactttaactcatcttggcgagcccgagcgggttctccttcgtcttcttcgtctcttgcgagtcaagcgtcgtctactacgagcggaacggtgtttcaatggaggcagggattcccaagacctattgtgtacgacccagaggcaatcatcccgacaggaagcggcgcccgagttttcggaaggaacatcgatctcgtaggcagggagtgcggagttgccccggaagataaggacacggtcggtcgattgattggtcggaggtcgagagagatcctgccggccttggtggtgcgatgtacagagtatcgttcgtgcttttcattctctttttctctctgccctggctatttgtttttattgatcgattcgtacggcgtttatcttaacgcactctatgcgtccaatcctcttctttctcaacagtcgaaatctgggcacctagagaggaaggaatctttcggattagtggtcgaagtactcatagtcagtttctttctcttcttgccaatggacagggcaaggaacatgctagttctgactgactattttacgtgtcccttgaattcactctatattggactggttgttttgattttctagtccaaaagttgcgcgcccagtttgacataggggctgatattgatctgaaattatctgatcctggggagctagaccctcatgcggtcgctggtgtcttcaaagcgtacctacgagagcgttcgttcaagaaattctcttctttcttcactatcctttgctgagatgaagtttgctgatggaatggccatcttgttcttgatggaacgacttaacacagttcctgacccgatccttacgtctgaattgacacccgggttcgatcacactatgcgtcagtacactggttcgaccgccagagacggagcgttcggagcttcggctacttcaccgaatctgaccggatccgagttgacgagcgatcgatcgaaagcgagcttggtgaccgagatccagacaaagctcggacgattgccagagaccagttggtacttgctccaggcggttgtcggcctgttggaccacactgttcgtctcttccttcctttctctctcgatatgggacaggtggggttgtgttgaccaagagaacgttcgttgaatctatcaatccatttcatctacaggctcgttacgaggaagtcaacaagatgacgctgtcgaatttgttgcttgtattctgcccctctctgtgtttttcgcctccatttctacggttactcgtcgagaactattctgtcctgtttgtgactccacccttaccttcaactgtctcgtccaagccgacacttcctcctcgacctcttggcccgagtcaacacaccaggtcttcctcttcctgtcttgaccaaacagcacctctcctcgaattatcttctccgtgccccgagttgttttctggactgagccgacgaccgtcgagggatgctcttaaggaggcgaacgatatgtggattggtgatctggggaaaccattgcctcctcaaccggttggtcggcttgatttgccgaccgacaggaatgttgaccggaacgccactgggctgtcaaccgggctgggccgacctgtcctcaaggtcaagacgacagaggaggagcagaagggggaggaaaggcagaatgaagagaacaagaaccgagggattcaacacggatcggccaagttggcagagccctctcggcaaaagccggtgtcctgctctaaacgcttacccgtcgctcggtccgtttcaggagaaagagagggctatccgacagagcgaaacgtggctgaccatgtcaccgttcctggtatcgccgccgctgccaccacctcctcttcgacaacgtccacggctgagaagacagttcttacgggtgtggtcgcctctagacggtatctgttctctactccgatagccgaccgattcaagtcgaccacggttcctcatctggcaccgctacgacctgttcataatcgaacaatgacgatgtctgatctacctgtgccgacacccgatgggggggtgatctcatctgcgtctgtctctgcctctgccttgtcgtcttcgctatccgggccactggtcaggtcggcggattcgtctagctcgttgaacagacagctccgtcggggtgcgaatggggggattggcggtggattcttctcgtctaggggtgcgtccggttcatcggcctcggcgtctctcctggcgggcagcaggtttggggaaagccgggtggatcccgataacggcggtcaaccggcggcggctaggaaaaagacaccgatgtggaagcgaagcagtgtggccgtcggatttgggagcggaggtgcgggtgggaccggcaatggcaacggcgatggcgacggactcgggtcggacgaacaagagtcgcgaaggtcggtcaaggaaacaattaaagctctggaagctcactctgatgagagagcctaaccgaacgtgtgtgtatatgtgtgtgttatgttcttgtctgataattaactagtagtactctctataccctttctctttccttccttcttcctttttggtctttaagctcttcagctcttcatctttcgtttgttctattggtttgaacgttgcctgtcctattccggatgtgaatcgtgtcagctcttgtataacccgtccgaccggataaactcctctcttctcccttttctttcctatccttctttccccttttggacttttttctccacttcaattcttcttcttctttccctccaaacacttatattgccaatatgtacatccattctgttccactccaccccgtcccgtcccattccgttcttgtttatccaggttgtcgttatcatctaatctcatcaccatcgggtgaaacaagaagtatacctttcggatcgtccggccctgacttccgagttcggcccgggccggtccaggcggactaaccatgagaaaacaacgggagttgacgacgatagcaacaacaccaaagaatagcttatggcgtacgtcttcttatgagcacatcgaagaaagaatagaagagaaaaccgaaagatgaacgtgcccatcgctatagagagtgtctatttcattggaccatccctgtgctcccagtgtggaacggtcattggccaactctgacgtaagaaaggcaaaaaaaacctggggaaaacttgcaagacaattggggcagagcgagaaagtagcctctcgttgatacaatgcccgtttccctctctctcatcggacagaatggatcatacacgagcgagtactaagaacgaaagagtcaccgtccacattgacacagcatgaccactagcatccatagtcgatcagctcggtagagaagcaagtgggagagcaagaaagatctcagcttcgaggggccccagtacgctgacgtgcgggcgaaaaaaaagggaggggggaggcaaacaaaaagggccgtcttttttttcttcccgctcttcttctccttcctatccatcactcacttccttactcactctttctttcccaactcttcccaccaagatcactactctatcaaacatgacttcttcccttgacgctcttaaggcttccggcaccgtcgtcgtctccgactctggagacttcgagtccattgctgtttaccagccccaggatgtgcgtctcactcattctgtttcctttccaatctttccatctcccttttttttcttttttttctttcgtcataagctgatctttgtgattctttattctcgtctcctcatccaggccaccaccaacccttccctcatccttgccgctacccaggatgccaagtacgccaagttgttcgagcccgctctcgagtacgctaagcagaagggagggtgagtatctttgcgttcaatggttcgccatgacaatcatcggagaagaaattcttttgggctttaaactcatcttgtgctttgtctcggctggtatcgttgtagatccgttgacgagcaggctggacacgccgttgaccgactcgtgagtatcattacattctacccggaacaccatcccgtgcaggacgtctatccagagtcttttagctccaccgttcaagaaagacaccagctgatcattctagcttccttctcccattatttatagcttgtcgagttcggaaagcagatccttgctctcatccccggtcgagtctccactgaggtcgacgcccgactctccttcgacactaaggctaccatcgctaaggttcgtctatctctttcttcttagctctattgatttatgtccgaaccccacctctaaaattcttgatcttgatttctcacagggtcgagagctcatcgctctttatgagtccatcggaatcaacaaggaccgagtgttgatcaagatcgcctccacctgggagggtatccaggccgcccgagtgctcgagcgagaccacggaatccattgcaacttgaccctcctcttcggtttcggtcaggccgtcgcctgtgccgaggctggtgccactttgatctctcctttcgtcggtcgaattctcgactggtacaagaagaccaccggcaagacctacgagggtgatgccgaccctggagttatctctgtcaagaagatcttcaactactacaagcagcacgactacaacaccatcgtcatgggtgcctccttccgaaacgtcggagagatcaaggctctcgctggtgttgactacctcaccatcgccccggcccttctcgaagagctcaagaactccaccgaggatgtccccaagaagctcgcttccgagaccgccaagaaggacgagccgattcccaaggtgtcgttcgtcgacaacgagcccgagttccgatgggctcttctccaggaccagatggccttcgacaagttgcacgagggtatcgtcaagttcgccgccgacggacaggag

SEQ ID NO: 234 - DNA, 39139 bp, Xanthophyllomyces dendrorhous
cgccgccgacggacaggagctcaccaacctcctccgagccaagcttgcttaaatttaactctaaatttaaaaagaaaaagaaacgctcgaccccccatatgtttttaactcacgtctcttcttttaatgatcctttcaagttttcccattttataccaccaactgtttctatatgacttttgagatacaattctgtccttcccacggtggcgaagagttgagagtgctgacgataacaagagaaagagcaaaggagaaagaagagcttggtggataagtctttcaaaggagaatatgtgtacatgtatatgtcaagataaattagggtatcatctagtatctacccatcaaccataaaaactccttccctccatttgagaatctacctgtcctccgctcctactcgcccgctcgttcggttctcctcgtcatcctcttctcgtgagccactaccgagtttcccagaagaccctctcggcccgagcgagaactctccgataggaatggcagacagaaaagcgagcacgcccaacgaagcagtcaggatgaacgtctggcgaatggagaccgagtaggaagtaatcgctgcgtgacggaggtgaggtgagagagtgaggatgtatgatttagagtgaacgatggacgatatgatcttttgtgtgtagatagtgtgggaagggaatcgatcaaataatcaaaggagaaaaaaaagaagaaaaagaaggaggaggagttatcagataagattaaaatataaaagaaaaggtcgatgagcgaaggaaacacggaagcaaggaaacaagaaaaattcacctgctcgcttccttcacaagtgatccttctggtcaactctttacccaagacagcctgctggaaggccgaacagatcgcaattcctagagtcatacccagtgttctgaacaggtaagatatcgacgtcgctttggggatttgcgaccggggaactaggaagataggacaggccaaaaattaggttgggcgaacaggcaagatcatacaaaagacaggtttgtaataagacgtaagtgaaggacggacctgaagagatgatagctatcaacgaagtcaccaagaacgaagagtatctgtttttagttcagcaaaacacaaagagcaggatcttcagtctcgacttgtaagatagacatatgacacagacaaaagcaagacgagggaaccagaaacgaacccaagaccggcagggacgagatctccccactcgtgccaactgtttgtaccttccgtatcccatctagacatcatcaccgagctccatatcggcagcgtcaagctgactacacccagaattctatatttcccagagaccttgatgatgtgcccgcttagaagactgccaatcgagagactgatcgagtttggcaagaggtgcattccggctgacgttgaggtagatgatcggacgattgtgtagtacagaggaacaaagaacaacacggatgcactggccatcgacctaaatgcatggagaaaacatggaagagaacggattacggattagtacatggatatcagtcagataccaagacggaatgtgaggacgtacatcaagaatgcagagatggatgtccacaagacgtttcgccgacgcatcacttttctcggaatcagcacttttccaccgttcctttccctttctccttctaccacgatgaacgtgacggtccctgcaacgcaaaacaccaacaacccgaagacttgaatgcttccccaagcgagaccggacgagtggaatgaaaaggccagcaggagggaggcaatggtaaagaataagatgagcgtcccgggaagatcgagcgaatcgaggagagatctgtgggtcatttcggctttcatagagtgagtgtcttgtcgaggcacaagtagagtaagtgccgcaagagagactacaaggaggggcagttgaaggagaaatgcgattcgctagaggtaaagagacagatgagttcgcaatcagagaaatccgtttatcacccttctcgttttggctttgaagacgaatgagtagacttacccatccgaatcgatcgctgacccaaccggcgaaaggcccacccgatgcacctcctaacccgaagattaccactacggtcaaataagagagcagtggcaactatgaatataacttgtaaatactatcaaacgtgtggaccgatgatactaactcatcaggccctgatagaaacctctttctctcatagtcgtcagatcggtggtgatcaagctgctcaaagtcaaaatgcctgctcctccagctcccatgatggctcttcctatgagaaggacattcatcgaggtcgcgaacgcgcagacaatggtgccaatgactgtttgaatttttgtcaaatagaacgcatctagcttgaatgtcctgatcatgcgaacgaaaagatttgagaaacgtaaggacgtacagaacaagacacctgccaagagaatagtgtgagttctggagaaatgatccgttaagcctatatagatagattggaggtatcgtattgttggaaagaagtgaaaggacaatatcagtatccagatcattcacaggataatttgggtattaaaaaaacctcttctctacctccaaacacgggtgttgccactgtcgagatcagagaaaatatggatccctataagattggcaaactcatacaaagacggttgtcaattgatgcaacatcacgaggccgagatacaacgactgacaatatatgccgatagttcaatatgattgaaatggccagcaatggtcggtgacagtgtggccaccgctgtggccgataccgcaaacgttaggtttgtaccccaaacggatagtctgccgaccaaacaggaacatcaataacagtttctgcaggtacaccacttgaataccccgggtctatcggagctgactaacaaggttatccccaacctccagccttttaaacgctcctgttcttcttgttcgccggtttgatctccgttctggattggtttcgtgttcgaatcggtctgcttgatagtgacatcacttctttcgacagcaccttccgtttcctcagtggctatctctactccttgtatcgcaccccaggaggaaggagagttggctgcactgagaagagcgtcgcgttcattgtgtagatgtttggttggaccttgtgaaggcctatcagatacagacttggctgaaggcattagctatttacaaacagaaagaaaaccccgatcaatgcaagcggggttagtgatagagaagaagaacaaataaaagaacgatgaatcagcaaaatgttcttgcttcttaaaaagaaatatacctggccgatcggatgggtctgtttcggagctagcctatctatacaaatcaagaccccagacggaaccccagatatgcccacaagatctcccagcgcgcattctcacttgggcacatctcatccagctaatcaatctggcaagcacctttatcttggtgtccacatgtattatgtctctgggttgtcctctggcgtttgggttaaggcttcctttgatggggtttcttctggaagaagactcattgaaagatgtttacattctgtgttgcaccctgcatctcgatcggaatttcaatggacgccattgctatacaccaggtagtattggcgtttgttttttcgacgtagatgcatcaaattagaaggcactctcagccttctttccgccgctttctttcttcttcacccccatttccatcttcgacgtcaaccgatccgtcctcaccttctcctctcttccgcttctctccaaccccgacggttcgtccatcagcgtcgttcgagactttcttcagtacccatctcacaagtccgaaaccccaacctccgatctttttctgaattgatatccgctcttcttcggttccaataatgattccttcctcggcctctctcctctctttacgggcgtcactgtgtccgttgttgtcggcatgttcatcggtggcagccggcacgtgcgttgtaggctcatccggcttggcttgttgtttgttttcaaagatcatccgaggagtgatcaatggtggtcctgagcccgggacaacagaaacgcgtatagaggcgggtaccgagtcggaaggagtttgtgatggagaagacgcgaatgagggttgagaaatatcgagttcgatcgaaggtgcatcgaaagaagatctcaaatgtactatcactgatatcatacagatccaaggagaaccaagaagaaaggtttcagacggtaaacatacacaaggaaaacgagctaagacataagaggtttaccttgacttggagaaggatgattagaggattcaggcttgacgtcttcagaaacgatattggatggagccaagttagagtccgaagtgccagaggacgacggttggttgaagacacctagaaagaactcgttgatgtaactccattttctggcccactgttgttatttgattcatttcagaaagagaggaacagatgagatttttttctaatacatcggtgaaacacatcggagaaagacgcacctgtagaacctgaacaacatcttctttcgacttgacgccgacccgaccgacgatgatcccctcgagtctcttgtcttccgccagcgtccaccgttgactgggtccactctgagatgcagaagacttccagaaagtggtccgagtaccaggctcggttgttagcggagtagaaagtgaatgtgcttgttgaatctacagggaacgaaattgaaatagttgaggatggaaagtactgtttagagagacagaatcaagacacgcacgagaaggtctagccagcctgctcttgtttcacctccttcgatattcctctcaggcgctccaaccaccaatggtggatccaaaacgatttcccatccccacctcccttcatgttcctctttctccttctcctttccctcttctccttttccttcgtcaatcctgtcacgcaaccaatgaggaggtaaggctcgagcaggcgcaatcttgttgatcggtggagaaggaactagatgcatcctttgatggtgcgctggagtgtgtgggaagaagaatggttcagatggatgaatagcgaatgttggatatgaatgatgagttgataaaggtgtcgatgcagagatttcactgaaactagataacacttcttgtcagatcctcaggcttcgtgattgctctcatgagaaaataaatggaagataccgacgtttctgtccatatgccccgctccttaagtatggcctcgatctcattccgtatgacttctccatcctcgtatacgttacctatgactgcgccttcttttccttctctagcttgttcatcatgttccaaaacctgctccatctttacaacttccaacatccgtctttcgaactcttggagcactcgagcggtcttgagcgctggagactcatcgggagaacagcctagcaagaggtgaagatccggcgaaacactcgacgggttgattaaagagtttgtcaagatttctagaggagcacgtagaaacgtgtcgatagatggacatggaatgggttcaggagatgaatggagcgcgatagatgttttgaatttagtgatgctgaaggaatggtttggtcttgctagagcaataggtggggattgcgaacttagtgcatcaatgttggtagttgttaatggagacccgaccaagtagatgtcctctatttctccgtcgggctttgtaactatctggttgggcgcagatcgttccatctctacctcgacgacgaggaacttgccgccgacgactaaaacctctctctcaacggttttctctgaaatcccttccattgtctccctaaagacttcgagtccgagggattttgatgtagattccaataggtcaggtaagctcgcggtcggcgaaaacgcaaaaggcgttttggcagggcgggggaataacgtattcgaaggtgattgagaggaagaagggaaagatgacagtatggctaacgttggcgtcagcttctggagtagcgcagtggatgatgacctatgttaatgtgtcaaggatggacagatacgaatgagttaacctcgagcctaaccagacccagaaggtatgaaacgaaatagacaaaccaatctttcatcaagccagcggcccggacccttccttcctctccgccttcttcccaaatggatttgaattgctccagaacatttctgatgcctcctacagcttgctggaagccctctctcgtgagtgggacgttggctgctaatgtcagatccggagggagcgaagcgtaagggttgatggatgaaggatgtgagcctggcgggtagtaggcagagagagaagatgccagagagttcaaatgggacagtacagatggcgatactgttggtgtgacgtccatactgacttctgcagtccagatggattcaatatagagcaaactgatgatggttggtcggtcaatggattgattgactgagagtgagggcgagtgtgtacacgagaggaagcgagcgaaaccccttagacagacgatccagatgaatgatagatgaattaattgcccggagacagccgtcgaaatttggatttttttacctgccgttgttttcgagagcaaacgtttcgaactctttcctctccttcttttctttcttccttacccaacacgtattctgttgattcatataaacacaatgtctggacttactcacccctctattcacggtaggtctaggtctttggcatcatcatcattctcttatgccgagtgatgtgctttgctttgcttctacctcggtttcagctaggatccgagcatgaaaattgatcctcttttctgtgcttctttctttccttttttttcttctttgcagacggatggttccgagagatctctgatcagtggcctggtaagtcgggttgttactataatcgtactatctcaacctaactaaatgaaatctgcgcttgcctatcgatctgtgtttaggccaggctatgtccctcaagtgagtgttctttctctcgtgctatgttcacaatcaagaccggtcttctcaacgcctcttgcttgtctttttgaatctttacagggtcaaggagatccttcacactgagaagtccctcttccaggacgtccttgtcttctcttcggagacctacggaaacgtcctcgtcctcgacggtgttatccaggccaccgagcgagacgagttctcgttcgttctcttctttcttttctattagagttgaatgtctgcaaacagaagactcatgcaatgatgactgaacatccgaaacgatagctaccaggagatgattacccacattcccatggcttcccaccctaaccctaagaccgtccttgttgtcggaggaggtgatggaggagtcgtccgagaggtcctcaagcacgagtccgtcgagtctgttgtgttggttgacattgatgaggttcgttgagtttctgaagaaaacatctttatcagacatcaagagattgaaactcaagtgttgttatccaccggtttggttcttccatcatcgctgttggtcttgtcacctatcaggccgtcccccgagtctccaagaagtacctccccggtatggctgacattctttcccaccccaaggtgaccgtgctcatcgccgatggtttcaagtaccttcctaccgtcgagaacaccttcgatgttatcatcaccgactcttccgatcccgtcggacctgccgcctccttgttcgaggccccttacttcaccttgatgaagaaggctcttaaggagggcggttccctctccacccagggagagtgcctttggttgcacttgcctttgatcaaggacctcaggaccatgaccaagaacttgttccccgttgccgagtacgctttcactaccattcccacttgtatgtgcttcttttctgtgccgctcttgtcttcttctcattcaataggaacacacttgactgaccgcctatccgacatggatccttctgttcgtgttcatccaacagacccctctggacagatcggtttcgtcgtctgctccctcgccgctgaccgaaaggtttccgagcccgtccgacaggtccctggatgcaagtactacaacaacaacgttcaccgagctgctttcgtgcttcccgagttcggtcgagctatggttgaggagggtaagaacttgttgaacgagttcggaggtgtcaacaccgcccgactcaacaactagagaatattcccaaatgaaatctgacttttaaagtcgtaaaagaaaagaaagaaaaagaaaaggaaaagggctcgactggaagctgtccatcaagatacatgcacgttcaaagattttttactttttgagtcgtggaggcacataaatcttgtctgtaccgagcctctttatatatcggcagtggtcggacgtacacgacgacttcagccaaagcatctagtggtacagagcgtctacacatacacatccaacgagatcaaatacaactgtttcgaatattttgaacaaaacgacggtctcgttgtcgcgttttgtctggtttttatgcttggcattcgtcttttacggttcatgcataagcttcaagcatgtctcgtatgtactagaaggtcaaatagatgagggaatggtaagttgagtgactcggccatcgttagactatatattcatcaagcctggacttacaagaatgagactcccatcgaaggggctaccttcagcaagtttggccaaataccccggtaaagacccctgataccttctaaatatccctccgcgaaaaaaaaaggaaaagaaaagaaagaggaaaaagagagaaaacagaaacaatcacgtcgatcagccttgacttacggatgcacatacagacggctgcagtaacttgtaacgaaccatgtttgaagatctgaatcatagctcctgtgcctgatgaatatgtatatgcgtgcttggcggccggtctcaatgaatcaagtttgggtactgatgtggatactgatgatattggggttgatattgatgttgacgatggtgttgaggaggccatagcgaaggaagaggagaaagagggagagggggagacggatggtgccagcgcggcccgacgagattgctccaatccaatgacctgatgaattgacatcaaaggaaacacaagacggacatcaacatcaagtctctcttagcaaacatatgtgtgagatgctgcgaccaggaaggatttgtacgctacaaaacgcacctgcatctttcgcctcagtaaatcaaatggaaatgtcacggtctggctcaacccaccagcggccgctccacaagctagcttgatgagtgcaactttaccgccgtttgtcgaatcttcctcactcttcggtagccaatacagtcggaatttctcataaactatttggaaatggaacgaacgaaagattaaattagtgtctattgtctgttgaaaggaccgtttcctcacaagcgcactggggtgtgaggagaagggactcacggacgaagttcagagccacataaggctacaaatcagaggaagaacagaacagaacagaagctcggtcagtcaacaagagctggcacacttcaatatgaacagccaacgagctttcgatagagctacgagaagacaattctactcacagccacacctctgttgaaaataagcgaggataagacaaatttttgattcgatcaatactcaacccttgttttgaattcttcatgtcggaagcaaaagagtatttgatgaaagtcaagggacctacgctgcagtcgctagacaacctctatacaaccctcgaacacctccttcttctctatacactttcctggtcatgctcatgattcctagctctttcccacctaaatttccgtgtcccatgccattcgtccgtctatcagttgtcgctcacaatacaagtagagctgagaaaaaaggatgatacgaacggagcttggccgcttccagatcagatccatgaagttgagcagcggagatggaaagtctcgctcgtacaagatcgagcggaaatgtcaaggcaacctaaatacggaaccctcaaaattcaacacctgatgatacaccgtaactcatggctgaaaagagagaaaggaaagatacagaaacgtacagaagcaattccagccaaacttccggcgaacaacttcattcctgtcccgagctgtccttgatcagaaccgtcgacgtcggtcgcgagaaggactttcagtgtttcgtaagttgaaaactgaacggcgctgtaggctgatgcgatgaatttcgtttagagtcaggagttgagaagaaggagagggtagatgatgctcagcgcaaacaatcttactgcgaacaaaggaaggggtagtagagacgaacgcataattcgaagacagttgatcccgtttcctttcatgtatcctctgaatccctctctgttgcacgaacggaatcaatagaggataagtcaaaaaagtcagatctagcccgctttgcttgcttcttcattacttgactagagagaaacataatgggcccaatacgtactcgcgatacatctttactagggatgcaaatacacccttgtaaggttgaccggtatgtgccgattgaacctgcctataccgtccggagacagcaaacatattgcgcgtagcaagaaaaagaagacatcttcagaccacgtcgagctaagacgaacccaaccggatttgaaactatcttccaagaggaaatatagaacgtgaaaggaaggaatacagacatgatgatcttaagtctttctaaaggagagacaaccgtcctagatgtcgcacccgccaggccacccgcaataaagtactccattagatgctgttcaaccggtttcgttcgagcagaaaccaacatcaagatgttcccaaatcgaaagagggcgtaagccaaagagactcgatgaaatagcattcatttctacaactctaggttctattcgttacatagttgaaagcaagagatcccttttgctttctctctgctctcacacggacgcatgcatgagttcggaattaagcatacctgtttattcaaaagtaagttttgccagttagagtcgttctcgactggttcgtccaagtcaattatttcaagttcagctgggtcgtctattggtgtcagactggtgtcaacgactgggtaacggtcggaagagtatcgatgttcggggagattgctgttattatattctgatgacgaaggagaagacgaggacgaggacgagaaaaaggacaccatgatcaaggaagtccctccctatttgggccgagaacgaggagaagaggggtgagagatgtttaatgaaagatctctccgttgtctggtctgcagatgagaacggacggagaacgaaaagaaatcgggtttatgcggtatgtatctccacaggtttcttcgcgcccttccggttccgaccgaacgctccggtttggttctctccagccgagccaagcacaagatcacaaggactgctctctctgtccgccaaatgaatgttttgactccgtaagtgatcaatcaggaagagataaagattgtacatggatgcatgaaaaagtgaagatagaaagatatgtaaaaaaagaacgtgcagacgaccagtgaatatttggtcgagatcggaatgagagacagtaacgtgcaggaagagagtaagagaaagagagatacttttcgtcaagactggtggaagaattcggaagcgatacgagacgaggcaatcagagaccaagagagagtaagaaaagttcatgagaaggaaaaaaaaacaggagaggtgtgtccttagagaaaaatagagatgattgaagaaacatgtaaagcaatgggatgtgttctaaaccagagagatggagatgagacatgggtatttaagagaggaaatagaagatgaaaggaaaagtggaacgagacactactctacgaatccatgagtgcttgttcgataaattggttaatggcctctttacgagacgatagttcaacgccatattcgctctctgcaatacgtcgtcagagaaggtaagaactggttagggtatgacccaaaaaagatactttaaagagggtgatcactaacccaagtcctttcgtacacccttcttagtgaccaagttgaggtccgaattggccaggattcgtctcaccgaaacattcaagtcgtgatccgacggaccgtccacatggtctgatgggtccagcaactgcagttgagatgagcctggctggtaattggctcctccaccgggttgtaatccattatcattgaagtactctccatattgggtcccacgaacacttcggccgtccgtcggttgttggccgtagaacgagtttacaggtggtcggtagctgtgttgaaggccagatggttgcaacgaaggcgtgtaatgtcctccgccggctacacttgccggtctactgccatacattccttcaggactgtagtcttggtaccgatcgtaggaggattcatggcgagagacaggggcatcgtaaacggtttctcgaccatagagagagccagcttccgttccaatcgctcgcttcgaaggggggacccaagagccgacagacttgttgctctccctctcccacagttcgttctcgtattcgttccaggtcttgagtgggatagacttcgggtcgaaatgtccttcatcatgaatgaccagcttctttcctttctctccgacgaccacacgagtagaaccccaagagaagtcatccatgtaccagaaagaccagatcggaagggcgaaggagaagatgggaacagccagaatgtagaacaccatccaaccgatcatgtcccactttcctcgaagaaggaagattgctgcttgaagaccatagatagctgcaagcatgatgatggacagggtaggaatcgtttggccgtctccgatgaccaagtagagaaggtacacaatctaggaaaccccacaggcgatcaatcagtcaacgctgtcctcgacagtgcaaaatatgatcgaaagaaataaaaaagagaatacttacataagccacagtgactggagcggtgatggtagaaaccaagtcaacaaagacaacgaatcgcatggagaaacaacagaaaccgcaaagcttgtcgatgaacactaattcggccaagttgtggatggtagagttgatccatcgacgacgttgtgagatcaagaccttccactcatcaggagctacagtctgagcgtgagccggtcgaacaaaggtggttttgtaggtagggaaataggttagaagaagggtagtgaggtatcgatcctctcccaaatgcaatagatttttaaggctaattcaaatgaaccatcaagttcagcaaacaaactcaaccttttgaagagcatgtccatgagagaaagcttactgcagagtgtcaactcggttctcagagtacccactgattacttcatccgcgatgaagagtggcttgtgagagtcgggtgttctcagtcggtatatactgaaacaaccaggaagacaagtgaccgatccgaagagactttcgaacgatttggccaagtgatgagagataaagtattcgtagacctatgagaattaacgattgtgtgccttaggatcaatagaggtgtcaatgtacaggacgatgagaaatacaactgacctgcatcattgtgattaatgactgcttcgcgttggcaatagatgtctctccacagcaagcaataactttcttgtcattgaccatcctgttgtgttcatattaagcgacgcctgtcagtttattgcatctgacattcgtcggtgaccgaacagcggaacactcacgaggcaacaaggtaacttagagaatcttcatggacagtagtatcagcatcgaccgtgaagatatattcgtagaaactggggttgacaccaatgacgttcttgatctggtggtacatctcgagctccatgggattcatcggagtattatagtgaacctgatagattagataaaattaaacaacacataaacatggtttcagaaggtgaacttctctcgagatggaccgcgcagctaggagagataacttctattgaaaacaaaccttgttgaggaaatgcatgacagtcatctgagagtctcgctttcctctgttgcccggtcggtggccctctcctggtcgaccacacttgacgataacgatataggggaccacatgcccagcgcactcgtacaaacccgagtagatctttcccatattgtgctgcttctgtccttccccaagggacaggaaactcaagctctccggggtaagattcgggtcaacaccgagaatatccaagacaattcgaggagtacttcggtcattaccggctccaacaatgttaccgtcgcaaatgacggtgatgagctttcgcttgtcgtcgtacttgagctttgcgagagaatcaatagtctttttgagcgaagactcgccctccgtataacaaggcacctggcagatgataaatttgtcttgagattcggggagtcgagtcgatccaaagtaaagggctccgaggaacttgaaaccaatgatggataccatgaagattgagagtgcgagaagaatatattcagcaaacttacactgagcggattgacggttgtctaccaacccagtcaggaacctagaaacaaaagcatctgatcaattaccggccatgttatcttgtccgcaaagattaatgatgctcacaaatttctcaagcatgtaagctgacgatccaggacgtcttggccaattgtggaggcaagggcattcagactctttgtgatatcagtaccagatttctgctggaagagagagatgattttcggtgacatgaactgtgtgctcgaattagctggaacctgagtacccgaaggagttttgaagtagggcggggacttgacgtattctgagacatcatacacatggttgtcatagatagctatagcggctccactggttgctgacgacctgatcgttgaaggcaagatgccgacgaagccttttcggaaattgtatcgcatgtagaccatttgttcgtaataccaatccggtcgagaatcgttggtgaaagctcggaagtcatggtagccggaattcgtgtcttgggaactcgaactgttgagagagttaatctgaacccaaggactgacatatccatcaatcccgttgcacaaagcgctgacctgaagaatacaaaacaacaacgtcagaatttgcccatcaggtggatgagactcatattggaaagaatactaacctgaacagggaagagagaggttgcatcaatccctccgtattgaagaacagatttcgaagtgacgacagggacgatagtgagatgggtcttagcgataccagtaagctgaatgggttgaaccatgtcaatcatagcaaccaaaaatataacagaatgagaatctcaaaggataagaaagaccagatgagacaaatgacgtacatcaaagatctctcctcgaatggagacaagttcgttacttgggtcgttgtcatatgagtattgggaaagctctcccgtactgtagatatactcctttggacagatcaggtttcccaagatcgcaatcacaaagaccgcacaacccatgatgaaccagatgatgacattgatcgccaacttctctctccatgcctgtctaacatctggtcgtttaaacttcttccgggctgcaagcaagaaacttggacaccaccaggtgagcagccaaacaagggcgacccatttccgacgagcagaagaggtaccgatgacctcagtggtttcccctgcaccggccatcttcggatccatattggcctggtcgtgcaacccagttttttccatattgccaaacatgttcttggaaggggcgtatgcttccgttcccacgttggatgcgttgtcatcatactgactgttaaaacggctgggtgcataatcgtcgtaactcctcatcgtcttggaatcgtaatccatgtcaggttcatccctctgggcattggcgaccaggggtaaagcctgagaagaataattctcagcgaagttactcgtgctacctcccaggaaaggagactgcacgggtgaagagttatagaaagtgttccggtatggagaaaaggggtcttcagtaactccaccgggtaccaaacttcgactgtcggtctcgagctcttgattttgacgcttctcctcgacgtcatgaactcgaagttcgtcctccaagaggcggaatattcgaggactgacaaagatctgtcaaaggagtaaaccgagttcgcaagtccatttcgaacacatcagcagcaaacccgatactcaacagaatcgaacaaaagatgaacggacaaaccttgtactttcctacggccagatccttctctcgccactccttcctctcacgcaaactaatgactgcgtctgtagcagagtcatacccaggaattaattcctgctcgtaccgctcgcagaactctgcgtgggtcatgctgacctcaaaagagaccgatgctctcttcgcgaactctgtcaatcctacacttctcacttgagcttttaggcctctcgactcgagctggtttggtagttgaacatcgttcggggtcaaggcatatacgatccaagactttgtctcgtcgaacgtttcaaacaatacgtcgagcgtcgctttgaattccccgacaacagatcgaatttgcggagcagactgttcaccagtcttttcatcctgcacaccatcgtcatcccctgcccctaatcgggcaccgagccgacctccttttcgccgagttgagggagccctcataggcttgacgggctgttgagcggcaacgatcacctcttgatctcttgggtggacctgggtggcaatagcgttcgaagcaaacaagcctcggatgaaagtatttgaggagccagactcatcgatatcggcatcggtacttcctcttaggagcgagacgaagtccgggttgatcgcatcagcatttttctcaaggaacgactcggcagagtatgtggtcggtccattatagtggctgacgataaaagtaggaaatccggttcgatcctgtcctccagatgagaaacttgggtggttgttccatcgtttgcccattgcttcgaccatagtgtgatccgtcttcttgcccattttcttagtctggtcatccatgatgtggatcaagcctccaggtgttgtcgagagcattcggacgcattctgagttgtcgaagtactggactgaaggaatgagagaagagattccctcaacagcgtactcggcggtctgtcgctcgaacgtggattgcaagatccagttttgaagtcgctcgttcgaaaagttgacacagaactgatccaacgagttcaaccgtgctccgaagcctgagaggttttggaaaccgggtaagtcgaggatgccgataaagttggcaaaatcgtctcggcaaaggcgctcgttgatgtgttcgttgagccaagcaaagagcaaggaatagagggactttgcaaagtcgtctcggttggcagaagctccttcggcatcgaggaacacggtaactacgtctcgctggaccatcgcggtcttacagttgaagacctcttccagcgcagaagctctgactccaagaaactcggagacagtttctaaaacgtcccagtttcttactatagcagcgtctgggttcttatcgtggtctatgtagaactcgaggtttccaacatgcagaatggcagcgactaactggcagacctgggcaaccaaccgtttcgacatgccgaccagcttgaaggcctgcttcaactgctcgaaccgggtccgatcatcgttggcttcgcctcccttgagctgaacgccgaccgaaccacgagcacctagtagacggtaagcagaagcatcgggtgctagccgaaggtgttgacgttcctcgggtgtggcgccggcgatgagatagtagaagacatggaagttgcgttctccaggagaaggtccggccactcggctccgttcgaggtagtagtccaaagtctttgcgccgcacagtcgaccgcggtctgagaactgcagctcggtgtacttcccaaagcgagacgcattggcgttatgaagagttctggcgtttccgaaagattcaagaacgaactgatgacagtgttcgcaagttgttagttaccaaacctgaatgattcaaagtgccagagtgcatggcaaggaccaacctctgcatttgggatttgctgcattagctttgcccccttctttccagggccggtgaccgagaggtcaataaatgatcggatgagaagccttcggagttccgacttgccacttccagtctcgccactgaaggagaaatatcacacaacggttttttccataaacaagatgtcgatacacgtgtgatgaacatgtcaagggaaaacatgatagcctacctcatcaaaatactctggtctcggccagtccttctcatgtcaaaataggcctttccagcaaggccaaagatatgaggaggtaagatgtcccgcatttcctgcgtgttccgataatccttgctgtaggacgctagtgtttggtccgaattggcattgatgaatttgtgagggttgattgccaccaaggcagaaggcccgagggaagtgtatataagatcaagtaggtatcgatcacgaaggcaggcctgtttgatggataatgatgttacacaagatatgaagtcagttattgtgatttgataccttcactgtcttgtcaaggcgaacgaccagaaatgtatcgtagtcaaaggacttggttttttcttctttgtctcgagctgtctgctaagtgccaggtatagatactgagatgctaggtacggttgctgttcactcaccacgatcgattcttccgagatcgagacgagctctgtgagatcgtctgtttgttcgtgtctccttgtgggccctctgctaggcacgacttgttgacgggcggccatgtttgaagatatcagtcttcgttaagaagatgtgcgggagattgcaaagggggtgaaaagaggtgcgagctagaacgagaacaaggtatcagggttcgagcgatgagataaacgctaaggacgttgtcgagaggaatcggacggcttgcgagaatcttcagtgtttgccgatcaatgcaagtgagaggtaagatggtaatagagagaaaagaagaagctaggagagtgacctgaaaagtccaaagagtcgacaaaggggaaagtgagagtgaagaaagccccgttggcaggggtggtcgagcgggcgatcgtccttttaaaaacagtggtgaaccagagttctgtgtgaaagagacagagaaacaaacagataccaagggaacagttcagtttggaggttcctactgataggatcaaagatgttccaactcacattcaccttgtggagaaggcaacgaaagggaaaagacaggcctgggcgagcttgcaaacgaaggaacacacaaagaatacacctacatacacactggtgttttgatgcacgttgtattaggtaattgtaaccctaacaaatgataccgagccttggtcagtcatctggtagtcaccattgtaggagacctacgtcgttgaggggaaaagaaataaagacattctataggtgactattgagtatgacggcctgacgatgtttcgagtagtcttgttgaaaaattcaacctcgttcatagtagagttcatcgtggagtcggactaagtcgatggagagtagttcaagatatatttccttctctagagcgcatatagaaagaacaagaagagggcttgcaaatatctctccttacccctttactaaatgagaagaaatactcggggatatggatatgcagctggttagcccaacttatttaccagctattatcttgacagcgccgataggtatagagatcgactataccagatattctcaatagacttttaattctttcggagaagttcaggcagctaactctgctgcagaatcgagaatcgctctttccgcatcaagtaagaccagatgttcgatgcatgttcccacgggcacaacattttattctgtatgtctttcgattcacattgatgtttgtgtctttcgtccgtctcaattctatcagaactgcaagcgcagaggattctgctaacttgaacataactgacaagacagcggtatcgaatatgccagcagtagctatcacattcagcgcaacgatggctggaatgatgatcctcggttaagagttctgctatcatttccttgtttcctttttcttccttctttccatctttatctcgtttcctctcttgcccccatcatcggcgatgttcgtttcagagttatatgtacaccctacctcccactcacatctgtcgctcagctatgagcatgatcatatactatctttcgattcactctttgcctttttcagtgattgaatcgttaagaaggaaacaattcagaatatactccaagtttccaccaaatccgctgatccaagcgcaagtgttctcaagattcaagaataatctttcggaaattgacatgtgggctcctatatctacttgtagattaaaaaaagattcgaaagctctctctctataatcgaccatgttggcatacacagataacgatgccaaggaactccgatgagttcaagcatggaacctgcccaggcgatatagatcgggaatttgacttccttgcttagtatcgaaccgttccagtcgacgtgcttgctcagagagatggtcggaggacaacgaaggaaacacctgtagaaagcagacatacaacccatacgccatctcagaggaaggaaaaatcaagaatacgtcctttgtaggattgacgcgcacctgataaactcgagtcccaattccgatctgcatcaaagttggatggcattcagccaaggtatgtagatctcttatacttggttcccagccatattcatccggcggaggtgccaagatttgcaatgctctcaaacgtttcattcgtcccatacaaatacctaatctgttgagatctttcggggtccgtatgcgtaggaacaattgttcaagattaggagatgaatgctgttcaaaagactcccacaaaaccttcgacgagagtgacaagagagagagatttgggaacaatacgtttggtagagcgaacgagatgggcgatcggcctgtaggggatgttagatgaagtgtctcaagggtgttgtgaaatgcaataaggatatcgtctaggcaaacggcatgaccacttgggtaggtataagaaagatatttgaggctgggtgccagtgctgggaggtcaagagtgagaatgtcgacattctcgacagattcaagcccgagatgtgtgattgatcccgaggtagagcggagaatagatcggacgccctcagagctgattcttatgcaagcggtcaggctaagctcgttcaggttggataaatatggcgcccatgatttcagatgatggtctcttatcagaggtgatgactaggtacaaatagaggtcgttcaataagtatcagtagtatgaaacagaggacaagatgcatggaccaaagagagaaacaactctactttgcagatgatcgacaacctcttcagcccaagttttgtcttcctttctgcatcctgattctggtccaatactctgaaccactctttcaacacatcgaccatccccttatccggcatgatcaatcctaacttttccagcctggaaactctaagccaacaagtcgggtcatacacatctaaagtagacccgttgatctctagatctctcagaaaaggcatcgaggttgagatggcgagaattagtccttcggagagcgacctatgcctggtccacgcgagtgatgacagattgggaagggacaggaaagataggagtgtgtgagaagtgattatgtccgaccgatcgattcctggaagtggatacgaacgaatctcttcataagatatgcacatacgccacatagagtcagtctgtcgactcttgagactcctaaaggattatgatgagaatgaagtcacctagccgcttcacgagctgtccgagctccgagctctgagctaacgtccggaagagcaaagggagctgacaaacctcatcagagaggcatcagtgaaagcggtcaccttgtcagactcactctcttctctagtatgtagatgatttagattatgaaggaaaccacacccttgcatctggctctctctcccatggtctaacccagacatgtgaatagagcacctcattcgcatatttcctccacgacctggaaacgagcgatagtacccgaaggtcatttggcgctgtcgtataggatacaatcagtgggtagagctcttctggaaagttggctgacatgtcgatggtatcaatagcggctgatgatgaagatgaaggttttgagtcagtgttaacagggatttgaaactgaatgatctccgactcggtctaagccgaagttgccgtcatcgagcagttataactgggttttcaatatctcaacactcaacattcgtgacatcaatctttccgttgacgaagacgagaaagagaactatataaagtacaacatatataacatctagatatcaagaagagagtttcccaagaagaacatttgattccctatagagtcctgaaactggccgcagctctatcatcgctgagcgctcgattatattctaacaacaacaatagcagctatgacgaacgaatcctgatatcagtcatgattgcttcccagattgatatgaaaggaacatctgttgacaagaaagagaaaagaagagacaacatacatatgcttgcatatctttccaaccccacctcgagatcgcaaattctctgccgttatgggcaatctcctccgccaaatcgaattggccttctgaccccgagactccttcgaagaatgatgttatgtcactatatatgtaaacatgcgcatgcctccgaacatcagtggtaatgctagcgcgaactgtcaaggtgtaagatgaagacatacaagagatcagagtaggagacttgaacgggcacgtagtggtaccaggggatgatggtatcactgtttggaagcatcggcgcgttttcaccgatcgcaagattagccagcaattcaaatggcggactttgccaaggacaaatagaaatatcagaaggacactagactgacgagaaccattcgttgaagacggtactcttgaataccgcactgcccgaggtgagtaaccttcggaatcgggtggatgccccgtctccgtcgacatcgagttggtatctgaattttgacgctttgagcggttcgatcttgctcctaaagttgaacatgttcgacatctccgcacactgtatcacaagatcatccaaccacgaagagaagaagaacacaaagccgatgatgaagtataagcatatcagctatggggaatgtgaaaaagattaaatataaagcaaagaaaacgtgctgtgccgtctgcttcgacgcatcttgttggactgcctacaaaaccgagatccaaccaatcctccatgagctctctcttggtcttttctttgagcactcttccccctctgacgaccaaaacctcttccatctctccatcatcttcgtcttcgtcttcattgtctttggcctcagagtcctctttcggcctcccattttgttcgtcccctcctgactcatctccaacgtccttctttgctttctgacctccgaagaatacaagccgctctcgctgactctttctccaatcgacaaaaccatcatgccagatccctgtcgttgcccctcgccagatgactcgtttgtcggtctttttgaggaacgtcgtatggggtagcgtcgcattcaaacttgaaagcggaataccaagtaaggtaggtgagagcgcagcactgtagggtgagataacaggagtaaataacggcaagtttgacgaaggcggtggagggaggtagtgaccgtgaagttgaaagagtgaaggatgtgtacaaggcgatctggtctgggattcgtcatagatgaatgatctgagcgttggcgattcttcggcctgagtggtcttgcagagatctgaccagtgagtcttcttcgatgtttcaggttgaagcaccttgtcaagctcggattttttccatgtcttgcctgcccttcccaaagcctttgctttctccaagacgctctcggaaattgccagggtgggttgatcgagtaggttgaagtaaaggtcgaggtcgggcagtagatgggcgataggttgaagaagaagagagagtgaacttgaagttccaacaagaggaaatatatgaatggattagcatcgttacagcttcgttagataaagatggccgaaaactcacgaagacttcttctgatgttctttcacagagctgacttcctcggagatagcgccttttctgaagaacagattgagccatcccaagccatacgatataagttatatgctgactgatctcaaagctgaccagagaccaagacttaccgaatctggaatgtggagattccaagcatgcctttaagagccttcacattctctcttaacgtctttccttctacgctcaagaagggaagcacagaattataggctgtcgagtgtggccaaggcttgaggtcatactcgatgcaaaattcgaacctagagagcgcagagacagaggcggtaaagtcaagaacccgatctataagtcaaagctgttctgtcgtgcgacgacacatatgtgccctcactgaccaggcttcaaaccctttaggtggtaatgctcctccgttgagctcagaatacagttctatagctccggctagcgtcgtcggtatcttggactgctgaatctttgcctgctcttttgcctcctgaatggcaccaggcgcgttgtataggcagagcgcggagaagtcagtcatcgagaagatctatgccagcctctatgactctcaatcatgaataagacagtaacacatacagagatgagaacctctatcgggtggatcccgtcttttaaatctttgtcggccacgtataaaatgccattctctcgtttgtatgaagggatcgaaagagcatccagtgggcgtttctggaccggcttgacaacgataggggctgaagatgcggattctttggtagacacatcaagatggaggtgaggaatatgctgtgagggttcagttgtggaaggaaagagcaggaaatcagatctggtgtacagccggatcatcggataaacgttaaaaagagtctagagaacatgatcaagaaccgtacgagagcttcttctacttcttccagaaggatgtctgatcgttcgttatatggaaaccaagagaacgtcagataccagaccagaccaaccagatagcagaagagaaccgagaacactgaccagatcttctattgagaggaaggatgaggagctgtattgagtgtcaaacaaggatcatgattagcatcaaaacgagctttaccaggtcggcgggctcggcagagacgtaaggcttcgaactgaccaaaaagaaaagcataaagggcagcataagagttgcaaacctcctaggcagcctcggtctcaacagaagcatgtctacagtatgctcagaggcaagcgaagatggaaaaaaagaagaagaaaagaatacggtggatacgaaagcacccagaatcaacaacggggtagaaacactcgggtcgaacgttgtgaagaaaccaaggcaatagcgcgggtctttaattacgtaatcaaaatgcacgtgtcgcctaactggagtccggccggcctgggcctctatgacgacataggtgagttgcaactgatgatgcttactcttattattagcctggagctcgtccttttctctttggtcggacgaaagaacttacgaaagagaagcatacgaatacatccttcttctttctgattgactttatccaactctattctatcgtttactatcaaattcatctcttgaatctttcggatatatcctcaagtcgtcacagtcaagcgtcaaaatctatcatgtcgaacgagacctatattgccactaccgtcaccacagaatcggccgtgcttccggccaaggacatcgtctatcaaccaccagcatctgcgcccgtcatctcgtacgacactccaaccccgactagagagctcgctgaccctcatgaaaccttggtagcgacgtctgcgaattctctatccgagcactctgctgaacatccagaaggtcatgagctcaacagagtcctcagtgcctcaagtgatatcagcttgacgtccatcgcgagcgacatcaaaccaaagagggacaaagagtggaggagcacatttgatcttctggatgacgaagagctgcttgacagtaagaatccgtttccactctatacttgcaaacatttcttctctttctgcattcggccagagcgctaaacactgttcgcatgtgtctgttcgttaaatatcctttctgttccctataaagctcatggatgtgccatcagtaaagatatcttgtaggttgctagagctgcgcgtgtttagccaagaacaggaaaaaaaaatctcatcatctgttcatctctctgtttgtttcgtctctccgtctaccatcaggattcatgggcggatatatatctcgtcccggtcggtcgccttcaagagcaacatcttagggtttaagaccaaagtatgtgcgataatctacttgtgttctttgtcggttgctgatcttttacggtgccgtcggtcttgcgttcggactcaattaggttcacttcccattaacatcagtcacagaggtgtctcccaaaatgaccgccttgatcattcccaacgcgatagagatcgttcatgacggagagactgtgagtgattctgattcgtcatgtattgccactcctcatccgtgttctctaatcagatgtgctaacgagctggtgtttctctgtatctgggtacaaatcagacggtcttctctacccttcccactcgagacagcaccctcgaaattctgactacagcatggaagactcaagctccagaggcgtttgcggcgtttgccgctaggaatcctgaagtagagacccgggatcgatcatcttctatctcatctgtgaactcgacaggctctggtagctcgaaagcgccttcttttgcgaccgctcctgcaggaaccaccttcgctcggcccgctcctggttcatccaacaacaacccagcccaggcctatgccgatgaaatgaacactcggacgcccaccaatggctctgacgtccaggccggcggaaagccaaagaccaaatctggagaaatcgtgccaggtcagatgcacgctgccacccaacctggaagaccgcacatggaggaagatgcgttggacgtcaggtttgcgaccactccccagaagatttgggatttgctatacaaatctgaagagtttactcgaaaggtctgggaaggtttgggattcacaggtgtgtctcgtctttattcgtcactttccagttttatactatgcattactcatctcgatgatacggcgtttgacaactacagacatcaagattgctccttgggtgaacaataagagagactactcttacgttaaacccctgtcaggcaagatcggaccttcgagtgtgatctgctatttttctgatgagatcgttcgtaactcgtctgactttctatccgaaagctagttgatttgttctgacctcttttgtcgctcaatacatttgttttgtccttctattgctacggtttgaatgacttatcacacacccagatcaatgaggatgctgattcgtggtacggaatcaccacgatcactcggacgcctgatattccttctggcaagaggtgcgaatttgattgtcttccttgtcttagcgcatcgatgacaagatcactgacgatcgaactggctcgatattgacagctttgaggtccactcattgactacgttggcctgggagggacctcccaagggtgggtgccggatgaaggcgtcatcccgagttgaatggtccggaagaagcatgatcaaatgtacgtctgcctatcttatatttgttgatatctgatatctgatatcttgaactggtatccgcgatttcttccgaatgacatatgtagctatcatcaactcttcctctatcgagggtcaaacgacttataacaaaactctagccgatgcgacgaaggatgcaattaagaaagatcctgcacagtttggactcggttctggtcaaggagatgatgacgacgacgatatgtctatcaaaactgctcctgccaagacctctgccgctgtccctaccgccactcccaaccgagacgttggcaagcctgctcactccccggctgttggttcttcctctgcgtccaaaaaatcagaatcgtttgcggctgaccagctgaattctatgctggaggatcctgtcaaattggctctcgccgtgctccttgtgttttctctcctgttcaacctgtactatctgttttctagaggtcgggccggtccgagggtagcttcaaccgtgcccttggcgaccgccgggttcaaggtgtctccaaacgcgttcggtagtttggaaagattgcagaaggtcgagcacgagttgaccaccatcaaagcctcattggagaaggcaggagtgtccatctttacggcaaaatctcaggaataaataaagagaaaaaaaaagcagaagaagcgttctgtgttgtacttttcgtttatggaaacgactctcctagtcttttcggagtttctcccttcctctggatccacccatctgttccatacttgtcctctcctttctccttttccttttctttagtccatgtccctctgtgtattttcttctctctcactctagttcgtcaaacacggatcaaatgactagctaacaaaaccgaccagtctcttctgttcaatttttcaaatgtatatttgttaccttgagaacgtcttaagaatcgatctgattgacgtagccttactcgatacacaccgatcatcggggtgtcaaccgatagacagggtattgctctttcatgattctagccgctgagagaatcaggggatgagagacatacgtaaaacgaatgtgaatctaagccctgatctatcaagataaccctatcacaaccccaactcggtagtcattcggaagtatatgcgtgcgaatgatcccagaaacgcttccccatctcaagactacacttgtgtcttttttcctttcttgtttctttcttctttctttctttctgtctgtacctttccagtccggtccttttccatcttgtaacgatactggcttgtttcatcgagttttagttctaaagagacaagactcatgcactccaagggcaaagaaggaaggcgaagatgatcggttatggcagattgtttatcattgattatctcgtttctttttttggggaggacaggaagagagagattatataacctgaaggatgagttttaccaaaaaaaaaaaaaagtgaaagaaaatgatatcaatcagtccaacagctcttgtctgaccctcctttatgcgctcgtctcctgttgggcatgaaagagaatctcatgcgcgaaaagacaacaggatagaagggaaacaagcataccttgggtgataaactcatgactttaccccatcgaccgctcctcctcaactcggcagcaacgataccggtcactcgcgtaccaatcatatctcctttctggttcaaaagcacacatgcgttatcgtcgaatcggatggatcgaccatctggacgttggatcggttttcgggttctaaatcgtggtcatcgtcgtgcaagaacaatcgagatttgatgatattttgtacgagcagaggtagatgagattccaaaggcaaacgtgaaacgcaatcagcaagtcgaatagagaatgaaaaaaaggagactcgactcctcccaagacaagttcgaacaagagacgaaaacaggggacagaccggacgatgacagctcgcttaacatctcctcttcgaaccttctgagtctgggcgttgacgacgtgggcaggagaatcctttggcaacactgctatcggctttgctcgctcgaccacgacggtaacctcgtcacctgattgtagtaaaagagtatgagcgactgaggtcatctttgaagagagaaaaggagagatagaggcagaggtagataggaatggaccgtatcttcaaaaggaaagtgtatctgaaagaaaagagactcaccgattttgccaagagcctttgcgggtcgacccataacatcgatgattgtcgcgatgagtgctcccgagttgtcagcaacctggaaggaaagaagagaaggcgtttaccaagatacaatgaggattaaacagatacttgtgcaacccacccgaatcagaaaagacatcccgacttaccacacattttgcacggagtcctaacatattcaataaacgataagtgaggtactgtaaaatggaacaaagtgaaggaaggaagtaagtaaggaaataaggaccggcgagttcacagtccacagagagcgagtgtgtgtaaacgtaaccacaggcaccaggtacggttacgaccccctgatcgtcaccacggtccgagcggcaagtaaaatgatcgagagcggcagctgcgcgaatatgcgggattccccacattaaaaaaatgatgaccgcacccgcggccagccgcctactcccatttttttttcctcctttctctttccttcccctcttttcttactcgttccgttctgatctttttctctttattttggagccttcaaacggattctttctcttctctgctcctcttaccatcacacacaattaacctcctgctcacatactcaaacacttacttacacactcactcactcgttgatcatgtctggagctactactccccataggcctaccgagcctgcccacgatggacagcaggctctctacactagggtacgtgtttcgtcattgtaatctctcttcattgagttgtcgctcgtccatttttttcttcttgtcttttccttttctgtccatgaaacctgtagtcttcgtttgcacaacgctactctacagcgaccatctcttccgtatatctttgccgttcaacattgttgtgatgtacatgtgcttatcattgcttccatctcgtctgtgaacgctccaccatcacatactcttcttcatctcacgtgattgattaattcgatacccggtatccaccaactttcctcggcactcaaattcttctcatcacaccctcaacgacccatgctgcctcttatttattgcacgtaacccgtactatatattcattcggaccggcttgtcatcacctctcatcctgaacttgaatctacaaagagcaacaacggatccgctcttcctcacttgagccaggagagcatcgatgctcacctccgaaaggtcagtaacactttcgttcattggttctatctattctgctgtcacctgtgctcttcagtcgacccatccagtcttggcaccagacatctgacgtagatccaaactatatgtctgtttcaaacggcttcagtatgaggctctcttcaccgtcaagcccaacaggatgaagacgattgtgggaggtctcttggagactttcgccaagggattgggcaagaacggaaacaccgtcgtacgtatccagctcattcttgccttgtcaaagttgaaagctagagttatactgaatatgtctctttatcaatttggaactttcttagcctatgtgtatgtatatactacctctttgacttcagaagaatgaccattaaccttgttcaattcatcttatcctgatgccctacagtacccgcttacgtcttcggagtacgtctcttgacctcactcttgatccatcaggtttgaaattacagaacactgatctttggttgccggcatctctctagtaccccaccggaaaggagattggcgactacattgccgtcgacctcggaggaaccaaccttcgagtgtgcttcgttactctccagggagagggcaaattcgagatcacccagaccaagtaccgattgacggaggagcagaagcaggaggatggaacgaagctgtacgtgctctttactgcccctagtaccacttcaaggacaaagctcatgaccttcgcgcgcgactcggtaatctaaatagattcgacttctgcgctcaatgcgtcaaggctttcctccgagataacctcggcgtcgaggagggacagagtacagatctcgttttgggtttcactttctcttacccgtgtctccagaacaagattgaccacggagagctcattagatggaccaagggtttcggtgcacctaacactgaaggtcaggattgcgcccgaatgttcagagagtccctcgagcgagagagggttcctatccgacttgccgcccttatcaacgataccactggtgccctgatcgcttccaactacgtcgaccccaacactaaaatcgcctgcatcttcggaaccggttgcaacgccgcctatatggagactgtcgagaacatcccgaagatcaaggatctcggcttgcctgacggtcaggagatggccatcaactgcgagtggggagctttcgatagtttcgaccacacctacttgcgtacgtgtcttggcgctctctcctttttcttttttcttttttctttttataatcagattgtgtctcggaacgtatactcaaaagcgtctattttctgaattttgccggttcattagctcgaaccaagtacgacgtgatcatcgacgagtcttccaacaagcctggagagcaggtaaatctcatttcctgttttgggcaacgaaaagttttgtgaggctgatcaaaacgtttcccgcactcgaacatccttatagtctttcgagaagatgatcgctggtctctaccttggagaggtcttccgattggtcatttgcgagctcattgacgagggagaccttttcttgggacaaatcacctacaagatcgagaagccctacgctttcgatactgcattcctctcgcttatcgaggcgtacgttctcatcattataatcctgtttctagcttttaagattccgactaacctcgagcattcttgttctctatacttcctttctgctttgaaatcaaaagtgatatcacggacgagggccttatgaccatcggtatcttctctcacttcttcggattggagaccacccaggaggagcgagtgttcttcaagaagctcgctgagctcatcggaactcgagccgccagattgtctgcctgtggaatcgccgctttggttacccagaagggttaccaggagactggatgcaccgtcggtgctgatggttcattgtacaacaagtatcccaagtttgccgatcgaatccactcggcattggtagacgtgtttggagagaagggaaagtgagacctcattttcttttctttggtttccgtttcgctctttgggttaggtctggctgaagatactgatcatattttgtttgatttatgaacctttcttcaatctcaaagaaacatcatcacccgacatgccgaggacggaagtggagttggttcgtcgatcatcgcggccatgacaaagatccgaaaggacaacaaatgtaagcaccgattctctctgtatcgctactccttttcctagccaggtatagaaagctcacttgacctttacctattcttccttacagtctacgagcacctctagatttcgtgtttataaatatctctttcttatatacatttccggtcatctcttgtagcgcatttctttctttttttgttttgtttaatgtaaagatgccatggatccaacaagataatcttgtcaatacaacgctcgaagattgtctggagactcaaaagttttttttgttttttttgtttttttgttttgtttttttgttttgttttgttttgttttgggaaacaaaatattactatccgagttactaaatctatctttgggggaaataagattacaagatccgaggggcgcttgagtagaagtgaacaagagggagattgattagatggcgccaaccaggtttatacaggcaattttgagttgagatttcgattttacttctttatcttataacccaccgcgaatgagtcatctctgccacatacacttccccaactctattgacctacaaagtggtctggacactgacgctcgatagctttgtgtgtatgtatgagtaggtgtaatggaacaagtcaataagtggggttggagacatagttctgttttctcgtatagaccgaagaagcaaggccagcagacctatcagatttatctgtcgttatcagaatctcccgtagcctccgttcggactcttcggatttcggactttcggcctcgaaccatcaaccggcgctaaagtcatctatatcccgtcttctcgttcttcttctcgaacacttccattgtatcttttcttcttttatataacttcttgtacttgaaaccttcgttctcttgttgatagtagacacacacccgtatatatatcggagagagaggaatacagataccaaaaagaagaccactctcttacaatgttacccccatccgcatcggagggaccctctccgaattcgccttcaactccaccagcttcgacctcgaatccaacactagctttcaacccactttcatccccaaacccatatcttcaagagcctcaaccgacacctgaggatcaacaggatcatcatgctcatttctcaaacacattggtctcggtaccgccttcacctgtgctaagccaggtgacgatatctacaactgccgaccacgtgaccacgccttccccaacgctggtcaatgtggatattgagcatgtggcggtggataatgaccctagattatggagtccgctaaagaagaatatagtacttgccatggtatctattggatcaattcccgtaacattgggtgccgtacgtcctttgccctttctttcttggtttatactctttcttctcggtcattctctttttactcgatcagtacttctggaatgttgtattgatctggaagatacctatctattctctgctggaatccaggcgatctacaatccggctttcgatgaattaaggagtcaattaaacgcaacagataacgaactttcgctttctgttagtttgttcatccttttccaagggtgttgtccgtgagtatataaaaactctttcctttttccatgcgcgcgagaaggcgcattgacaagagaatcacactccgatctcgattttccgttcgggcggtctagtgtattctggtcctcgatagcagaggtcaaaggacgaaaatcagtgtatttgatttcatatgtagtatgtaccccttgtctcattttgttgaccgcataatcttctctcgctcaacgactttgatgatgtgttgtagattttcctcatcggatctgtggtgtcgtcgagggcgaacacgatgactttgctcatcgtgatgaggtaagtttccgttaatgcaactcatattgtctttgagttgggctcacacatcgttggctttgctgtatttagaatggtacaaggtatgcctttctttcaatagatagttgacgatgtgtacgatctcacatatgttgtcatattctcttcttattcatcgttacagcctttggttcttctgccgtcctttcgatcggagcgggaactctagcgtcagtcttctcattctttcttccctagcctcctcgtgtggattcaacaggatgaagatgttgactgtctcgctgtgtcctatcctcaacttgtagtgatatgtttgagccggaagtccgaggatccaagatgggcctttactatggaacaccattactgggtaccagtatgggacctattggtgcgtactggtctttggtattcgtttgtttatttatttagatttcgacgtctttggctaaccaaacgttccaccggatcgcaacctctggcggctcttagtcggaggtgctttaactcaggcgtttggctggagatccacattctacttcatctccgcgttcggtgctgttgctcttgttcgttgacatttcttcgttccattgagacgttgatccggttcattcactgagtcaagctttacgtacccttgtcatcgttcacagttcgccttctgtttcttcccagattcatggcggaaggaacgatcgctggcgtaccaagcggcactcaagaaatcgattgctgattcgcttgtacacgccgaaaagaaacgcaaacgaaaattggccaaaggtttacgaagtacggacgcaacgcctgctccgactcgacccggttcaccgacgaacccggatcctgagaaacttgaacttgcgctcgagagtgaacagatcaatggcaagaagaaaggagggaggagaagatggtggttatttggagagagaacgggtgataaggtagcagatggaacggtcaagattggattgagagacgtcaacccattgttgcctgcgttagcgattctgaaatgcccgtcgaatctattgaccgtcatttcttctggtaggtttcagttcttgatttcctctgtatttgttaccatgattgatctactcttggatctatttctgaattttcaatcttgtcaggtatcatcttcgcggcccagtactccatctcgtaagtcgttgcgttaactctgtatgaggtcagaatgaatcaatgtctgatcacctagttcgaggctcgatctcacccccgttcctcctgcaacagtttcacggcagccgtcacgttcgccgaatcaccttacaactacaatgctctgaagattggtctcgtccttgttgccttcggtacgtttgatatatgcgttcgactctcgtgaataatatcgttgacaaagatctccttctcttactgcatataggtggtggtaacatcattggatccgtcgcgggcggtcgatactccgattacgttcttgctcgtttgatgaagaaaaacggaggtgtgcgtgaaccagaggtttgtccattctccttcctcacgtggatctcacactgtcgtacatttctcaacttctcagcggttctttcctttcttacattgcctgatggggccttctttctccagatgaggttaaaatcagttttcgttgcgatgccaatcatggttctttcattcctgggctatggttggaccgccaacgagaaggtgaatctttcgaactcaccgttctcggtttcatccatacttacatgtgttgcctatttttgacttctgggggcatatctgcagacgaacgtcgccggaccggttgtgtttttggtcaccggtgggatttctgtgatggtgatttacgccaggtgcgtcaaatcattggctcttgccctatcatattctctatacacagggtttctgacaaattgggtggttctttctcgtttaagcgttcttgcattcttggtcgactctaaccctggaagatcatcaagcgctgtagcgtcaaactcgttctgtcgaggtcggttgctatcaaactttcttgtcatatcaatcgtcttgcttttctgtattcggagctgatctatcattgggtatttcttgtttcatttgttaattcgttcttcgctcccccttaacgcaacttggttcgatgagcaggtcttttcgcatttgccttctctcaatcctcactccctattaggaatggaatcggcgatggtggactttactcgtgagtcttgagtttccttttgcgtactatcgcatgcacatgcgtttgtttatgtactggatagatggatggatggatggttgagaagatatagatacctacggtcatgttcaggtcttaaagaagccaaataaactgacgttgaattgtttgtctttgcgactgtttatctccttactcggtacgtcggtgattacgtatgtatccccgtcatgtctgacttggtaggttattctctggcatgttgctgttgacatgcgtggcttttgttgtcctgacgtataaggcgagtatctcttcatttttcataaaatcaatacgtgttggatcgggactgatccggaatgtgtttttgcccatcggggttctttacatgttgctcttcattgtcttacttcaaaaaaatccaatagggaaaacaatggcgagaacccgatcactcttttggttacaaacgacgacatcgtcatgacctcgaagcccaggctcagaatcagactcaaactaaagatcaggagatcaatccatcagatctcaaagatgttcaacctgtagtgccttaaacggggaatggtctccattattttatttacttccttgtccttcagatagatggtcttctgtttccctaattcaaattatatatgtctttttcaaagagtacggctaagaaagcgcacataggttgacgataggatacgacctagatgggccggaagtcaggagaggggttccaagggtttgtccgtcgagatgcttcttcgttttattattattattattaattatctttatttttatttttctctaccacgttatttatcatcctttctcgtattgtaaatatatataacgaatatcgctcaaacaattgttaatttgttttcaaagaccaactaaagttctgcatgtcttgagagatcttttagctcagaaggcttacgtacgtctgggaacgcgcgtttgccttctttgctttctctatttctctaatctcttcgttcgggatcatctattttctcatggatttcgccgtcaagcctcttgcctctctcccctactcaccaccaaacttgtcttcttgtgatgatcccctcttttatgttgttgctttttattttgtttcactcttctctacgcgctctaacgtgtcttgttgaacgtgccatcgcatacatcttcagaggctaaatccgtgttcttgaag

SEQ ID NO: 235 - DNA, 39950 bp, Xanthophyllomyces dendrorhous
ttcttgaagacacgaagaccaatagaaaatggggcgggtgcagtatccatgacgcatgggagaagaagagaaaatagaacgaatgggaaagaggaagagagggggggggaatgtgaataaatacgcgggtttcccgttgatggatcgcccaatgcaaagtgccgggtgaatttcgagtcgggaagtacttttcttcgtcaaacatttttgggatcgaaatagaaaaaacacgtgagccctgtcgcgtcgctacgcatgacttggccccggatttagaaacaccattcaaccaaagctctaatgaaaataaatccgtctcggattcaattaataggattctgcttcctttgtgaatctcctatagtcaacggaccagaccaccattaaaggacgaaaaaagctgagagctttctattcccttacaaagcttgctcactttagttcctagttctcttccgacccttttcaagccccgtttttatctttcggattctttcatcttttcttctacgttcatggaacacttaggaggaaaggcaaaataggttgattcgacattcctacgtcaaccatcctacacgatccgaatccttttctttctccctcaatcggtttctttgctctgcttggcgctctcatttgttgtattcgtttcattacatatttaggccatgatcgatcacgagaatgaaagaatcgagagaggagaaaataaggagtaaagaaaaacaatagcaaatgttcagacccaagacggcacggaggaagagagagccgggtctctgacgggcaagaagaaagagtttttcctcttatgcatagaggaacacgccacgttatcggctgcgcttactgtccccggacgcaccagaacgactcctatgatgtaagtgcgcaggctgagccagtgggaaagggaaggcgattaggcgaaggcccaaacaaatgacagcgctggctcgatcgatcgggtgtcggctcggatcggagcaactgaggtcatctcgagccagggtctcgacctgctgatcgtcgggctatccacttctaaaactcgaaagtctatccccgggcctaaggcgaggcggggcgacgcgagcgtcagataatcgtcgacttgaccctgacgatccttcttgccattgcgtcagaggaatgtgggttcgtcctttttaatgttcatatgtgatcgtcactgtttttctgttttccccattccttcattctctcctctcctctccttcccctgtgtccgccttctctatctcctcctcttcttttcctaaccgttctgtactcacccgatcttcgggactctattttcttgtttctgttatatctcacgatgagttgttgacttttgaatgatcatcctgaagaagaactttatgcgcaaatgtggcaagaatggaaattagattccatagagatagaacgacagatttaaaggtataaaatattcgagaggtaaagagaaacaactttgaaaaaaagaagaaaagaaaaaaagaagaaaaagacaaaatagagagggattattaaaaatcacccgtcctatttttttctctggatcttcttcacacctttaaatggaagaagcctagacatcaaccgaatggtatcttcttcttcctcttcttcctcttcgttctgctttccttcttctgttcattcatccattcgcacatcgtgatattcttctctctgaattgattcattccgtttttcacgcctggagagacaaacgtttagcctcattttatccacataacatatacattcttgtgtctccctctctctctctctctcttccttctctcaatcacctcctggcccgttatgcagcccgtcagcctaccaccgatttcatccttcgacttcacagacagttgtccttcaccgtcctctctccttcctgcgctcgcctcgtcatccctgggccctggaccaaacccttccctccgtcggacggcttcaactcactctgggcaagacaggtcgacgtcccatgaccggacgcatttctcgccctccttgtccaacaggtacgtcacacacgtaatcagtttctctcaaatctcccggaatacacaacagcttacatcttgtttcttctgcttcttcttcttctgtttccatgtatcctcctcttccttgctcacagccgccggttatatgccagtgaagcctacgtcccgacgctcggcaccctttatgctcacgaccaaccgaaaccgctcggactacacgaaagctggccgtccagtcagtcacaaccaggacaaatctattcaaatcactcccatcaacggccagcctatatgtccagtccatcctatccatcggtcgatctaagcagacacgaacctgcccagtcttcccctcattctatccagaatctcttaaacgaaacaccggcgtcgacctctgcctccaaacactctgtccatctttcggtccactcacatccatacagacgtcaggcgtctcctcaaagatcaatcgccagtcctttatatccgacgtttgaatccatacagagcccacctaacttttccctaccccgactacctaactcctcgcctcgttctgcttccaatcatgacctttcaatctcctcagctggcgttatcccggaccgaaaccggacggagtctcctcctagcacatcatcagaggagttcacaccgcacttgagggcacctatcaaccgagccaccaaggcatgcaactcttgcagaactagaaagaccaggtgtctcgtccctgtagacgggccggaaggcgaaacaaagacgacctgtgtgaggtgcaaggaggcaaagatcgagtgcatttggtctggaggcgcaaagaaacgtggaccagttgcagggtaagtctcttgccttccatctactcttgacatgtctcatccatccggctgattcttatgccttccaaaaacgtgctcattctggttcctttcttctctttcttttcctctcgcttttgcttcggctttgaatccccctccctttttcagttctagttcaaaatatggtctcggaaaactaaaggccaaactcaagcgcccgtcgcccgagcttaggcagcactcctcaccgaacctgtctgatttgactgctggagaacccgtttcccctggtcacgcagcccagtctgtctcaccatactctgacaaatacactcttcctttcttaactccttcccagtcggaacgacaaaactggccgcctgtccagtcgcaggcagcatttgcgtcctccgcctcgtcctcactctctacttcttcctcgtcttcgtcatccttcctgttgacccctcgatcgccgttctctatggagtctcttcctcccctggatttctctcgaccacaagctagagatggaagcggcagtagtggctccggcagcgacggctctttcaaaccttattccccaaactcgggatacccaagaacgaacccgttctttccgtcttattcgaaagtaccggctcatccttccttgatttcacattccatcaacgtcagtcctggccgatattctggcgaacgagacggggtccgccacctctattgagggtgtattcaaatgagggcgtagagatggaacggtagatcatggcccagagatcaaggaccactccctgcttctttctcttcttatcttttcgcttagcatagatcctcacgttttcttttgtttctcctacacaaacttggtacatccctcacttttcgtgcctccactcccaagtttgtttatatgtttctgtcttgtttcgtttctaagttatctttcctaaaatgatgtatacctcaagatcttcgtcgctctgttgtatcagtttctcccaaaccgtcgtgtcaacctctctttgcttcccttatacctccgtcccgttctctctcttctctttccctttcctttcttgtttatttctgtatctcataccacacaaacgaatcatcgaggaaacaatacttcgagaaggacattttcagcttctgtacatgattgagctgatcattcatatcgaatacttttggtcctttctttcgtcacgaagcattgtcaaataacggaaagaaaggttgtaatctttaaacccgctgtccggttcgtcggtctaaatcttagattctcttttatacatgcattcttctttgccacagcatattgatactgtcgagaaagaggtttttctatctagaccgttttgttaacgttgatgaagagcctgtcggaggaatcggtcgcgtcgtttagaagatcagactcggccttcatgctttccgccaacgaacgaggttccaacacccaggcaacagcgcgacctgtcaatctgtgctctcccctatccgtcccctcttcctggccgacgatcgacccaccggttgccttcgccgtctctatggacgattcttctacacgcgtcccggtccctagacttggatcgtccaacagactccagagagacctcagactgcttcggttggtggtgacagtcgtcatctcccgttggacgccgacgagtagggagtcgagtgtatggggggttaatgatgcagagggtttcatcgaactgaccgatgggtcgagaagggctcgtagggtgggtgccaagttatcgaacgatgagcctgagctcgggttcacatcggatgaggaagagggaagatcgagtgagagcgaagcgaggttgggtatcgatgggtttattgatgttggtgatggcggcgatgatgatgatgatgatggctctaacggttctgctgttgattgagaagattgggtagggtgcaaataaatcgaagacaatgcaagatggatgcttcccagttgatcgttaaacctcgattccttccagaatgatcgagctctcctttcattttcttcgtctgtccagtcaggtcggtaaaacatgtcttccgtcctttcagtctcgtcctttcctgccagctttgcgcatattcctatcaacctttcttttgcctccacagtcgtccaacatctaatcctcttcgattcacccaaaggccctacgctagcctccagagcggtcgaaaggaaccggacgagttcgctcactatcggcgcctggagctcactttccagctggatcgtcaacgccctggcgttggagcttcctccgagcatcgccttggtcatctcttctggttttttgatagagccgttcttgaagtattgtctgacgagtggtttgaacacgccttcggtccctccgtcggtcggaagtggcaagtgacagatcgcggatacgagcgccaggagaagggaaaggtccaggtttaaatccagagtaggcagaagaagacgcaatggtggtggatgggaaatcgaataatgcgccaagggtacaggcgctttctcgagcacagaggaagagggcgtggacggtggagttccgtgaacgacagagatacccatggacctgatctcatgaaccgttctgagcactcgaccgtcgtctccaggtccacctggttgaagtctaggaagctgaagttcaatcctcggcggaggagacaataagttggccgcccggagcatgaaccgagcggtcttgtgtaatgaggtcctcagatgatctgggttggcgtctttggataggactgaactgtccgaatcatcggagaaagaagaatccgagttgtcgtacgaatcctgctctaccagttcgaacaatagtcgagagttgacgatggcgagcactttgatccaaagctttccgccgtccgccaacacatggacctttgtatcaatctttgtcttcttcttgagcgatcctggcttgttgaatactgtggcttcggatgaaagaaagctttgattgaccccgacgactggatatggagcagagactagagttctgtacaaagcgagtaggtgaggagcgtttgatgacggcaagttactcgaccggggagcttcgaatacctaatcatcaggtagagttcgtacacatcgaagctcgtgagcgagagaaagagcaagggagaagaagaaggacagagaaacatgcgcgactcaccctgtctagccagtctatctctttcttgaccgatgctctaagcttcttgagaccgggaatgtacagcgactgtataggcgagtccccaggggcgttctcgtcaatgatcggagggggcggaagccgaaaggatgccagtagaggagtgatctcggccagttgatctctgtaattcctgagagaggcaaacacggcctctgactgatccatcttgagcaagacaaataaagcaggagtgtacgtctgtggtatgtgtatgtgtgtgtgtgtgtgtaggtgtgtgtgataacagagcgaaagagtaagaagtcggtgaaaggtgaaaacaagagaaaagtctgagttcttcaatccatccatcaagctaacgtcgttctcttccttcttccatctcgagatgatctgatcgatctggctttggtgcttgatatcttttccccatcttcttggtctctacctgtttcatcaacagcagctctctgtcttcttgaaagatcaggtttcattcgtcggtcgggcaccttgctgagcaaaacaccgtagtcctcttgactttcgccgtcctctccttctttcttaggagttaaatttggtgatgtcggtcgtgcacaaaaaagaagcgcaatccggaaagcaggacatggatgtcactgtagaccgtttgaatctgtacgagagtttgctttctattcgtgtcctattctggttgaaacacgccgaacacgctcatgatgctaactttcgtccgttcactcttactctcccgtgaaacttcaaagcgtattgaaaagcctcaacactacgttgaccaaggagctaaatgtcaaagctccatgggatgcagacatagaatcccaacggctcacgttagtagcagatgattcctgtctttgttaggatctgtgtgttcttatgatcggctgaatgaaatctggtctgatcgaatcgaccctccgtctactcagcattcgtgggaactacgtccggatcctcctcaagtttcctgaccaggccgacccacggcatcttgaggccctctggattcaaacgacccatgcgttcatcactcgctatagagctaggatttctacaccatcccagccttctagatccgctagttccaacaacaaaaagaaccgtcgagacatacagtacgagaagaaccgaaatctcaaccggtttgccacgttcctcagggaagaaatcaaattctacaaagcgtttatcggtcgaatagcctcagcctacgaacttgaatcaaccgaaaaattcttagaagggtttagcaatgagaacagatcggccaaaagcttggacggcatagttccgttgaaagaagccaagtccaaagggggagccatggtcgtcagaggattcatctttttaggcgatctggagcggtacggagagatttatgctgtcgggaaggactctgccacaaaggagtctgggggacagggaaaagcaatcaagcaatggctggggacgtttgaaaagcagtccgagggatttgtgaaagctaaggcaatgtaccagatcgctcatcttttagatccagacagcggttcgttcgtccagtcactttcgcaactcaatccgattctcatatctgtttgtgctttcgttttcttgcaggcaatccattcaatcaactcgccgtagtagccaccaatcaacaggatatctctggcgcttcttatttgtaccttcgagctctggccgtcaagggcttcttcccaacagcgaacgagaatctacagcgtatccttcgaaggccgatggaccacttttggaatagattggaagaagtctcccatagattctatcattgggacagtaccactctgctttcgttcaccgaagacttcatagtcctgataggtttatttgtcgttaacccaaagtgagtcctctgcatacgtctcaaaatgctaagttcggttgatcttacagttgttatccttgattctttttccagtaaattcggtgcttcagtcacctactccacttggttcatcgccgaatatgaatatctgcttgggcgccaactgctatcgactgaaataattctacgaacgttcgtctctctggcttctgttcactggagtaaacggatgactcgccgagtgcctcggcttgaaaaagagagcccccacagcactgctcaatctgaattagccatccttgatatcattctcgacatcatcatcgtcaccctcgatattgttgtcaatgatctgatagagtgtctcgacccggtgaagcttgcccgataccacaatcgaaaagagcgcatccttccggaagaattggatgccagaagtaaagaaacattaaattcaaaagcaaccgtcgactccatggatcagttctcaagctacttaacagttattctaagacgatcacttcccactcttcgggtaatctcgaaatggattcggagccatcaatcatacctatctggaataagtcaaaatcagtcgatccttgcgtcaacaagcgatgagccactccggcaacaagtctctggcaaacctccctcttgcgcacaagacactcatcgatctcaggaaaagattcagggaacttatcgagcttacgcggatctacttaacgttctcaacatcacgttcccaagcacggagattgtttcgattgatgtgtcgcttgaagaggattttgagatgagaggatttgggccaactcataaactcatgggcttccagttccatcgaacgggcgatatggaacgacaaaccctcggctcacgcggaggccatccgaacagagaatatctgatgagagtcagtgatctgcaaaaggacggaacgtatgctactaaaggcgatgtgagttcatctgtaacatgcttttctctaagtacctagaagaaggaaaagtgtagaaactaatttgatatgaatttttatgctaccatctgtatcacttgggaaatagacatcggaccttttcattatcaaatacggccgttacgcttatcctcgtatcaaaacttcaaaactcaaaaaaagcaaagtagaggatcgactgccgtcaaatatcaatacacttcacgatgagattaccagagaagcgtggatcggtggacgagctggaaacgtctcctttgacagaacagacctagagaaaccctcaagaatccatgccgatcctcaaaatgtaaaaagtgctgatcatactcctgagtacgatatggtccctcctgccattcaggccgaatctttatcgacacctgatcgatctcctaaaccgatacgtcaccaagggttgtcgaaggaaaaacctttctctcagaatattcggcgcactcacccacctaaggatgtctctgaatcttctgttcctctacctaacactcgatccactgaagaagaaacagtaggcagcttttccaagccccgcgcgagcgcgtctgagacttccctttcgatccaaactcctctcgaatcgcccgtcagcatcgttgacctcaatacattccctgataagcattctgctttcagacattcccagaagcatcccgtatctcctccgacccttccatcagcatccgatatcaaagcagcggacttggctgcctccttacaaaactctctgctccttcgacctgagacgcctgtccaggatgaagagtcagcgtcagtcagcacggggacggaggacgatccggtgaacagggctatgcgagccaccttggatgatgaatcggaggtggatatgaacgagatggagcgaattcgagaagaaggaagatacaatgaagagatcgagttatctgcttggtcatctagtaataccgctgctgctccggccgaaattatcaagtgagttaatttttcctaccctgtcttttcaagaacagattctaaatactgctactgttcatatatagccaaggacacaatctctcgccgtcgatcaacccgacatcatctccgaatgtcgctcccagtgggaagctcactgctctagaccttctcaatcaaatcacatcttcctccggcttacctcttgcttctccacttggtggaatgggaacaccatcgcctcttcaccgccctcaatcgaacctccggtatagtcattctatggaacgaaaggaatccatttgggccccggacaaagaagattcccccatgggacgagatgttattaccccgtcttctggattgggctggtctaaaccaggagagaccacgtgggattcacctggttctatatcgaagagtagctttggaacacctatagggaagaggtcaccctctggccacccgggcttgggaggatacgagcaatcaccctatggatcgaatcagtcggcgaacttttctcaccatttttcttcgccgcatcctgaaacgtttgggcggtccactcaaaagtcgcctttgagcgcacaacggtcaagtttggccgaggttggtaggtcgccaacagatcaactctacggacactttggagggcagagagaccggctatatagtttgcctaacctagaggccggagctttgcctcactcggcttaccagcagcctagacaacaacaacagtcaccatcgtcgtcatcgttttcacctctctctcaccaaactcaccaaacatatgatccaagccctccaattggtctcatgattccttcctactcgtcgtccccctcccgtagtcgtcagccatcccatccgtcccctttaggtaacatgttcacagatcaagccagcccttcatctctgccgagttattcctccggagtttcacttccttctgggccgacggctgatcgagcggcttataacctaggagcatatggcgaccatccgtcaagctcacatcattggggccagcctgcccctgttctgggtaccttgctgcaaccccaacagcagcaacagcgacaatccaatttgtcaggttcgattgaatcgtcggcctcttatccgtccacgttggatgcacaacaagaacaacaacaacaacaacaacgcgtcttaccgaactctcatggatatactcaacagcagtggaacatgcagcgggattctcagtcacttgcatacgacacaacggctgatcagtatttccgaaatctaccacaaccacaaccacaaccacaaccacaaccacaaccacaacaacattatcatcatcatcagcagcagcagcaagaagatgcttcacaaacaggactcggcagaattggacctggaagtgaatttgggattggggcaggcccaggtatggggtatgagcgaccaggaaacatgtggaattaacatcggaaagctttcgtttttgccgcgtgtttttctatttcatactatgctcatgcacatgccctatacagaggagaaagaggaattgataaatcgaatgatgcgagagactgagaaagatgacggaaaattggaatgtgagaacgagacaagaggcacaaggaaaaagattgattcgatggtatgttcgttccgttgatgaagtgttttgaaaatgatatagatgtgtttttatgaatacatgtacaacacatctaacgacaaaaaaacgatggaacggacgaatgactacaacgaaatggaagagactaagaaaaagaaaaagaaaaacaagacaagactggaaaggatgagcatacgacttgcgctcaactctcaactcagaccctcccctcctcttgggtcacttactcaatcccggtcagaaagaacttttgctccaaaatcttctaggttgatgaacgtcttcatctcttttctcatcaccaaaacttccacacataacctctctgaaccgtcttcttcgtcctcttctcttgtgactcggtcctcgttgttggcatcgttattagtattggcgtcagtatccgaaccgacgacggtggcggtggaaacttttcgagatcgggcatggataactttggtcgcatcactcacaagaccagacctaggaagaagtgagggaggcggtctgtaggctctcaagatcggagacggaagtgagtttatatcggatgtgtctgccatggccggggtcgtcgttgtgttgttgttggtggtattatcggtggtggcggtgttggtagaactagatgaatagtctgggcatgagagtgttgacggaaggggaatatctccaggtcctgtaggtgtcgtcaagaatggactttcgatggaattttcttcttcgacgttgttgtcatcatccaacgaaagaggactgagaaacgagagatcgtcctcgaacattctgtcgacctgaagtagatcttttttgggaaacgtccgagcggcggcagcggctttttcggctttcttgagccgcctgatggctgctttggcttcgtccctcgacttcttatcggaataagctcctccgtgtttcctctctgcgcctacaagctcttgatttgagatcgtctcgggatgatctgcaggtcgttcccctaccccaagatctaaaaccgcaaacatttctagatcgatatctctgacgtgggctcgcggtcttgcctcgtttgtatgtattgccggcagaaaggctggttggtgttgcacaggattggagcagcttggattagctttcggattagatgttgtatttgtgtagtcgtcatcatcgtcgtcgtcgttgtctgaatcgaggagagactcaatcttcttcttccggcttgagcgatttgtatcatctggacgaaaggcgcgctcgatccggtttggtccaaggggatcagaggtggtaacagatggtaaagatgaggttgagcccgggaaggttgaccgcgcatgatctgaggatcgatgtctcggtcctctacgtcttcttcgtccgcctgtgccgaatctgttgatgaatctctgtccgtgggtttcggcgttctctgggccccattcaacagcgggcgatttcccgtcgatcgaggcttgatgggctccgttcatctgtgctagctttgcctcccatttcgtcgactttcgctgctctctgtttgatgcagtctcttgcgaggcggcccatttgagccatttgcctcgtttgccggtttcatcgccgaggtcgagtgtgctggtcgacaaggccgggagacggatttctttgacgacgagcacggtagcacctagttcttctgccatcttttccagtgtccggagtgacgacaagagttctgatcggggaagaccaacaagagttccatcatctatgcgcgcgggagatcaggatcgagcgagggttagaacggaggatatgagacagagacagagtggagagactggctcaccaagcacaccgatctcgtagatggcctccccacctccttccaatagtctccactgaagctgagtgacaagccgattgaatctgtctggagtggcggccgagagtttgagtttgtactcgatgtggcctttttcgtctacttctgcactgagcctctgaagaccgtccactggggatgaaccaggctcaagatcggtcgatgagattcgcctcgcgagcgagttgctttttctgatccgaccgccactgtcgaagctgatggcgagctgtgttgcttgatcatcatcatcgtcatcattaacgttggcatcgtcatggtcatagtctccgccttctgtcggtcgtttggacgaaagttcagacaccgagtcatcctctgttgattcttcgagtgactctgccgagggaagcccttcgtcgatatccctatcttcgttatcggattcgaaggtggagaactcggagagcgtgctgtcgagaagatcgcacggaagatagttgatgacgatcgggtttggagtgccgagctttgagcctgggagaggtaaagggtagagaagcaaagaaaaggacggtcagtcgagtcattcttggattgcccgcgggaatgaacatgaaccagggtggacgatgatgagacgaacgagggacgttgatgtacgggttcgaccacggagacgggagcttaggcgactgggacttgtattcgccgaacatgatctgctgttagttgcgatattcgggtcgacagtaagatataatccgagggagagaaggtatgagggtaccgccggataggtctaggatggttccgggcgtggtgtttggactggtggggagccgagatgagacttgatatcgataaaacacatgcacacagaggcacgtgtactgtttatgggtgagttcaacaacagcgctctcaggctcgtattgaagtgatcatctagaacgacggggggagctttgggatgagaaacaggatcgtcgtcgttggaggttgaacgaggattcccccgggggggaaacatccggatggtactgtatcctggggggcttgcttagtcagcggctgcctaggagtagcgcagaggattgcgcgctgctggccccatgggagtatctggtggggatcgtttcagagagaacgggaacatctagagaatagtagagagacaaagcgcgtgtgtttgtgtatgaacagaacaagaagagacgttcggtttgtgaccaggcagaaagaggtgaaagcggtcgttggccttgctggtagagtgccatcgctcggctgcgttctatgtacatcacatcacatcacatcgcctgaagcatggtgagaaagaccgtctttcctttggtatgcgacagttcatggtatacatgatcgcacatttgtatagccttgaacaatggaagacaatgaacacacaccagcagcgaatgcgctcatcctatacaccagacgggttacgtctgtacgcgttgcacataacgatacgctcatctgtggcggcctccctgatactatgttcgccaacatcgtatggcccacctcggtacttttgcccagtagtatagctaataaagtcacttacgaccatgtcgttcctgatcactttgttgcttttgatctttcgagcttcgttttcgaggaatgtgaggttgtgtgtaccaaacactttcagtcgatgagcccagagagtatacgtcaggcctgcctcgtcaggatcgagcccaaattgctcggacaagaagtcaaacaagctcagttccttgacttgggatagaacctgacccttcctgaacatctcgttcagaggcagctggtatgtgtattcatccgaggaacattctgattccgtctcgcaatcgtactctccttcttggtatgcgcaagcttgcgatggttccgtatcaggttgtgggtccatgctagtaatgcgccggagtgtcgagtcagatcttctggccgatagttcgtcacttggtaggagttcggagacgctaacgaagaaagaacaaaccatgagactcgtcagatgtggcaaagaacgagaacgagcgcattccacgtggtagaccgacacaagcctggcggcttggactgatcgaccatctgtcaaacagatcactcacgctgtgtctctgtagtctttgaacagagtggatgaggtggacgaggtggacgagatgaaccagatgaacgcttgcccccaacctggctggaccacgctggggagggtttatgagccatccgaacggactacaaactttttctaatagcgactacaaaacatttgtaatgagcctgacactacaaactttctctaatggccattagaaaactttcctaatagtttttccaccgcctgttttctctcttggccgtccgaccgtcgttcttcctgctcatcatccaaccatcaccccccgagtcgaagcgatcccatcgttcaacattttctagcatctctccagtcgctctcccccagccctcgctcagcccagtcagatgtggtccaagttccaagcaaacctgccaaatttggcaaacctccctcctttgccccaggcgccaaacgtcaacatcgccaacaccttcaagaccacagtccaggccggtcggtcagtatcctcttcgttcttctacaacatctcacacgcttttcttgcttttcgtcctgatgaactgacatgtatctgtgtatccacccccggctaatcaagtgaacgattcggaaacgtctcgagtgacgagatcaccgagcttcccaagggtacatccccgtccagccatcttggtatcttctctggctcggcccgtatctgacctcgtccttctttcgttctccctccaaacagaatacaaggatctcgaggctagggtagacgccctcaagaccgttcaccagaacatgctcaagatcaccaaagtctacgagaccgagtaaggttttcttctccgtcccgtctatggccaagccttggtgtctgctccaacgtgtctgattccatttgttattctcgctcttcgtcttctccctcgtctttccctcacctctgttctcttccttgcggctcggccttcttgatcgttccccatgttcattcctgcctcgctcgtctacacatcatcaatcatcacaaacaaccaggtcgtacgactacccgacccaggtatgtattactcttcaaaccacctagccttggctccaagaaacacgaccaggctcgcctgacttacccgccctcatttctccctacttttccccttcgggatcgtcttcctcagatcaccgagtccgtggccgagcttggtggaaacatcacccattcgttctccttgtttgcccagaacaacctcaaggtatcgtctattttcttctttctctttttcttcccttaaaacggtcgtctatccatgttgtccatacatgacccctttccgctccatgctcaaacaagaaactcataggcttatacccatcctgactctcctcttcactataccgccctctcttcgttctccacgctctttcccatacctgtctcgctctctccactccaaacgcctggttctaccatcgaccccgagcagggaacgaatcttcctttgcccgccccgacagccgctcccgtcgctcagccaaagacccttccccacgcgctctccagagctgcggcctcatccgctgtggaacttggcgatggagatgaaaagctcggcaaagcgctctccagctacagtctcgccctcggcaaggtttgtatctctcgttcccttcggccttccttacgttgtcatcagataccatcacctcaccaagcttttttttttctctcaccgttccatctatcgtctccaggtcggagaggccaggttgtctcaggacgaggagatcgccacccggttccttcacccgtggcaacgcacgctctctaccaccctcaccctcgccatccgagctcgtcagcacgtcaagcaagccaggctcgagctcgattcgtccaggcaggctctcaagaccgctgccgccgccaagcaggagcaggccaggctcgaggtcgaggagaaggaggacgagttggtgagaagaacggaggaggccatcggtttgatgaagaacgttttggaaaacgtgaggattgtcatctcttctgatcatcaatcttgctccttctgatgcttgtacggctttggctcacaactcttcttttgccactttacagcccgaacctcttcttcagttgaaccagctcgtcaaggcacagcttgtcttccactctaccgccgcagaggccttgtctgccatccagggtgagatcgaggaggccgccggaaaggcagagacagagtaccggttcgtctcattcttttgcttctcgtacttcaggttgatgccgcgtacgatgtgctgaagccaatgtttcatcaatactctaaccctctttagaacctacagggcctaagatcagttccctcgtcgttcgcactcacccagtggttctcgtctcctatgtttaccttttgtttaatctcaaatttgtctacagatgactccctctttttttcactatcttcggtcatatatcttcgtatctttgactgaactgtctttcttggtcctcggttctctaactttgttgttttcttcttcattctgtcacttactttcttccggcttgtttctgatctctctgatgatgacaaacgatctttttctctatcctctccccgtctttccctccttctcttttgtttctttttatgctcgcgcgtgaaaaaatatagaaaggataaagtacatgatgattcacaacatgatcaacacctcggctatcaacacaccacaacccaccaacccactcactatcaatactttccaatttctatcacatcatcatcatcgtcggtgatgaatttcacaataaaaggcgagagaacatcgaagtgagcaagggaaaaacagagaagcgcgtgaaaagacgagaacaaggagatgaatgaacacgcactgttttaaaaattcccgagcaccaatcctgatgcgaacccgccaaataaaaagaaaatcaaatcagaacaagacaaaagaagaaaagaaagaaataggccattcagtttggtcgttcctctccactttcgacaccgcctattttcgcttctgtatgatcgtctcgaacgttcctccacagaagaagacgcatgacaggaaggaaaagatggactgacttgatgcctttttgactcaacaggtctttccatagtaaacctgcgagggaagcagggaacgtgaagctcacagcacctatgttactcgccagtgccaacgctttttatttgttcgttccaaagtcaaaaacgagaacatcagcacaagggtcttctagaatgtcgctaacgcgtgaaaaggcttcttacagtatatcgaagccgtcagatgtctctgaggtgggttatatatacttgacctgtccaaccaaaggatcaccaaaagtacgtgatcgaaacatcagtcattcgaaacaagacggctcagagaggagagaactgaccaggtctcgaggatagaactcaggaggatgcagcacccgatgttcgttccaatgatgttgcacagcacgaccgctaggacactcatcccgaacacacagcccgtcgtgcctgttcggattgcccaagcctggtaccaagtcgaaaacacccttccccatccagaggaagtcactccctatggtaggttttcattcaaaacgttttccatacacaaacaacggtcagccatgaacctcatcggacactccgagcggccggatgcgtccatccgaatgacagagacgactcacatcaacgagaatgaacatgcagaacgagaagggcaagagcggaaacgggagacgctgcgctatataggtcacagtgggaaatctccgtgagagtctcttaccgagtgaggagagcgtgacgggtggttgaggccgagagacagatccagtcgataagcccaaagggggcacgatggtcgactgcgtcgttggaagacgagaactagattggtgcctcaaaaccggtttggccgtcctacacgttgtagaagatgatttaaaagaagggtttgctataggtgaatccaatgaaaaagtaaatcaagacggatcgttaattcatcccgttatcgactgactcgcaaagaagcagatcaaagagtcgataagctcaccgacatcccccgtgggttctgcgacttccatctctatcgcatcgtcatcagcggggacagaaggggtttgacgggcttcagatggtttgacaatcgaagcgtgtcgaatgtcgtgccatatatcgcgggtgagcataagcagagccgctgggacagtcacctgatgatttcgtgaaattggtttgacgaaggttgagctcgagcagatcaacgcaaggaagtgaaaaacaagaaaacggatgcctactcacctcccatactcctcctaaaattccagctgcactccctcccaacagggcgatcaatgcagccaagaatatacagcttcctatgattgccccccaaggatctaccagcgctttcctcgcgttgacgtcgatctcttcgatcctctccggaatatcctttcgatattggaaaagagagaggaacatgtaagccgcaatggcggttgccacagtaggtagaatgacccaggccgagtacgtcaaaaaggatatcccgaagctcgacgtgatgacaagattggttatgttgctagacacaagcgtcgctgacgcaatgtttgcaacagcaaattgagaaaacacccaggctgcaaatggttcggtacacaagtttgtgtcagatcctgagcagggaggacgagagaaccatatgcatttcacatcttgggatcgaaagacacctcaccttttgggtctactccgttgactttagtgaactgtatgactccgccgagattcagcttcgagacacgacgaacgtagaactcagatcgagaggaatcttacatataccaaaaaaccagtcccggactgattggtgacatcgatatagtgtgagtatgcgcgatcttagacaaaagagatacaaagcgtctttgaagaaactcactaggatgatggcatcattccccataagctgtactcgaaacggcgattcaatagaacttgtgaattcctttttaaatcgcttcccataagcgcatcatagatcgagtgacatactgatgcgaatatgaagaagaacccaaagaatccggcataaagcttccttcctgatggtccgcccttttggctgatcttgaaagcgaggtatcgaagaagaccggctgagatggatagaattgtccttttgatcagtcttagcaaagcgactggatggaaggagaaatcttactggcgtccaacgagatagcaatataggccaagcagataaacaaaagcactgatcccatgaagaaaccaagtatgaaaatttcagtccgaattcaagcacgtttcagcccaaaattgtgtacttttccactcagctccctctcttcaatatggaagacaatgagattgaacaaactgatatcatatggctttaatccatccggatcgcctacgatccctttcttgacggtccctccgtcgatacttttgcttgccaaaaggaccagcacaccgatcaaaggcgcagagaccagtccgaaggtggcccgtcgtggtttatggagatcacatattccatccgagattctgagtacagatgatacccaacagacgcatcgggtgtatagtcttgggattggaatgcgaagtggatagaccacaaagatatctatcagagacgacccagacgaaatcgatcgttgtttcatcagcagtgattcgaccttgggttgcatccttttgtggagctaacgcgtgaagaaaaaactctagtcaacctcaagtctttcctatagactcactaacgacgagaagaatgatgagattggctatcgagtgtccatctatcttgccatctgtctgaggtgccatctacagcaagcacgatggtcggttggtttgattgaagatacgaaagtctatctttccgatcgtttgcaggtaaaacaaattccataatcttttgatcttttggctctgttcaaaagccggttagtcaccgctcgcacgtttattctcttaatctcttcatttctatatctcgtcgcttcattcaaagaacggtatccatcccagcgagcttcatctttacagccatctatggtagtcgatcgcaaccaagggagttacacgagtacagatagatcgagtcagcaaactgggttgattttactcctctgtcttttttttttgacaagaagaacagtgtaagtgtaattgaacaccaacctcgaacaagtaatccaagcattcggcctgggtctttgccttgtcccacgtaggtcctttgtagaacaatcaagaatagatgcgccaatttcaggctggtcagttgagatagaagaagccatcagatcactatgcactcaccccaaacgtagagtccgtgtcggcgcaccaagatcgcaggggctatacaaagatacaaacaggtagcgcgaaaaaacatgctcagttcatgagagtgaaagcgtagcagagctaagaaatactgcataccgtctgggtatcgttccatagcctaaccagatggattcagaagcgatcgagtcatcagttttcagacccgaaaccttcatcgtatcagacctgtgcaggaagagagaagagtaacgagctgatacatacctccgccatagagtctgtcaaatcttcctcatcaggagtgttttcgatgatagggatcgtcagggtatcgaggaatgaaagcgtcttgcccatcccaccgattcgaacgcctttgatcatctacaatgttttatccaacacatcccataccgatgaaagttgcgttcgagagaaagcccaagaaggaaaggggaaggttgaatgaaagcggttttttttaaaaaaaattaaactttaaaggaagaaagaacgtagcgatcttacctcctgatgggagatcttgaactcgtttccagggaaaagcaaagtgaccataactgatacatgttggcagtgagcatagattattcggcaagtgacatcgtctcgacagggtcaagtcacagacgagccgcagacaaatgacgtgctaacaacgggtgagaaaggaagacctgataactcaccggcatgctgcgaatgagtatggatgcaagcgccagcctctctcagtctgaaagccgagaagaaaagcggacagcaggcagactccttcaagccagctgtcgtcggctccctcaggaaaactcgcttggatccaggtcgggggatcgtaggttggggataggggaggacaaagatgtgctccggaaggattttctctttctgaacgccggagggagcaaggaagaccttgtctctatttgaattcatatcggtttgtatgtgtgtgtgtttgtgtgtgtgtgtgtcacattggcgataatatagagagatgaccgagagtgagtcaaccgacaaacaccaaagaacaaaaagctcggaaaaaatcgaatgcaacagtgaaagcagtacgaacccgtcccggatagagattcctcccccagttccagtgacccagcccaatgtataaaactgagcacaaagcgaagggatcaagtttgccggctgcatgaaggatcatcattccgttgagatacgatggtcagcttcaagacttgaaggaacattacctctcagctgacccagacaatgtatctaaggaccttcaaaacggtagagaaacacgtacatgattgggatcatctgaccttacgaggtcatccacatcccgaggagagttttgagaaacggccatgtcaatcagagagtcgagtgtctatatagattggattgggcaaatcgaaagagaaaagcagagcaattggaagccccgctgctacggaggaaaaaaatgggcgaaaaaaaaagaataagaaaattcgtctgtcggccaagaccggtccatttttggagtaacaacaccaaagttcctgccaaagagtatcattcttgcaaaccgaccaggcaaaaagtccaaggcaggtcagaagagtcgagaaaaagtaacgaacatatgcatggcattatcagacggtggatagtaggaagcagatagagtggtggaaaatttcgaaggtcccacacataacgtatgatgtataacaagatagagcaaacatgctcttcagacatagctgagatatatataagagacagacaaaagtcgaagaacgagaagaacgaagagagaaggtctgtatgtacaaagtttgaatattcaaaatgttcaaaggcggtctatgagatctagatgctattcgacgtctagaaagataatagagagcgacctgaagtgaaagaagcgacgaaaagagcaagtagaggtctaacaaacacataagtgggatggtaggaagcataagatatgaacggagagtatgatacgagatgacgttaatgatcgacacgaccggtcgagtgtccaggaaaagagaacgacgtgacgaaagagaacagtaggggaaagaaaagacaacgaattgatgcaaagtatgacacatagagaaagcaaaaagagggtttatgctctggcaacagcgacggcccgtttgaacccgctaaatgccttcttccaacctttgcctttggtctcgggtgattttttatccacctgtccagacgagattccaggtttgttatcggacgacggggtatgaccatccgcgctttcaccagagatgtgggtcagcgcgtcagagaacgaatcgatcgacgctgtctccagagagagcgagttgtaagagcagagggatttgagggttggctgcggttcgacggatcgaagaccactttgtttagcttcagacgttccagacttcgcggaaaacaaggatgagcttgatcgggcgtggtgcagcgattgaattgatcttggtcggtgtagcgaagtggttgaagatgatggggatcgacaaggaaggaccacgctcgaggcggccgaggaggatcgggaaaacgtgggcgcgctgcaagcaaaaggtgaaaggggatccataaggattgaatccgaagactgattgctcgactgtagggaagctagcgaaggctgttgccgcggtctctctaatggctcgacggcccagatggaagctggtcggggacgagctggggcgtgggtagggacagctttgccgagaggtgctactggctttggcgggacggcaggaggtgagggaatgactgtgctggtagttacgctggacaaccttttgaaagaaaacctagacttgtttacgggcttatcctcaattaacaacgtgtttggccaagacgttatgcccggtggacgaccgtcaaatgaagtggatcctcttgcgtccgatcccgatggctctggagaagatggcggagtgattggacgtataggcgagaacatgctgccgatcttaagagtggacttctttcgagagcttccggcactccattgaatagtctgaccgacgctgtgaccgctgacaaccgagtctgatctggatcggtgtccgacgtcagacgagtctggtgttggcggctgctcggggtctgaggtcgactcttcttcctcttcaagcacgctttgaatcagaggcgaccgacggcgaggtccggtttcaaccgtcagagaaggagggggagttagagagctagacgagggttgaacgaacgccgagtttgccgcgttggatggcgaggggccggcggcactggtagaatgagcggaggcgagtgacgaagctggacggtgccgcatgcgtgatcgggaagatttagatttcgttgaaggcgttgtcacgtgctctctgcccaaccgctctgtcgggacagggggcaggcttgatggacctgcgaacccgaatggattacttgatgaattcgtagagtcctcccatccgttctgatgcatggacgagtggagcaggaggatatacagaacagggatagagggatgcgacaggacggatgaatcgaagtcgaggtggggccgattgaaacataccccaaaaagaatgaattgaatatgaagaaagaaacgaatgaatgcatgcataaatctaagatcagtattgtccggaggctgatcgctgcatggttaaggtggagaagagaaataactcaccatataggcgtccgctgcggagagtgtacctggtaggaaaaatgatggagcagaaagcttgatggtgaacggcaagaaacatttgataggggaacagacggtgagcgcacgtacggaatgatctgaactgagggtttggcattccctgtaaggcgcaagacgtgatttgcaaggtcatagacaaggaaaggcatcaacggagaatattagatggtcggggaaacgttgacaagaatttagcttcgggcacagataagcctgccaagtgagaggcaattgggccacgaagagtcggactaattctagagacgagtgcgcaccttgatggcttcctcaacttcacgccattctttgaatatgccaacagtcctgagagcatagtatccgttgtgttgcattatgtagatgaggtagaacgaccgacctgtaaggaaaagttgagtatgagggagtggagctgtcgagaaaaagaaaggagcgttcggtgagggccgatattccaggtagtatatgcgcggcagatcctgataccaatgtttgaggctgcttctgttcaaaagaggaaaagtagatgaggaagtgcgatgggaaacgaaggatggttgacagaaatgaacgtgtagatgattcgaatgtcgtcaagggaacacgtagacggtgagtgtccttgaaggagaaagaaagaagaagaagaaggagtgacagatttgaagcgtgagaatccaaaggtgacagggacaaaaaagagggctgaagaaaatagaaaaaaaaaaggaaagaaaaaaagaacaaaaaagaaaaaggggcggagcgggcgccgaaacataaagctactgaggcggcacgcgagaggaatcgcatgtccgagacaataaaaagaaatggaataaatatatcatcaaaaaaggggttcgcgtgggagaagggaaggaaggccgagaaactatatcgactgggatagccctgatcttcccggcagcgcctcactcatgttcgcgtccccacaccttgctcggtgttcggcgactgcgcgtggttactaacgttgcatgtgctgattagattgtgacagtcgatcgtcaagaaacacgttagagtgggttgatccatcgatcaacattctatctattcttacagctcgacttgatagtcatcgtggttgtcatcgtagtcatttccgactgtcgtcgccgcctcatccgcttcatctgctccacgtcattccatccgaccaaatacttcgccctgactacttccaccacatcgttcccgtcttccgtcttccgtcacccatctactactttccccttgatcggcaggaactggtcgactcggatctacttcaactcccttgcccggtatggtcaaacgagagcgtttcttccggaatctttccccgtttgaaatcgtcatcggcacgaacgctggtaacgcaaccacagccatttccccgggtggctcggccactctcggcttgaagcatcccgggccggatgccatccgattgacggccacacagctgggatcgctcacttctcccctctctttaacatttacactaaacaagaagtcacgaccgtcatggacccaattggatgcctgtatgaacgatgatctctcagatagaccacccagtgtcgcaagcgaggacacattgaggccgtgtgtctggagacgtctcaaggtctttcagaaggtgagtcgttatctttcgctcttctttggttcggtagatcaatcttaatctattctttgtttactgaacaatttacgccattttccatcgtgcgttgtttcatacagggacaagaactcttggcactgtcgacacctcggcttgatggctggatggcacacatgccagataccatgtcgcttggtgatatcagcctgcctgggacccatcagtcaaccgctctctacggagttccggtcagccaatgtcaacagcccagcacgcctctcaaagttcagctggccgatggaatcagatttttgggtaagttagcggcagccttgaatagtattcctcgggacacctgtgttgaacaattggtcgttcttccaaaacagatgtccggctggcagagaagaaagggaagctcatcgcttaccatggcattcgtgagacctcggctcatcaagttggatccaatgctcacactaactgactagttaacttcttctcatagtcacccagcgggcgaactttgaggatttgctggccgatgtgaaggccttccttcagagtccagagtcaaacagagagacggttatcatgtccatcaatcaaggtggcgcccctttgtttcttcatttctattcttttctttctttgttttcgattatttttgtataattcttttgatctgataagaacggtcttgtggttctccggattgatctgatcgaccaaatagagaacgcgtctacagagctatttctcaccatactcaaaggctacattcgggcatctgatccttcactttggtttctgggtacctatctctttctttctcatcttccgaatgaagaatataccacagattgactttctcacttccttgttctccttacgctctcctccgaatagccaaccgaattccgccgctatcacaagttcgaggaaagattgtgctgttctctcggttcggaggggacgatgaaagttggaaacttgtcggtggtagagggattcaccctattgattggccgaattctgtccaggaaggtttccagactacacttccttctcggccggctggtgaaaagagggatgatagtgaggatgataactggggtcgtacgttcggtgtaaacgattggtctgtccttctctttttctcgctcctattctttctttccagttgatttcttccccctccctttacgttttcttccttatgctcatttgcgctcgcaggtacgacatcaatacaattctctccatccctgaaaagacagacacaatccaacgcacgctatgcaaagaatctgccctggacgggcatatcccactcgtattctgttcggctagttcgttccctctagcttttcccgtcaccgtcgctagaggctttggctggccgagatgggggttgggcgtgcaaggtgtgaacgatcggatggtcggctggttggttgagagactggccgctggtgccagtcgattgaacacaaaaccaaaagaaaaagagaaagaagagcggaacatgaccgcaaacgacgatcggaaacagtccagtcagatgatcagaggatggatcctgttcgatttctataggtcgccagatatactggtcgataccgtcgtcgcactcaacttttgttagtcacaacgggcactaaagtcggcctttttggttggcgctgtctgtttgtgtgtattcttgttgttttaaatactgtaaccacatatctccttcatacagaatgtccatttttcataactcaggttgcgttatgtttgttgatctatcgttacagcgaataaaagacgagaaaagaactttaaagaaaaacactagagtgtatcaaaagtcaagtggatgaggggggaaaagctatttctgaactgtagagaacaaagagagaaaggagaagaagtagtggtacaaaaaaaaacagctttgagccctctcgtccagctccttagctcccttctagagttgatgagagaatggattgacaaggaaaaaagacaaaagacaagataggaaacaaccaaactcaatctgatcggtcctgttcgtcagttaaagctttctccacgtcctccttagcgagagaactgtacccgctcggtctaggtgatcccagggcggcttccttggatttcgcatacacgtaagcacaagagcctagaatgattgcactgatcgaggctcctcgaccactaaaatcgacaagccaataccgagaggtaagaggggaaggtagatgttgacattgtcagttgagtgtatttgtatgcgcgtgcgtatagatatagatacttgtatcgagaaagatgaagaaacggaacgtacaggttgatgatatctccgaataaccagacactcacacccgtctggatgacacctcgggcggccgagctaaccctataagcgttaacattgattccggtgatcagttcaaagtatttctggatctcaaagtcgatcaaggacgggagaaagagaacacgctgggaaagcttacatgtgcgagactgggctggtgactttgattgataacagtccggcgagacagatgaagaatccccagaaaccctgatttacaaagagatggataagaacggttaattcaaattccactcagcatcatgtctggtccctttcgtgttccctaattgttgagcatacgagaaaagtgactgacggtgatagttccaccccagatgaatcggttaagcaaatcaggatccctccaagtcctcatgatttctggtccttcaccgatcatcagactaataggcaacaaggcgatggccgagaggaagtttgagtaccaagcgagactcatcgtcgagccatcgacgacgggcaagctcgatttgattgcgatcgcgtgacaggcggtcgtgatggacgacagtacaccaaacatgacgcccatcctgaaaaaaatattgttgaggacaaagaagctgagttcagcaggatgtttgtgaagagggtctcctcatgagtgtcaaagaggagcttcttacgggctgatcgagttctgagcgtttcctccccagatgatgccaataaagaaaccagagctgacgatcacacaggcgacgagcgcattcctggatggaagactgtggtacgcgatgaatgtgataagaacggtaagaggaaggaccatccctctggcgacctgagttgaaaagaggaataatacatagtgagtctttctgtgcgcacgagagggagaaaaaaaagaacaagaaagtcggacaaacctggtagaatgacgcatccacatattgaagcgtaaaattattgaagctgtgagtaaccacacaccaggaggaagaaaaagataggggaatgattttcaatcggacagaaggtcagtagagatatttgtgtgcatatatatatatatacatatgtcagaacgaagggttacttaccagagaccggtaacattcaatgcgagcaatttccacagtccctttactgtagcgagcgacattttggggatgacaaacactcgagcaaagtgactgattaggaggagaacgacggcaatggccaactgaatgaccaagaaaaatactggaatcgatgttttgatgagaacctatccgatggatgaatatgtgaagaggcaaacatgagctatacgactacgcttcaggcttgcagtctcgaaacagagcttacccatttgttcacagtcaccctgagatgaatcgacaacgaaaagagaaaggacatttgtgtccgtttgtgagctgagatacactccaaatttgatcaagggtacatttgcgatttgaaggagtgtgcgcacatctgagcaaaacggtgaccaacattccacatcaatgagcatgccagattcacaagaaattaaagtcaagggcaactcacaatgataccagagatcatataaaatgtgacggtggcaatctggagagacagtgttagacaaatgaggctcaaaatgagagattgtaccttggcgtttctaggatttcaaaacttgaagtttgtcacccaataaaaagaaggcgatggcttaccaccaaagccctagaaggggctgattcggattgtgaagacattgtctttttctcaaactgaatgataaaaggttggtgcaatcggaaaaaagtagcaaagttaacaggttgcttctcgtctatcagaacagcaaagttggatgaagagggcgttataacaagaaaggaatgaggatgaaggaaagagaggaagaaggcaaaggatgcgctcgatttatattgggaacaagggatgcatacatttccacgttgtatgtatctctccttctttcttcccaaaacggagcgtgttcagcaaaacgggcggtggaaacgagtccttgggaaagagaaaaaaaggaatgaatgaaactatattggcagcgggctgggagtggttttactgtggggttttgaaacgagaaagacgaagaaggacgagggaccggccagagaaaggctaggtggctcggaacaacgagagatcaaagagagcattggagacatgcaatatgcacgtacaaatactgatgcacgggcaagctgaatgaaagaagctatgaatgctatccctgacggcttgacgaggcttggacgacggaagagatcgattaggtgagatgtgcaccagaacgatagaatgaatttactttcgagcgggcatcagagtcaggctcggtgtgcatgcatgtttgagtgtgagtgttgtgatcgcttaggtaagctggtgcattgctgctgcataacacaattggatgtcactcttgatgtatgtgatcatctgctttttgtgtctgcgagggtgcgttcgtgaacatctacacacaattctcagtacacatcctatgtcttctgccaactttacactgttagatgccgatgaagaggtctgtcctcctgtccttactctatcggattttattttcaatactttttttttattttcgttgaaatcattctgatcaactacgcgacactcatgtcgccgtcttctcggggagaaattacagctcgggcaagccgataaccgtctagagttcaagagtcagtatcatgtcttgctcttttctttatggaaatggagagatctagaggtcactaacagcaatggtttctatctcggctgttgaaaattgaaaaggttacatcggtcagacatcttctagcgtgccaaatgaattcgacggacagaacagaggtgacggtagacaagataaccgatcggccggaggtttgtcttatgtgatcagcttgatatcatagtctctgtttatgtctgtctgatgttggaacaaacaaacaacctgcgtttccaaacaggtctgaattcgacagccttcaacgtagagtattatcagtatctgtttgatatagagctcaatgagcttcttcaacgatggtgcgtgtcaaagggaggcacgaaagagagagagatacacaggggatttttgtcaactagccatcgatctaatacacgtggtttacgtacattccagctggaaggcagtcgtaccgatagcgtctcaaccgacaggaaactttgtgcaggacgtgtgcgatggccggcctgatctatacggcccgttctggtcgctcaccaccttggcctttacactctacgtgttttcctcactatcatcctcgatctctgcctacctgacggatccagagattcctgccgcccaagatatcggaaagatttctctggccgctgggctggtgtactcttatgggattggcttcccggccgtcatgtgggccgtcgtcaggtggttcggcaagggtgaggttgaatggagtcttgtcgaggcctggctcgtttggggatgtgagtcccatgattagtcttttcccttgccacagatcgcgccagaacaacactgattggagaatgagagaattttccctcatttgtattttgctttgacgacagactctatgacggtattcatccctatctctttcctgtgcatcatcccggtgcccatccttcgatggatcctcgtccttgtcggagccggcacatccggttggttcctgtgagtctttcaatcccgtcttgtgttcgattgagattgagtccggcagaatgatctgaactgttgaaatctgttatcgtcggttcacgaaaccctcggcatttaggttgagaaacgtgtatccggtgttgtccgctttagattcgaaacttcctcggttactagtgattttgatcttggttctccatggagcaatcgctttgactttcaagcttgtctttttctcgtgagtgctgtcgttttctgcatctttctctctttctcttttctacctttgtgaatagtctttgagtgtttttctcattctttttataaatctggttgcttatttttcgggtgccaaacacacacatatagctactctgtcggtggcgttcaaataggaagggaaccgctagctggattgaatcctacagattaagattttggtgaacggataccatgctgattcattcttctcgcctaccagggggaaagtatctatgagggcggggagtcacatgatgttcaaataaagaatcagtgcagcatataaagctcttttcatagatgcgggcagatgaaagaggaaaaaggcctcaagcgcagaacgggaggaagcgaggaactaggaagaaacaagcaccgacccacaggcgagtgatggagggctgtacgaggcgatgcatggaatcgaaccaaaaggcgcagtcgtcgacgacgtcccggtatctatcagagagacgtctcagtctgatcgaaaataagaataacagatgggcacgagatccagatcttgtccgagacacacattctcagcgtcgagactgacaatgaaacacgaactgaatagatgagatgacgagcctggttactggccgaaggagaaaaatccgaagaatcacaaaacgtgtatgcatccaacgtaagcttacgaaacgagcgtgcacaggatttggatgagcaccaagagagagaaaatcgagtgcatattttgatcggccgatcagaacagagttttctagtgcgacattgcgtaagctcgacaacagaagttactagtttgaatcgtcagacagttgttaggcatgatcggcgcaggccgatcggagaacctttctaatcagtcaggcacgtcacagtcatctcggtcaagtcacaatcactttatccatacaatgtcggacagctattctcgagtgtaaactcccttttattcctttctcttcctacttctacccaccgtcccccactgtctattctttcttccacctatatttctccttatctgccccccttgcccttgtcatccctttgaccctggtccctggcccctagcctctgacactattttaaccggaaacgttcatggatcgacagtcgccctggtcgttatagcattcaatcaacagtttccccagctgagtaaatccacccgatcggcctcgtccgggcatcctccaagtctttgatcaatcacaccattcgccgcgccaaggtgactcgtccctcactttctgactgcacagacctcgtcgacaacgttccactcctcactcgtttttttccatctcgcctgtctgtcttctctgcaaaagaccagggatttcagaatacccatacacacccatacatccaaccactgatccttgctcaagtagtcatcatctgagtgtttcaatccattccacctcaccctagtttacaacatcaataacaacgaagacgttgacaagaacaaggacaaggacaagaatcacaggaaacaacaaggaaaacaaaaatatctgctccacccattcctcgagaatactccaaaaaaaaatgtctggctatcagaccgctcgatctgtacgtcgacccgactatctatcgctgtcggacttgactcttttgacctggctcgactgacagttgttgttggtctgtattttcaaaccgaatgccgaatgaatcagctacctactatcactaagaacgaccctttgtttggttcatccacctcggcgaacagactctgccttgggtttgacagcgagccaagaaagtccgcgccggacggacaagtaggacgaaaacgaagactgatctcgttcgaagatggagaggttagtgacatgtttttatcttctcttttcccatgtcttcttcgttcttcctctggcttctttctttctttactccctcttctttctagaatatgagctagacgttgacgacgcatatatacttcttatatattctcttctctataaaagacaatgcccaccgctaccaccacggcgtcatcctccctgtctcgtactcaaaccgagtcaacctcctatttactgagcttcccagacccatttcattccatcccattttactacgccacccctccgataaagcgtcccaatcagctgtccgacccgaccgcttcagacaccgtcgttccgaactcgttctcctctgcatcctcgaactcgtctttgtcgaacgtcagtgactttgcacctcgaacgccgaaagaaatcgtccgacaagttcgtcaggtccgtccctcgatagaaaagaaggacgacaccacagacaccgtgtccgactggctctctggcatggatggactggacgagagagaagccacggccgaaactgaatcgacgcggccgacagaacgtccgtcccatcactccgccatccaccagaccggtcggggcagaaaaggcggccgagatttctggtgaccgatgttcattgtaggcacggtcacggggtcttctttgtttctctgttcttctattcgtttttgtctttgtctcttttccttactataccttccatttttgtccatctgtcgtcacgttctgtatccctttttttccctttttttctttccatcataccaaaaaagagcaagtcatccacttatttattttcattttgcatatcttgttcattccgttggaattggccatgtacacctactttcgtttctatactctctcatttctttcccccaaagttgataccttgcttgtctcttttcgttcgtttccctttgtttgtactctggaaacccctttctctcccttctctttctcaacacatatttcatttttcgctctctgtgacccgccttcattcgttgtgttccctcgacgttgtacctgtagacgatgcatggcctatgttctttctcatatctgctttactctgttaggtgcaatcagttgaactaaggaagttagactgtcggaaaatgaaactcggcccggcccgaacttgccgagacggtaatagcgttggggtttgtcggcaaaaaaagtaccgagaaaagaggcagtaataagtgagcgcggtgtaggagataagccaggagcgaggactgactcactctttcgtgattctcatgatagaacggcgaaggaagagaaagagaaggagaagaataacagcggcaacatcagtatcaacggcaagatcaatggcatgagaaagagaaagatacagatcagatcgacagaaggccaaactgcatagattgccgataaagcaaagccattgagagagtgtacaatagggagaagtaagaaaaaaaaagtgcacagtcgattaaaatcaacccaaccgccttcggggttttatcgtcgtcaaaagcgcacacgctcttttctctctctctccttccctctctcttgcgtcctctctcacctgaccgattgcagtagtgtatcttagatcattgatcccttatccttccctatctcctctctacgatgaacacaaccagacggacgttcgccacttcaacagtcagacgattgtcatctgtgcctaaagctcaagtacctctcaactcgaatcaacaggtcgccagtcagatgtcaaaatcctcgtccgccaaaggtatctccatcgagtcaattcggtgagatttctttttcttttttctttttcctttttctttctcttttctctctgttctcctttcttttctacatcctgttcttcagatcgagtcggatcggccttgtctttcgtgttctacgtcgtcggcgttagaatccatctgggttctcgtctctctttgctcctctttcagctcgatcggtgtcaagaaaaaaagggttgagagttcgctctcttatctcattcttttcttcccatcacttttctttccctccgcttttttcttgtttcttgactctggtgtacgcttcgttgggttaagaatgcgagacgcgatgagattcaacgagtgatccgaatctaaactcgattttttttcttcttttcgtcatcctttttagacccgccgtgctcaaagtagaatacgctgtgcgaggagctgtcccccaaaaagcaacagagtacagcgaaaaactgacgtctggaaaagggaaagatctgccgttcgacaagattgttcatgccaacatcggaaaccctcagcagaccgggctggaccagaagccgatcacctggtggagacaggttcgttgctcgagcgttctatgtctctgtcatcttgatccatagctaacctgacttgtcactccatcggacccgtcatgaatagatcgccgccttgttagaatacccagcattactggaaaacccgttaagctcccagatattcccaaaagacgtgatcgaacgggcgaaagagttacaccatgacattgggtccgtcggcgcctacaccgggagtaaagggctagatagcaccaggcaacacgtcgccgcttggttggagagttcgtcgtctccttttgtctctttgttcagttgatcagaggcgcctgacgcgtaggcttttcctctcttctgttcgtctccccttcacactacagaacgagacgggttccctgcaaacttccacgacatttatctgacggccggagcatccgccggtgtggatcttatcatggatgttgctgtttgtcagggggacggtgtgctgtgagttctttccgtttggcatatcaagtcagaaagtccggttgtagaacaaacctcaagtgagcagaaagagactcaaatagaaaacgcctttgttcttgtgttcttgggtcgatctttatcttctgatcctcttatataggatccccatcccccagtacccactatacacagcgacgctcgcctcgcaggaagcagtgccgttaccctactacctcaacgaagaaaacaattggtcgtttgacaaacaatctgttctagaggccatcgagaaagcaaaagcggacggaacaacggtgaaagctgtaggtcccaacttttgtcaatgcatcgttcgaggcgccgtctacgaggagattctttttttttcccaatcttacaatctcttctctcgcccttcccttcaacagctcgtcgtcatcaaccctggaaacccgacgggtggatgcctctcgctttcggatatcaagacgatcatctcgttatgtcaccagcactccatcctcctcctcgctgacgaggtctaccaggcaaatgtgtttgatccagagaacaaaccattccattcgttcaagaaggtgctgatgagcatgacggaagacgttagatcatccgtcccgctcgtgtcgtttcactcgatctcgaaaggttactctggcgaatgtggtagacgaggtggctttttcgaaatggtcaacattcccaaagacgtctccgaccagatcttcaagatgagctccgtcgcgctctgcccgccactctcaggtcagatcggtgtggactgtctcgtcagaccaccgagtacggatggagagagttatccgctttggaaggaagagaccgatggaatattaaattcattgagggaccgaagtctatttatgcgatctcggtttgataaactagaaggcgtcagctgtcaggaagccgaggtgagccccccttttctcttttttttttcttctcatactcttcatcctgcgcgtgatcattcaattctaacaactttatcttttcttgtctctgctgctctttccatcatcacctgttctctttctcaaaaagggcgcaatgtacttgttccctagactgaacctaccgcgcaaagcaatcgaggccgccaaagccgccgagacgacacccgaccagttttactgtctcgctctgttagacgcaacgggaatctgtctcgtccccggtgacggtttcggccaggtcgagggccaggtgcatttccggacgaccgcgctcagcccgggtgtggagagctatgtcgagtcgatcgaaaagttccacaagaactttatggagacctacagggatgactgagcgaactcgttctcggactttctttcctttttcttttctgattcttctccctttttcgacctgtttcctgtcctgccatctcggttctttttcatgccctctggatctctccgtccgggcttcctacttttttttttctttctctttgctctctctctcgctctcgcaataacacaccgatatgcttgcttgcactttgtatgatctaatccccactctccctctcctcccctgccctcccttccgacaccctttttcttctatatttatctcactataagtcgatctgtaaatcaagaaaacgaaaaaagggctgatcgagtgaatcgagttatgatacca

SEQ ID NO: 236 - DNA, 9095 bp, Xanthophyllomyces dendrorhous
gaaaacaaaacaacgagagcgagagggagatcgaccaatagacagattataaatcgataagcgagttacaaggaagaaaaaaaaagaaataagaaaaggaagataggaaagtatctgattagagaagaagtggaatgcggcaaacagggcaacgagggtcagacttgaagaagacaagtcttgagagggagcaatattgagacattgactagcaaaaatccctagaggaatgtatcgaaagatggtcaactcatgcatcaggccttgttggcagtcctggccgagctattttaatgaaagccaacacagaagattagagaaaaggtaaagaggattcacgaattgagctcgatatcttgtgaaaaaaaaagaagaaaaaggatgacaagaagaaaaaaatgaatcttactcgtagttcttcacaaaccaatcgatgctggctttcatcgcctcctcgaacggagtgaactcaaagggagcacctccattggccgtcatcagcttttggagtttctcgttggatgccttttttgaacgtttacaatacacaaaagacacaagagtcgcgtcagtttgatcagtctttgtatccgtttcggtcagatctaaaagatccatgatgatcgaaagatacttacaggctttcggaattggccatcagatttggtcgtgtcgaactatcaagccaaaaaagaggaaaacgtcggacacaatatcagcttcagtccgttccagtccaagacgaccgacttggaaatgtgagaaaagatattgaagtctttaccgagtactctccctggaagtccatgagcttgacgatagtatccgccacagtcttaatggggatctcatcgtgctcagcgactgtaatcaacaaagagattgtgagatgggcgtagatatcgctgcgggcaaggacgaattaaaaattcaaatctggcatcttaccactcaaaatgaccgggtcgatctcgttgtactccctcaacgtccagatgaacaacttggcgagatcccgagagtagatgaactgtcgaagcggcttgccggttccgtagatggtgaaaggcgtgttgttttctagaccaccaggaagggtcaagaaataagttcaaagattcgatcagcttacaggcgcaacgccatgcgaccagccaaagatcaggatgaaccgatagtcacgtactcttggccaagtagcacttgtgaatcaatccaggaataacatgcgagtcctctagatcatagttgtcgtgctctccaaagatgttggtggggatgacggaagtaaagttgtctccgaactgatcgttgtaagcactgttccatgacgacgatcggatgtccatccgttaacccatcactcggtatacgactgcagctccagaaaaatttgtctaaaaattgaacacttactggttctgaacgtcaaccagtctctttccatgagcgtaaccaaagttgctctgatggggaggaccaaggtggactttggtctcgtccaatgggtactcgactttgtcggggaacacacaggtcgacagacaagagatgagcttctggaccttgttctggtgggaagtctcgagtacattgtcgttgatcaacaagttctctcgaaggaatgtcaacttgagtcgcatgtttctgtggcgagtatatcgtcgatcgatcggccgttcagaggaagaagttgagacttagtagatccaatctaaccagatctgataggaatgattgaagttacaaagtagggctttacctgaaaagaccaccgacaagagcagccaactaaaaccccaaccaaaacagatgtcggaatatatgagggccatgctttgagtctttgtcaacatgtgaaaactatctgagaaactcacgtgaatgacatgagtaggcttgtacttctcgaagattgcagtcacagcagcggggtctctgtttagagaccatgaagcaaaaaggtagaatcggagacgtttgtcagcggtctttcgaacagttcacagtcttgcctaagcgagattccaactagagcgattcgatgatgccagaacaagtcatagagagcactcacctaagatcaccatccttgctggaaaggaagatccactcttctccttcgagcttgccatatcgacttcctacaggctcattcgcgagaacatactgaagagcctggccaacgagaccggaaccgccggtgacaagaacgatctgcttggacattagattctagactgagagagaggaaagagagaagaagaaagaaataaaagaaaaggtgaaagcaagatgccagtcggtgggagagaatgaaatgaaagttggaaacatcccgtagatggaatcgggcaactttgctgactcagccacttgccgggcgggtcatcgtgcatcccatcgggattgattcagtatcatacatgtatatatccagtaacattaggcaaagaaactcgatgcattcattctcctccttgcatggccttcttgattctcagacagcattccagcaaatgaagctcttcatccccaccctcgcataatgctttgtcacactcagccatcgcttgggccgctgatgatttcggtcgagcagggatttgaggatgagtgatgattagatcgtgcatctagacggatcacaaatcacgttcaacatgatgagcttggttccgagtagcaatcaggacgacaagcagaccgtaaagaaagaaacgcacttgggataacaccgtgtttgcactccaaccctctcgcttaactctcttgacggccttgtgaacttgttcgaaagttcccttgaaattctttccgagatagcctccgtcaacctcgactccgatagaagccagcacaaaattaacaatcccgtcaggaacgtttccagatatctcttgaactatgtgtttgaatcaaagcaggtgtatgacaataacgatcagtggcaatccaggggaagctcaaattcatctcgagacgaataaagcactcctgcttcaactgacctgactcgcgagagatcggagttggcggcgatgtggctccgtgtaggcgcgaggccgactgaagaagagtgatcgctcgacgtaaatcacctcctgatagcttgataagaagctcaatcactccgtcatccctaatcacctgttccttttcggcaatcatcctcaacctgtcttctgtgctgttgatgtcgagagctctaaatcggaactttgaacaacgagaagctagaggctcgataatcctagcgcatataaaaaaacatgacccaacgacaatcagaatcctgacagcagggtacattgatagtcaatagcagaattgactaaccgagtgacgtagttgcagaccaaacagaatcgggtgatcttggagtaagtctccatgattcgtcgaagagcggattgtgcatcttgagtcattgaatcggcctcgtccagaatgatgattttatacggagggaatgggtaggtctttccgtctctgtagatgatatgtatataacgttgatcagaaagcatgatcaacaggtatagagatctgaaacgaataactgacgaagccacagcattggtattacgaggtgtctcttttgcaaaagacttgatcttctctctaaccacagagatacctcgttcgtctgatgcattcaactcgagcactctcgtgcgaaacgagtcaggtctaagtgacgaagaccaatacaacacgatttagctcagatccatcattcaaacatacatagaaagcttacccaaaaagctgtttggacaatgctaggatagtacttgtttttccagttccaggaggaccataaaagagcatatgagggagctacatagatttgaattttgcttcagcaacctgtactgggcacatcatgttgagagaacgagatgatagaaaagccatacattggtcgacgtcagtgtcttctgaaggacagcaacgacgttttcttgactggcaacatcatctatagttttcggacgactagatatgtaagcaagtttatgaccaaaccatgataagcgtccgaaatcgatcatccgaatgtacacaaaggagaatatcacttactatcgttcaacccaagggatagactcgttcgagacaaagtgcccggtctgtttcgctgtcgaccgatcaactctcgtgacatcctttgaagcttgaggcaagaacatttttgtcgatgccattatacgatctccttgtgcgacaactgagcagggctagaaagaaaagagagagtgcaagcaagacgacgaaggatctttcggacgatgttctcaaatgagaagagcgaagttgacgcgtcagagaaacgcgtaactcacgtcgcgtaaccatgctcataaaacgcgtaaccatgatccctcgagacgcgtctactgggacgcatcttggttgaactgattttccatatcatcaacctcaatacgttatagatccatcccaggcctgctcgacaactcgatcaggaaactatgagcccatctccgtccaacgcggtagcttcgtcatccaaacgaaaggtttctggtaggtctttgcggtttttgttttatgttgtcgaaggtatcaaattcgaatgaacagatactcaaataaggtgctcatcttttcccgggtttttcttctttttgtttttcctgatactttgtttggtcgttggttctgtaattccgctttgttctttgaatgaactacgacgatttggaccatacagatgacagagcaagcagtccatgcgatgtcattgttttcagtcctgagaaaaaacctaaattcacttcctcaatcggttagtcgtttgatcctcagtcgcatgatacgtcaggatcaacaatcaaactgggatcagaatatcatttcttctgaaatttctttctccgatttgcccatcgatgcttacatcttgacgttcttgtcgttccgatctctagtcaaactgcagggcacaagattcatactttctcaacgaccagtaccatcacttctatctcatgcgacttcgtctttgaaaggtgacctcaactcaagcttcatcaattgactatcaggattcaaccaattgaaatactgacgcctctttccttttcttcttcttttctttttgtggtgaatactacagagctgctcgagtggaaagaatggcttgcgtcagcgtcggaagatgataaggctctagggatgccgtcacgattcattggattgatagtgaagctttgtcatgaaaggtctttatttgcctctcaattctttacttctcaactctttccgtattccgatgtcgcgtgtcaatatatgcttacgcgctattctacttatcataacctcttctcttgtctgaattggtgtctacgttcaatcaatcttctcatccacagcgagaagaatgtttcgtctctctctcgatccctacgcgcagagctcattccggcaggcactagcgatcacgatccgaagagtggcagcacaggtaattgatgtccaacaccatctccttcaagaccaaactcatcgcgagatctacaagaaattgaaattaacaagttcaacgggtttggcatgttctcaaaatgtagcctcagatcccttttccttcgccaaactagaactcatcattaccgcccatctaacacgcacaaactacggtctgacacccgaagacgtcgatctcgctcctgattccaaaatgcccgctgtacgtgtatcggctgttatctatattttcctaaagtctcaacatcatgcgttcttttctgacatcgtgcgcgctcaacaggggttatttgtatggcgatgggaggcaaatggccgtaaagaacaccttccagcagactcactggttcaattagaggccagatttcaagagcgcttagaggtttgtctatatatcacataagcttgttgatctatattgcaagtctgacatagatccattgtgcttttgtcttcattaggtcagagacgcttgcaagtcaatctgggacaatcttgatcaactggaaaggacccgaattctatcaggcaacccatctggaggaaacgcaaaggtatgtcatcgaaggtgttctgtagagaccggcgtacgattaatctcattccgctttatcgtagacaaaggagaaggctggaactctgatagcgaaagtggtcgagcaggtagagaccaagtcaccttcacaaagcccccgcaagaagatgaagaaactagaggtgcagctctcgtctttctatcaccctgacaacgttctagttctatactgatattatcattctttatccaacaacatgaaggatgccgagaaagaagcccagaaagaagctcagaaagcagaaaaattggcagagaaggcagcagagaaagcattgaaggtaaggcgtcttgtaataattccgatcgagtaggcaagctggtgtccttacgtttgtctcctcttcctttttgcataggatgccgagagactagctagagtcagcatttcttattcttttttgtcatcattccacactcttcttcgcaatgctggttaggaattaattcatatatatttctgaaatacaggaagcggaaaaaacaaaaaaactggcagccaaagaatcttctctccgagacaagaaagcgaaggaagatagagaggcagaggtaggctgtttattctttgtctcgaccaaacgtctagtgaaattaaattctgtcgaccaagctgatctatcttttcaccatgtcgatggaaatccacaggtgaaaaacaaacaggctgctgccctgagatctttcttcaaaaagcccgagccagtcgaaaagccacttcgacaagcaaccatccagggtgcgcatcacattttgaccaagttttcgagtcgacgtaatgggcggctgaacttgcattctatcttttcgataaagtttccgactttgaaaagacgtttttgccttttgtacagaggaaagacgtagaaatggcacccatcaataggtttaaggtggaaaaggataacatgctgaagaacgggatcgaacttagtgatagtatggacgtagatatggaatgcatgagcgctcgaggtatgtcggcgtgtcgatttaaattgttcttctttatcttctagatcttggtttaatgttcttgaaacctgtgtattcgtgaccacttactttcctctttccctcttgatcgttccaaaatttgtagaccttctgagcagctttctctccggtgtagcaccatcgcgcatacctcatcgtgttgtttatccgtccagcgccatcaaaactggagcggtgaaactatcggtcagagacgttgtggctcaatcacaggatgcggagatagcaggtaccggagaccctcatcagatcacagcccagttaagtaatcaaaggctcttcaagagaaagttcttgcagttcagggaagatattcgaccggcatactttggttagtctgcattttcttctgatctgagttgggttcttgctctttcctccctctcgaagacatcagctgagtggctcgtccatattttcctgtaggtacatggacccaaagctcaacacttatcggacctagaacgccgttcgctcaggatatgactcactttgactactcatatgattccgggggtgactgggaagaagaggatgaggatggagaagacgttcaatctctctccggaggcagtcctagaccaaagaagtctaccggaggcgcgaacggcgccgatgggacgatgtgggatacagattcgcaggatgatgatttcgatggggacgatgacgctgactccgaggacgaagatgggttctttgtttccgatgatgaagctttagggggtccagatgatgagattgcgactccggcggtggctgttgtagctacagaggacgttgagggagcaaaaagaaggaaggagaagagtacaaagttcaagaagagagagattcaaccgctcgtcccggtagttcggggtccttactttgaacaaactctcgggctgtgcccttcggatatattccaaggctatcaaatacaattcctcaatggtgtgttttgttcctcttggtcacttttatcaatataatcggccagctgcaggaaagctgactgacggtaaatttcgttcaaactgatctgatatgaaaatgactttcaaccgacagacaccccccttggcttggatccgttcacttatgtggccgagtctattcgcccggctgctcgtgtgcaaaattcatcatccgctgccaatggtttccaaaattccctcaccaacggctcatctcatctcaatggcacaatgcctcctccgtctaccacttcctctaccactaacgccgccaaccaaacccattcatcagcgagtttgaaaacaaaacagaaaccaaagctgacgacacatccgttatcggtgtcgcccatagatggaaattcttcctcagtacagaacctaactgcccgaccacgcgcgccgaagacgccattcccgacccaatacttggcacaatttgtagagattgtagctcgctcgagcaaacctcaatttttgttgttggcagatcttcaggaggctttcaagtcggctgggatcacgaaagtccaactaacggaggaactgaagaagagagcgaaacgagttggaaagacggatggaagtccttggaaagtggtcgatgaggcctgggttagttctctatagtcatttggtccttaggagatatgttgattattacctctgatcgctttctctttattctttcggtgatgatgatgatgatgatggtgatgatggtggtcagatcgaagcaggtttaccgataccctcgtagggaaaattaacgcatgtctctttgaaacctctctccaactatcttcttctcttcacgtttgtctgttggtcgattgccctgtcaaaaaggtcgatatcctgatcgccatttcgatcctccttttgcatccttcgcttcctcccaatagtccctcctttcctttgcctgatctcttggctttgccctgttttccttttttttccatttcttctgtgaatttttaaagtgaacagtatatatgtatatg

SEQ ID NO: 237 - DNA, 18341 bp, Xanthophyllomyces dendrorhous
atatatgtatatgtacaatccgagcctatcatccaggccgactggcaacatgaaagattttgatccaggcgtcgcttgcagggttcgataataaccgatatgataaatttttatatgtttttttttacacaagagatgcgaccaagtcaaacgtttgaaacccttataacccaaaaatgaagaagcaggcgagcgaaaagaagaaaagaaaaagggaagcaaaccctaaagcccaaataaaacgaaacaaaacaacagcaaaaaagagatactgaaaagcaaaaacggaacggactagcgaacggtaaacgatggacgattttgatagcgagaccgaatccacaacgaacctgagcaacctgagcatcttagttttggttaaactgatataagacgacaccgaaaatagacataacgaagtaaaggagaagaaagaagagtggcgagacgttccagttttgggtggattagtatccgacaacaccgacgctgaaacccttgtagctgaacatgatcaggcaaacgggggatcaaagcgcaaaaagggacatcaggatttgcggttgatggaaagagatctcaaacgcgaacaaggaaagacgagaagaagaagacatacaaggcgtgctgctcggtcgagggagcccactcggattcgtgaccaccgaagaaggtctgtacagaggggcgtatatcaatctagtaagttttccaaatttctattggcttgctatggaccccaaagtgagaagaagaaaggagggacagtacgtacagagacaaaggttcccttgaacccggcggctgagttttctctgatttcgaggttgtaagcgctgatgacttcctggtcgtcgacgatgagcttgataaacccgttgttctgaccgacatcgttcagtcggtagtgttgctgaacggtctgccatcgacctgtaggcacagcatgagaagaacacaatgatagacttagcacgctttaaatttttacggagaaaatccaaagagaaggacaggctgaacgaaccggttgaccagtatccgtttcctcgaccgaagcttagaccgtaagcgtcgttgttgcaaacggcgccggatccagaagcctcgcacgaggccttgttggcgtccgtcatgggaaggtaggtgtatacctccatagcgctgtgagtttgtcgaggaaagtgtgaaggtcagcccaacatgtttcatcagaatctgacggtgagtacacttgttgggagagaaactgacccattggctcgccacatgagtcggatagtgtagcaggtatctattagggttcggtataatggatgtcagcagctgcggtaagaatgtagactaatgcgtatgaagagaattgagcgagaaacgaacctcgaccaacttggcttccacccgagcaagtgtagaatccggaggatccaccgtacattccaatcctaccagagaacccgggaagacacgttagtagagggaaacgaagagaaaaaaaacgtattcagccaatcaagctgagaagacgctcacatctttcctccgagaacccaatcgaatccgggggcaaagtagactttataggtcaggacgatttcctttgcgttcttgatgtcgtcgctccagtttgtgtagtagctcattccagacgcactggcagccacaccagccttgtaggtgaccgccagagcctgggaaccgtctggtgtcctcttggtgattgaccctccagctttgccgaccgaagcctggagggcgttcgctagggtaactttcgagagcgaggaggatccagaggtggtcgttctgaagccggagaggtagttgaagctggtagctcggccatcaagatccgaaacttctactggagcggcgagcgcaccaagaggagaaagtaaggtagcgagaaggaggagtgacttttgaacgagcatctgagtaggagagggtcggtatctttctggaggatattcgatgaggaacgaaagagggggaagaaatcgagggaaagcaaagagagtgggtgtattttacagagaaagaaggaaagagaggagagatttgtctcgcccatccgatcattttgaacgttctcgttgagttttccgtctcagacattcattgcgaccccgaaaggcgcgcactgtttcatcggagggacattctcttctatcccgtgcacgtttcgacaccgaacctaacgatttcgggtagtaggtgttcggcctcttttatttggtattctgagtttgccttcttccttaggaaacgtgtcttggggtgtgagcttgagtgcacccgcgtgcgctaagggtacgggtgtgcgccatatatgtgtgttttggtaccgaatgtttgtcctattcattctgttgtttactcaggatataactggaaggagccatttgttcgaacgatgttcagcctgcgaggaaggcggaggcgggcaagctcaggcaccggggcaccgggactccaggactccgacagaaataagcactgtcggcgtttagtacggtctggaacttgatattgttgggtcagggactaacccgggccgatgaactttaccccgccatcccacgtgtaattggttggttttaattatgttgctagtcaagtgaccggaagaacgtgaagcttcatttataccgtatagaataaggacgacccgctttatatctgctctttcacttgagaccagtctgatgggaataacgtgatatcataacggagtaagacaggaaaagaatgaatcagaaagaagaggaagaaacaagcagcactgctgtctgtattcaaagaaacaaaaagaacgccgtccttcaaggacagacacaactcgactttacaaaaatcgaggatcaagaaaataaaagaatcggtagagcgcagactctgtcttatcaagtgatgtgatcagaagaggtatagaaagagaaaagagaaaaggtttcgtgaatttcctcagatctatgcgatgactccgacgctgaagtccttgtagctgttggaattgtagatagaacagggtcagaacgatgcttccaccgatacacacatgaaatgcacttactatgcatgctggtccgaagaaggagcatactgagacccgctaccgccaaagaatgtctgttcataattaatttcatcaaataaagtaacggtctcagcacaggtgattgagagacaaggcagtgtaggttttgcaaaatcgatacttacagaaacgaacatcccttggaagaaaggatcgctcgtcgctcggagctccacattctcagcgtcaatcgtctgaactccgttgacaacgagcttcatgaatccattggcagatccaatatcgttcagtttgacatggatctgaacagtctgccagctccctaaaacaatcatcatccagttcaagattttagaaaggaaccagttatcagagtcagcatcatgttgatcaactcagtttaggtggtcgtcttcagcttgccaacaacaccatcatgaaagaggcacgaaccggtactccagtatccgtttcctcgaccgaagcttagaccataatcatcatttgtgcacaccgagccggatccagaagcctcgcacgcggccttattcgcgtccgtcttgggaaggtatgtgtagatctccatagcacttttgatgagcaaaaacagaacagaaggtcctccacaaccatcaatatgaacgttcaaacgatgtagcattttcattctcttgatgagacttacccattggtcctccacatcaatcgaattgagttacagatgtctatagaccgatttaaccagacgagagataaattagttccagggccgaccacgacagacctttcttgagagaaaagaacctaaaacatacctctgttttcctgagaacctccggagcatccatagattccatcttgacctccgtaggaaccgaccatctttccaccttgaacccactggaaaccatctgtaaagtaaacagaataaccgagcacgatctctgttgcgtaacggatagaatcatcccactttgtatagtaactgatcccaccggaactaccgtactttccacccagataagttacagctagtgctgtcgatccatccggggaggatgtgttaattgtaccaatctttcccttggaagccttgatggccgtgttgagagacacgctcgtcaggccagaagtcgaggtcgaagagcacgtccatccagacgtgaacgagtacgagctcgcagatgacacagccgatagagtaacagccttggccgtagaagcagaagcagaagcagaagtagtataagagcttgattgagtattgatggtagaagaggcggcagtagctgtagtagcggcagccatgggggtcgtcgtggccgaagcagcgttcacggtcgaagatggctggacggcagaagacgcggctgacgaacatactttccgctttgagactctcttcctcttccgctcgaggtgcttttcccgcctgaccacatcttctttagttacgtagttctcgataacaaagggttgagctgcccgcacagcttcgttagacttggaagcctccagggctctcctagggtgtttgtgctgacggaacagtccgccatgctggaatgatgaagccatgatcatcactggaagtgataaggccagaagcgagtttgacacgagcatttttagaattgaggtatatgtgagaaagagaggggggataggaaggagtgaatgaagggatgacaatcaaccaggatcgtctgaggggagagagggatgggtggacgggtgagaaagagagagaagggagaaagaaagaaagacaacaatgacggaaacctaatcctcacgcagtcagccgtcatcagttttgttgaacgatcgtcttaatattctctccccccttgcgagtctttctctcccatgccgttctcgctcacgatatagccggtttacactgttgtgccgaggagatagttattccggaaaacatgtatcatggcatcaaagttttgctccgaactccggccttgctctcctagcctccctcttcagtcgttctctcatttccaaccaccatgcgacccctatttctttcccttcgtccccaagaccatcactgattccgttccaaactacttcgaccatctcttcccgtcgagatgtctgaggtagagtgcgcgagaagattatgtcctctgcttgagccagaaactttgtcaagagtgggaacggtatcgtaggcaagagagagagatatactagcggaagcatttggtcatcttctgaaagactcgctcgatcggtagggatatccgggaaagaattgacaatcttgtaaaggcaaacttccacgactcgagaagattctgaggaggctcggttaaagagtatggtgaacgcatgttggacttgttcggtagagagacgcttggcgagcgcattcttatcagacagaagaacagagagcacaacgtatagcacatgtcaacacgatattgacacccgcttgacgacagaagagtgaacgaaacaatggaagaaagcggacttactcttatcaggcagtcacagtatttcagtatcagttcctccgacccggacgatatggcattcagatcatcatggtcagacgaccgtggaaagcgtagtcttccagagaagatagcaagcatcaccgaatgcgaagattcaaacacatccttggatgtgtcatcctccaaatatctggctcgggatggacatgaggaaaccccaagatgaaattgtgattcagcaccctatatcgacatccaaacctgaagtccagacacttacggataaacgttgggcaggatgagttctctcaatatctcatccttgaacacatctaccccaacgaattgttctacaaccaacaaaagataattgatccgagaaacctcgcctatctcgcccttccggacaccctcgcgcagagagcgtatcattgaagtcctttgctccatcgaccacagcggtccacacgccatatcaatcagaccccaccagacatttccaagtccaacatgggtagaaacccctccaagcttgtcgatcagagatgcggatgtttgaaacgtcatcaacatgtttttagacagcgtaaatgatgccaaggaaggaagagaggatgaagcgataaggtccagcaaggattcgtgtattggaagtataagcgaggtgagcccctcttgatatttctggttgatagctaagtatcgaacaaaattccatagagatgcgttaacgagatctttgttttcttcacaaaggcgactacgtaaatatacaaacctgttgtcgagtcaaccagcgactccggagatattgataatgcgtattcttgtaggcgttcgcttagccgaacaatctgtcgggtgttcacagacgatttttctgaaagagacagttcaaaagtgctgatgactatccggatcagagtcaccaggtctaagtattcgagggggtcctcgacatcgagagaagaaggaaagagatctattattgtggtgaggatatccttccgataataagagagtaatggagttgacgtcagtaaaagtgatgaaaaagccagttagagtggaacctggcttacattcgtctctaaggcagcgatagatgtcaaatcgatctgaggtaacacagatgctgccaggatcaccacaggaggcagacgatctgatgacaaagaagatccttttagccataagagcagcgcagtacctatatacacgacacaaaaagacacgcataccagaggccttccgctttccaagggccttcataccggttttgagcttctgaaacccaagctcgattgcgaccaaaacctcgacctcgacctctcttctcaaccgggcatcctgttgctcaaggcatagtccctcccatagaccaatcagagcagctagtttggaggctgaacttgctgtaatatcgctggaccatatattacagagcgttcttgcccattcggtcatgctctgattagaggagtttgaccaaagattgaaccatccgcgtgaaggtggagggagagtgagcctgagagagacagccgtctgaatagcctgacggagaagactgagattagttagagaatgatccggttggatgatatctttagcccaaggaacgagatcctgtgaggcagctgttgccagttggtgaggaagagtagatagtattgccatggatcgaatgtaggtagtgttgagcaagaagtatgcatgtgtgtatgagacagaaggtgatgaccgggttttgagactttacggcaacggcgaatagccggccgcaagatcacgtgatcttaagatgtcgggcagaactctcaacccaaaccgtcattcttcttcagagtcccatcaaccatgtttactcctaaagctcgtctagctcctttggcaccctctgagtctgatagcccttggacaagaaaactaaagtcttctcagctatccatagttcaatctgcgttcgatcaggccgttcaggacgagacagcgagccatcaatcgatatgtatgttgctcttaaacgcctgtcaattggcctcatgaaggactgatcgtataacttgtccggatggtaccatacgtttctgtgatagaccaacacttcaaatctaagctccctgagagtctcatactggatgatgatgtgaatctcatggctttgacggatctttgcgacgtactggcgttgcagcctactacaataacagatagcgcgcaagtccgaagtctattatctccagcgcgtcgtttttcgtatcaggcacactaacagtttgcgtcatggtcgaacatacctctagaattctttctcgaattcaagatttggttcagcaaggagagtctctgaatgaagcgctcctttgcgctcaaaaagctcagtccatctcacagaaggaaggtaagagtttaacagcacttaaacagtcgttggtacagtaagtgttatcaagcacctgtcctagtttttgcgaaaattgagttcatgtcatcaactacccttacacacacatgtgctttgaaactctagcctcgatcaataccttgcttcgacgcattcagccacaccatcaacaagtgcctctcaggaggctgctatgatagacttaaaatgcaagcaatatgaagaggagaaagtcagtttttcagttctctccttctcttacttatccctgcatacctttcactccaaaataaagattctttttgaacgagtttgtttctgcctcctcttcaaacaggataaattgctttttagaacacaatccgactcttctcttagtatatccaatctcttaaccctaacacaaactctggaaagtgtgagggccgacaaacttgctttaagggaaaacttggcaaagttcaaagacttgcccgccgtgcgcttctctttgtctagcctatctttgtcatacgagatctgcacgtgtggctaaccttttcttcatgatataccgttggattttgatggctacaggacctcgatctagctgctttacaggttgaagaaggacgacgcgaattagtgcgtcccgttcggccaaatacatatttcctgtccttcctttaccacatcacactacatactcaatctcttctttaaccgtcaatttgtgatgtgacaggccaagctagaaagtcttcgggacgaaatgaaagctcagactcgaaagctcaggatctaaattcaacctgtagttttggacgacgcatcttaccgaatgatacgtcaaacagactgcttgtcggtcaacaagcaacggtggagactctaaaaagttaacctctcgatccataggttcccgtcggagccgtttggttttagacagaggatttttaaggttgcgagattatgttcacgagagtgctctccacacacatatgcgtcctaagtaaactctctagccttctcagtcaagtcctattcaatcagacaaaactcctgtaatcgatacgagggtagtttattttatatggtgtaaagagaacagaagggtcatagtcgtgatatcaaattatgtcaatagaaatgcctcatctacggctctccttcaggtctatagcttgagcgtaatgtcctgagcttatactcgcttcttcccttccccaatcttcttaccagtacccagagccttctttcgctgggagatcatgtatgtgtagagagcgtagagagctgattgagatcacacgaaagagtcaaggtttcgatacagtagagagtgaaccaggtcagaacagagcagaacagaacagaacagaacagaacagaagaaagttgatggaagctgaaaactcacaaggaggccagactaaaagcaatccacctcgaacgagatccatcatatcccagccttgaccgcccatcttcgtagcccaaaatccaacagaagaagcagcctgacccaaaccaagggttttgaacacctgtcgcacgtgaggtccaacgataggcaagttgacagcaggaggcagcaccgagtaagccaagtagaactcagatccagcgccgaggggataaagaacatagaacaaagtgtatctgcaaaacgcgaaagtgaaaatgaaagatgagcgcatataggcaattgatgcgattaaataaaagtcactaaccgtagccagaggagggggtacgattcaataccgagaagagagaaagcgtagaacagatatcggacgatctcagcgcacgaccaggcaaataccattgtagtgtacacggacgacgtccgagccttcgtcagacagagtgatagtaaagagtgagtcagacaaacagacgtcgagaaaggggttcaaaccatacaatctgacagtggcagacatcaaagaaatgaggaaggacacttacagactcaaattgctcaacaacagcccagacactccaaagcctgctcgccacctgactgatcgtcgtcccaacagggctccttacccagcccaaggccgaatgaacgacctcgaggactgcacaggtctgcacaactgcagtaagtgttccgatggacgcataagacccctgtagtcgactcttgactatctcggcagatcgctgtgtcttggaagcgcttgtctgagccgaggcaagcgacaaataggcacgaagcttggatagggcagtcgtaaccggggaggtcgactgagaaggatgatggatctcagtagaagatacatgttgaacgatgaggacaaggatggagagccaagctgcagcggacgcaaggttataggcaacgagatagtacttgacgataggagattgagctcgagctaaagccatggtcgacgagaaggcagataataagatgaaagggaccatccaaaaggacatcagcttcgggtggtatcgacaatacaagtcaatgaacggccaaaggataacaagaactaacctttgttggatccagctgtctgttttctcctatcagcagtatctttcacactgtccttctcgatgatgcgagccatgaggagcgaatgttagatgggggtgatggttaaagagtcgaatgagatgatgaccgttttgaaacaagtggggattttaactggctaacttcagttacataaaacgactcctactaccttcatcatcactcgaagcacatcagcaggcactcatccttgacatctcttctttcagccatctacatcgaatacattcagcattgtattctgggcaaagtctcgtgcgtatatagttgcatgtaaatcgttagccggagctcaacgaagacacccgtaggcagtaattaattctgttattaacaacgccgctattcagatccttctctcgacttatctccaatggctctcaaacgattgcgctgctttgattgtgcttctttgcggcctgctactcgcaagttctctgcatcttcctatacatcgtatactccttctccgcccacaccagcctttccgtactccgcacccgttccccatcgggccgtcatccgagttgcaggcaaggacgctaccaagtttctgaatggattggcggccgttaagattcccgaaacgatcgagggaagccggtcattctatggaagcttcctgcatgctcaggtaagtcttccatgctgtttcgtttttcttctgattctcttactaatcacacatcatggcttttcttgatgaatagggcaggatacttcatgatacattcatccacctgtgtcctacctcgaatgctttcttgatcgagtacgacgttcgatcacccacatcatttctagagtctatcaagaagtttgttcttcgttcgaaagtgggcctgaaagatgttagttcagagtgggatgtctgggcagcttggggccaccaagatgctctggagcgagccaaaggaggtcagagagcttggaaatggggaaacggagctagcgcggcgttgaactgggagactgagccggaacgattgagtgatcctagcgagaatgagacgggtggatgggacttaagagccccaggaatgggttggagaggtttagttaagaaaggaaaaacccgtgagtcctttgctcatcgacgaacttttcatcagtctgatttcacaaccttcaaatgattaatttttctcatgtggcaccatacagcctctttggctgagacggggtcgagttgtcaagcaacagatgcgtatacccttcatagaatcatgagaggtgttccagaaggagtcgatgatctcgttcccatgtcatcattaccttcggaatcatgcctagattttatgggaggaggttcgttacaagtctttgcgagactcatctcgtttagtctattatcatggttgaaatctgaacatctgttgtcctttttccttctttttctattttcttttcaaaaccgtagtggacttcagaaaaggatgttatgttggacaagagctgactgtccgaacgtaccataccggtgtaattcgaaagagaatcatgcctgtacagctgttccctttagacaaatcgtacgaggttgactgttctcaagccatatttctcggacttctttcgtgtctggtgggccctatgagagaaaaagctgactcccaatcaaaaccttgcgaccccccttattcaggcctccctctgacctaacacctctgccaggaagtttcccccatcctcttcctacagcacttgatattcggctcaacagccttcctacctcggacacaccggatacgaaaccgtcacgaggtcgatcgtctggtcgactactctctaatgttcagggtattggtctggcgctgcttcgtcttgagcaggtccagactgtctggcgaggagagggctcaatgagtgttgtcgattccgaagggaatacatttggcgtcaagcctttcaaggtggactggtggccggtagagaaccccgaggaagggcaagaagtcaagagaagcgtttgaatgtggattatcagagatttctggcttgagagaaggaaatcattatatcaaacgactcttctcagtccgaatcttctatgatcttatattaaacgcccaattgatccatcacagcttgtcgcaccctgcgttcgtattcctgagcgcggatgaaaacacgtgtacatacgtatttggaaagtggtacattgtcagttgataagaaacaacatcttgggacttgacggatctaatttcagggtctagacatacagccttgttatctcgataaagtttgcagcagtcaatgttggctccagattcgacgttgggttctagatcatacgttcagattcagattagcgccttgtgccgcagataataatcaactggatatagaaggaaggcgtctaacctgctagcattgagatgactgaaagaagaaccttctccacgctctatgtagaggttatatcgcaggcgaatcagtgtgtgtttgaattgattacgaaaagatcgagacacacctgaatcggactccatctctctgaactgctctcatagccgtgaggatcctctccaggactatgcaagatggagatgcacacttctccattttcataaactgataacgtgacagaaatacaagacagagtgtcagaggacaagaagtaaatgctgtacaagcagtgcagaaacccaccgtttggatgtaagataggaggatcaaacttcatcttgaacggattcagcggatagtccggtggcttgtaagagtttcatttgcacataaagagaaacaaccaataaatcgatgcatcgatttcatgagttaaatatatcattctctgctatcatatagacaattagcgagatcttggtttaggagagcaatgaagcgggcctacaaagctaagcctagcaacaaagagacctccctcgtaaggcgtatcctctggtccttgtataagcgcctcccattcaaacatgtttgactgagtagggtcaagagcaggagatagagattgatatcaaggacaattagatcagtaagcgggcaatccaaactttgacaagcacaagacatacctcggtgattggacctgatcacatgagcgatgtcgccagaccaggagaaatgccacatggtgatcagcaaatcaagctcaaaatcatcgatagaggataggctgatatgagctactgtattacctgcggtgaagagaccttcgggtgcgcctggaagggacaatcgtacgcaacaagacaaagaagatagcatcgtcaatatcagaataacttcctggaggcgagaattagatgcgtgtaccaacccgaggaagtaagctgtttgtactctgtcatcagcctcctggctgcagtagaagattgtgctttcccgatcatatgcaatatctatatccgatgtatgagtttgatggaatgtggtatgatgtaccgatgatggacggacgactgatgtgttgtccggattgctgagaacatggtcacgtgactttatcgggggtaaccgcctggacttcttattttttctcaagttgttcgtggccgtcaagtttcgattctccgaccaacccaaccccactccccacgcatcctcccctccttcgcagactttagccttttactgcgaggtttaacatctaaaatggccacctccactccttctaccgttcccgtcacttctcagaatgacatcggtctcggatcggtcgttgttctgaaccagtatcaagaggatccttcaaacacgaaagctcaggatgttgacggcaagaccgacgcttacgtctcgtcctccaagactgaagtgaaggacgagcctgctgatgagcaagttgctcggcctaaactcgtgtacaattcttttggagctttctctcggagcttggtaggtttcatctctatctttggcgagcatgagcactcttagatcggggttccttatattcaacctctgtttccatttccacaaggtctctcgactccgttcggtcttcactcttcgattcacgttaagtctgcttgctggacaggtcatctcttggtgcagtatgtgccacattatgtatatcatccgaaccataaatcttttggtcgtggatctcaatcggcctttttactttgtctacccagttacatcaaccaaccttcttactaccaagctcgtcaaacggaactttgctattcctactacccagacatccttcttgtaagtatgccagtcttggtgggaagacttacattgcgcatattctcacacgggtttcctctcggttcatgcttctaaggtatttcgctctctttgtagtctacaccccttacacgatttatcgatacggagtaaagggctggttcactcttttgtataaagacggatggaagtgagtctggaagtttcttcattctgaatttcaaagagaagaatctgacatttcttctcaatgtgttcatcagatatgccctactcggtgcttgtgatatggagggagtacgtcagctgttgtgttctctaaaaatagagaccgccgcgaataatcacttacaatcaacgtctttagaactttttggtagtcaaggcatatcaatacaccaatctcttgtcttgcatgcttctcgatgcttgggtgagccttgcttcagcatcattcaaatcatatgcgcttctgttcttgaatgacctgctgatagagaatcaaaaccaaaacgaaatttgtaggccattcctgtctgcatgttctttacctttgttttcatgaaaactcgattcaggtcagcgattccatcttgttgagttactctgatctcttttctcactcgagtctcattattgtaaacagatgggcacaaattattggaatcttcgtctgtatcgttgggcttggacttttggttgcttccgaccaaattaccgacaaggactacaaggcgctgaacatggccctaggagacggatatatgatagtcggtgccacactttatggctttaccaatggttagtcgtatagcaaatccttctgataggctgatacttcacgcacagaactatcagctgactgcataatctgaatattcagctcttgaggagtttcttgttcgaaagcggccgttgtacgaggttgtcgggcaacttggaatgtggggaatgatttggaacgccgtccaatgctctattctcgaacggcatttgtggttcgagactacgtgggatggagccaatattggcttcctcttcctctacacgttctcactattcatcctgtacacgttggctcctctgcttgtgagtatctggcatttggtcaacctagatagaggttcgatgacaacgaatactgatgtgtttcgtgttcttgatgttccgtttcgctagtaccgatcttcgtcttctgtgtactagtacgtttcatcaagcatgactgttggctattctgctgattcagattactaatctaatgttctcgatataaaccaaacagcaacttatcgctgcgtaagggtttgatctcatctgacaaagtggctatgttcagggtgctaacctttgtctcaacttgcagttacttctgatttctacggactccttattggattatctttgtactcttaccacccctattggttgtactttgtcgctgtaagctccgtatcctgacttctccttcctagctgtgtttgtaattctcaactcgcccggcttcttttctttatttagttcgtcgttgtcatcgttggtctaatcatttacttctggacgagcactccggccgagcagggacaactggatgtcactcgacccgactacgtgaaccaggtcttttcgcccgagggtgccagggtcgctggattcgctcccaaaggagatcttcgaaacgatcaagtctagaaaccctcttgtctaatttatcagatctctaacttgggagcctacccgaccttgtctatacatcatggtctccttctcgctcagctgttgctttaccttccagtttttcctctccttaaatatatatacaaacatcattgtctcatctatcttcctctaatctctctcggatgatatctctgtgatgaaatgctattcagtatcttgcgacacaaacacacggttgccatcgaggtggtgtgcagcaacaccgtccgcttcggccgtgaggagtggtcgcccgagaaatccgaaacagtcacgtgatctcgacgcacggacctcgtttcctctttgttcttgcctcgccttttccctctttgccttttcacctctcgctcatcacccagcactcaccactgtcgtccatctgtcctctttcgccatgatctctgtctctctcgtcggacgaagggctatccctcagttggctcgatctccttgtacgttttttgtgttcccgatccctcgtggacaaggggaaagacagagaatctctagacgagattatgtccaagcgagccaatcacatagagctgatattgaccctctggatttctttttccctatgttccttgctcttgtcttggatgtccgtgtcctttgtgtttatcctatcctgttgtatgccttacagactttagagcccttcctgctctttctttccggtaagtgcttttttcccttgcttcttctctagtttcactttgaagcgtagatattttccttcatcataaaggagggatcgagtgaactttttcacctggaaaagaatcatcatcagcagatcttggccgacacttttcattcacaacatatcgaggaatcccttttgactcgattgtatctacctttcctgtctcacgtatactgtattatatatagagctctttcctccactcctcgggcaaaggccgctgtggctcctatcgagcgactctctatcaaggagaacgaggctttgctcaacaaccagcgactcgtccgaccgagctcgccccacttcacgatctaccagcctcagatcacctggttggcatcgattgctaaccgagtcaccgggtgtgctctttctggtcgtaagtcgtgttcttatcaaattagacagagctcagcctcttatgtcttggttcttaatcaatcgcttatcaccttttttttcaaaatcaatccgggtctttggttgtttgtgatatgagccagtcctctatgtcggagctatcacttacattttccacccctaccttccctgggctgattctgctcaccttatcgatctcgtttccagtacgtagcttggtgttcttgagcaacgattgaaaaccgagctcaaacgtgtctaatccttgttttcgattgctgtagtcctccccagttggttcaagtactcttgcaagtttatcctcgccgttcctttcaccttccactccttgaacggaatcagacatttgctttgggataccggattttgtacgttgctctctgtgttctgttccagaaaccctattcgacaagaatcgctgacatgcttcttgcacgaatacttttgtttgcccatttgtttgcgatatgtcagtcctcggcatcaagcaggtgaacatgggaggttgggtcgtcgttgggtcttcccttatctctggtctcgctctggccatgtggtgatttgagggaacttttgatctctctttctctcttcttttttgatatcttagctttctccccgtccccctatatattctcaaccgcattatttcttccccccccttttttttcttttccttctttccgaccttttctttccggaatgaatatgtatttcaaagaaacaaagaaaaacctcgggcgagagagaaaaatcgtgctgttgtccatcgacaatcgacaaacagaaatctggaaaggacgtggtaggttttggatgaacgaaaacccataattatttcaagagattca

SEQ ID NO: 238 - DNA, 11409 bp, Xanthophyllomyces dendrorhous
taatagttctccccctctccgctccttccaaaagaaatcatcttcctcatttccttagacgaggcttaaaataccgggacaatggaatatcggttttatcaggttttttgaagagcaagggattgggggcaggattaagaatgacagtttcttttcttttcttcagagctctcgtgatcgagcgaaaggagagatctcggattcttctctggtgagatgaccgtttcgctgggagtggtgtcggtgcggagtatgatggttgggtctttcagggcgagaggtagattggatgaggctttaggtcggacggacggacggacggaaacggacaaacaacgggtttgggatcggttagctcagcgaagcggaaaaggttggacaagagatgtgaagaggatacatactcagagttgagcttgtagtcgacaacggttgatggtggtagatttagtatacgatagatagtttctctgtgattttttttgtaaagttagtcggagacaaatatcaaaattgagctccatcttctattaagaattcgaaggggaacaggtataagagagaacgattcatactttactctggcccctccatcggtatgactcttctccgtccaaacgctgatgacgtcctctccagttcggacgctcagaacgacaccgaccacgccatcttcctcttcgaactgatcacctacggaggcaaggacgagatcttcccaaagtctatcggccaagccttttcggagtcggagggtgaattttgcgcctttggggacttcttcccagataggaagtcttatggatgaggcaaacaggaggacatcggtcactggaggaagggacgaaggagggtttaggtgagagtatatagtccagaaagactcaatctgtgaagagcagagtaagggtaacaatcgttagtaatccttgagacataaccggaaaagaagaggagggcttgggactgacagatgcgaagcctccaattttctttatactgtcctcgtattgggctgccgttgtgatcttggctccaggctgacgatgagtgtaccagaacaaccagctgtttggagacaagatgaggttgtttttgggagcaagcaaaaaaagatacaagaattttttagtttaaatttaatattcattttggtgtgtatgtagcgaacaaagacgacacatccaatgcatttgaacagtcccaagggagaaaccaaatcacaagagacagaagggaacagagtatagacaagacagaagaagaggagacaagggaacgaacctgatccgacaaggatgcttagaatccttacttccagcagccgacccattgttcaccccactcaacacagactgggtctctgcagacgacattgagagtgagagcgttcgtttcccgctagacgccggagctttcgacgaggacgaggacgaggaagtattggttccgttggttcttgaggacatggttggcttttagtttatttatcgagtgaaattcagattgagcgaacggaagggacgacctggtttgcttctgggaaagggtaagaacgaagtatgcgtgtgtatatccggttaggttgatgaatgtttaaacaagcaggactgctgaaagaattttcttcttttttgacgtgcaacaggatgcgtctctggttttgatgtgcgagttctggtagtaaaatatgtgatccagtcctcaggtgacacgtttctcgagcagacgatacgaggcgaaggacgatggctgatgcaacttaagaggatagtcgaggcttgtgggagacgaggttgtttcttagaaggaggatgggatttcatctgggcagaagaaaaatcgttggcaatggcgagagtctttctatgttacgtaagcgtgtctctcttcgtcccaaccatacacaacaccttcgttgtcgctcaatgagttgcttgctttagataaggtttcaacgcctatactactcgtacatcaaccccagagtgtccttctctcttccacttagtatttccggcggctgggcgacctggacctttctctgtctcgaccactgttttaggaggaaacatatcaaagtaaaccgttttgacaagtcagcatttcattgtgtcaaggaaaagcaaagtgagatatcatgaaaggaaaaccccagacacttactcatagctcctcttgggtgctctgtcgtcatcgtagcctccccttctgtcatcgtatcctctcttacgatctctatcatcataacctccggagccagcttcgggcgccctcgacgaagcgtatcggtctcggctctctcgactttggtatccgccaggaggtcggtcgtatccaccaccggcggacgaaggcggaccggcgggagcgggatgagacattgatgcaggtgcagttgcaggggcatgagcggtcgggttcgatcgcttgcgctgtcgctcttcgttgatcttgacgagaagctctcggagctctttgtatcccagatgcatctgtcgagtgtgtatacgaccagatgagccgagagcttcaagaaaccctcaaaaagagagaagaacaaggtttcgaacatacctttccaccgaagtgatctgctaaacgacgatcggaatccaaaatactcagataagcaccgcaaacctcacatactcgaagcttctggtgaccggatgctccagaagtctcggcaagttgttgaagttccctctaaagtagagcatggtaattgagagagaaaatcacgcgtcaagtttttgtagttgatgagaaggctcaacgggggaagcaaacgacatacctccttgtccgccttctcagccttgagggcatccaccgctgccaacttttgaattgattcatcgaccttacccgcctcacctaagatcaagaatcaaaggccaaacgtgtttcatgtgtgatcagcttataactctgttgacttgggaggagtggaaacgatagtcaccaagttgttcaatctctgcggttccatcttgtatcgagatctcaatctctccgatttccctcatctatatattcgagacgagacaacatgcactaatggtcaacgagttgttcagacgacacctaaggttcgcgtgctgcactgtgatgcatcaaaccgcatccacagaccggatgatagtcgagcgaatggaacagaacaaggaatgaatactcaccaaagcggtcgtctttgcgttctcttcaggcgtcttctccaatcgcttctgagaagtatgaatccttcgatcacagtcatccacaaacatgaagatgttggactgccattcgttctcaatccgggcaatggccgcgtcgtccggtctgtccagctttgcgagctgatactcaatttgaagcttttcctgatgagctcgagggcagggtccgaggtccattttctgtgcggaagaacgatacaattatgtttcgatacagacaggagtgatatgagtaaagaagcatgtgtatgcgactagtgcaaagacggctgaagagaaagtaggagacgagagaacgaacagtgttggtgaagacgatgtgaggacacgtcccacaaaggtagttcttgcagaccttgtcgtcggtgaaatgcaaaggcacctgaatgatacccattgcctcggcacccatcatttgctatagaaacatcacgttgagttggagaatatccgaacggaataagacaagggaaagtgaaaaaagaaggtagaatagaatcagtgaaacgatgaatctagtgttggaagattgaacagaaaaacgaacctcgagcaactttcgctgagcttctgctaatcttcccatatttacttattatctgtggacgtgttatttctgatccggctgctagttctgctgctgttactactgctgatgatgttgctgctgctgctgccgtcgctgcttccgatgctgatgtcgatggctgctgctactgctgctgctgttgatgagagtgagaagggcaagatgcgaaaagtgagcgtaaccaattggcgtaaccttcggtaaccatgctcgtaaccgctcacatttgatcattcccttgcgcccgcttccattaatccatcccaaacggccagcatcatcagcattcgttcatagttctgtcgtcatgtttgagaagtaagtttgtgtttatggcgagtctggttgctctgtatggcggctaacgaattaggtgtctttgttttatcgcaggttcacaccaaaagaagatatctcgggtcagacgtccatcaaatcgtccgtccaacgatctattaggtcaaagatcctcgagcagcttcctctgctcgctgagggcgaaggatccgaggagggatctctcatggacgctctttggcccaagaaggagggtctcaccttggtcaaatggttagcactatagtttgcctcaaatattcagggcaacgtttcgtatatcatacattcacgatgtccgattgggctgattcgagaagttgacggaccatcctatcatttgtactggctgaccctgcttgttcttttttctttcccttcattccgtcatctgttttttttttcttgattgtctatgtgccatcctcccttctcggattttctaccctcaccggatcaacattagccgagatcacatctcgatatacgccctcaacggtgaacccctgttcttccagcactttgacggaccatactttcctacattgagaatactacacaagtgtaggttttgatgttcttcttcttgcgtatcctctggtacttggtcgagaaattcttcatttatatctacaatcttattctttcttcctcgcttgaaaattagatcctgagctgttgcctcatgtgaagatcgatcgaggagctattcgattcttattggccgtatgttccctcttgtcacgtaacgttaatggcgactattcgagagacattcagacctgattgacgtatacgatctctatccactcagggagccaacatgatggcccccggattaacatcgcccggtggttcgcttccccccaaggatcttgctttgcccaaagaaacacccgtggccatctttgcggagggcaaagagttcgccgtcggaatgggaacgctcgagatgggtactgaggacatcaagaaaatcaagtttgtcctcttcctctctgctctagttcgctttccttgctgttggatcacagaatgttgatatcgttctcggcttctcccttctctttcttctctccctattcttgcgccgatttatagcaagggtatcgcagtcaacagtgtgcattacctaggggatggactttggaagcaccctactttctagaaggaaggagaaaaagcttatgtttaatagcttgaaaggaagaaagagaaaagggaaagagagttatagctttttgactgtatcataaatgaaatattgattctcagagaacaaagcacccctgcatagagaaatctattcgaatctagatatcattttcatcttcgtaacaaggaaggcatactgtttttgtttcatcttgtagtctctccatctgcgttttgagactcaacaacgatgagcgggatactactcgtcgaacttgtaggtttacccatgtccatttccacatccgtcaaacttaaacgacggttttccacctctgttgttgtttttgtatccggttcctctgttccattgatacgtctatcatgggcaagaggagaagagggatggacagaattatgggatatggtcgattggttcaccaccgatggtgaggataccactgaatgagcagatttatccgttattgttgagtgtgacatcggaagatcagtcggcctggctatcggtgttgatgccggtaaagtcacaagcgaaggaaggaccaatggacaaggcaagctggtatcttgccagatcttgatgtggtagtctgtagcgatcgaggctgaagcaatcattggtttggttggatgtccctttgcagcaccaattcgcgtatacgaggtatcaagtatcagttgtcgcttttaagaaaggaaagagacaaacagatcagagagcttcgaaaggcttacagcaacagaaataacagagtcttgtttgaaaaggcaatgaagagaggttgaatagaggaaaaggttaagaaacttcggaacgacaatacttataacgcttcaacgtattcaaaggcctaccttgatgacctttgaggtccaacctctgttctctcgactgaacttcccaagcaactactctcccgtcttccgaccctccaacgacccagatttcctgcctatcttgtacattcccaccctctctaggcctgacgaggaacgtactcgggcaaccgtattgttcattcagcgcgccagaaaatgtcttgacagacttcgaggtatgaaagttccaaaatcgggtggtcgaatcgagtgaggttgaaagcagatatcggccattaggagtgaaagaaatatgtgcactgataaaagcgagttcagacagaacgttcttgttaaaactccacctcttcaaggcactccaagaagcaagcgcacctacatcgggacagactcttcatgaacgatcgtcttgagacaatggcctgtggaagtatcccacattcgacttggaaagaagttgagaacaaaaatgagaatattagagtacgattttaagacaaaattagtgacaggatcgcagggttgaaaaaaaacttacatcaaaccatcccagctacaactaaccaacatcgtaccatctcggttgaagttgacacccgatacaggatccgaatgagcgggtaggttcaagtgcggtctacctatcaaacatgttgttcgtcgatatcgtcaaagtgagaaaagacccaaagcgacatccaaggtcagacattgatcatgttccgtcgcaatggaaaccaaaaggaatgggaacgggaatagggtagatcacctgctctgacgtcccaaatccagacgcattcgtcttttcctccactagccaaaagattgccttgaggattgaaagacacacaaagcacagcgcttgtatgagcaagcagaggctcgtggattggcttgccctatagctctcgaatagacggattggcgtcgcacgaaaggcttcaaagaatcagtctgacggaaacaaccacgcgacaaagccatgacgcgcgtaagaaagaactcgagacgaacggtttgaacgccccatatgcgaaccgtcttatcgtccgaagcacttgctatcagctttgaatcgtaagagaatgcgatatcggatattcctgtgttttcgatgagttcaaggcagttaatatatgatcaaagctgcgacaacgatgaggaatataaccgacatattgacaaagtgtgcttaccttccgagtggccaacaagcacacaaagttctactcctgtctcagcatcccttgaaaatagaccatcgatgaagaaaattgcaagtgatgagatattcaattaggaaaaaacaaagctaagaaagatgagtcaatccaaccgaacatgatccagcatagaacaaaggcagaatgtcgcttggtagggaagcgaaaggctcaccaaattcgaatcaacccgtctttagcacaactcgccagacgcgacccatccggagagaattttagggctgaaagaacagaggtatgtccaagcaaggtctgtttgagcttgtaattgggtggaatggacgacgcagaggagcacaaggatgaggatatttggtctgccatcgtgtctgaagatggtcgttgatggcaagattatgaactatgatttcatccgacctgaccacggctttggcctttgggtgcacatccctgacctcacaacctttccacggatagatattcttcctgtccgatatcagccacatgttatggagtacatgtttcaagtgatgagcgctgagtctgcttgcgctcttctcttcatatatatacccgtatataaaacatagttgaatggtacctcctatttgatcagatcttcaatcaatcatgaaaaccacctgcctatcgtttcattctggtgatccattttcttcaccacacactccgtatcaagtttatcccctctatcttcacccatatcatccattagaacgagtcgtctgctcagcccttgtgtttctagaaggggatgatggatccttgggcccaccgatagatttgcttatgtaagcatcccggcccatcaagttcttacgtgtcgtcggtgtgctctatcaacattaactctagcctgtacaccctacctgctttccttccttctagatctccttattctatctctccctatccctttggtgaggatgcaaaagcgagctaggacagacgatttcgatttttcggaaacttcttccccaaagagagccaattcagaggaccctctttcggacggtgaacaaaccggtgggatatcatccaacatgagcttggtcgaccctaccctactctccagaggtagcggacttgccctcagagacttcgaagaggatgaggaagactctaagagaaccatgtctgctccttcttctactgtggcctctgggtccgggccatctagggacgagctcgctcctgcagagttgagccctgaggaaaagcttcagatgatcactagtacgtctatcttatggctcggttgctcgtcctgtaatctatgaagcatgagattgatcacaacatcttcttgctttcataacaaagacttcaagaaacagcccctcaacaaaggagacacgtggttcttgatagatcgaagggtacgttctcgactttatgccgcaacttttttcttcttctagacaatgggaaggcttgagtagaagataggggatttcttatacaaaccctttgttggttctcttgctcttcacagtggttccgacgcttttccactgccttttctagctctcagattactgaggaagaaattgagagcctcaagcctatcgataattctaggatcctggatgagaacaataagctcaagcccgacttggtggaaggaatggatgtagaaatggttccgtctacggcctgggacgctctagagacttggtttgtcctgcttggtctctctgttctcccgacctagagtagtgtgcaaattagacggaagctgaccttgaatcgaacaaaggtttgggtgtgatgtttccattccgcgacgggttatagaaggacaaggtcttggaaatgagcgattagaattctacgtgagtccgttttattaacgaccccatagattatatcttattcaattcatgttctactatatctgatggcaatgaaactactagcccccgaccgtcactgtcctcttcgtctcatctcctacaatccctcctccttccagtcctcctttcgcccaccttcgcacaccttttgagaaacccttctctgctgcagtcaagttcaaaatcttctcttctctagttgcccggtcgcactttaaactggtcccaaaagactgtcggtactggaagctaagcgccgacgtccaaatagagaatggaaagggagcgttcatcactccagatgaggttcaacagcttgagccggtcctcatcgaggatggtggagcggaaagtgagacgttggaaagcttaaacattaaggacggatctatcttggcgttggagtggaaaaacccagagatccctggcgcctcatggccattaagttctcttgtgggtcaaagcgaaggggcgctagacgttgggattagcgatcagcagcagcagcaaccgagccaagtgaccggatcgcctgccgcgtctcagggactgttctccaccccgggatacgtagctcagttggagaatgttaacagtattcctcctctagtgaaagagcccaaaggacttttaggcagtcttacgggaatcttaacgagatctaaaactgcgttgggcaacggatcgaatgagaggagcaggaagggagtaatggggttatccaatttgtgcgttggtttttcagttttgaaacgttgggctgatagagaagtaccgaactgaattaaatccgttttttcgctgcgctccaatatcattgttgtttatcagaggaaatacctgtttcatgaactcagctattcaatgcatggccaacacaaatgagctcaatcgatatttcctttgtaagctttgatttcttttgcatctatacattctcgtatgtctctcttcttacagcagtcatctgaatattcgttcttcgacgtcgattcagccgaagtctataaggatgagatcaatcgatccaatccacttggaatgaaaggacaagttgcctcttcttttggagatctggtctcccatctctatcacggtacctcctcttcgttctcccctggcgaattcaagagaactcttgctcgattcgcaccttcgttctcaggatatcaacagcatgattctcaagagtttatcacattcctcttggatggactgcacgaggatctgaacaggattatgaagaaaccgtatgtggagagtccggactggatgggaggaggagaagaggaactagcccgacttgcaatggcttgttgggaagggtacaagaagagaaacgacagtgtaattgtcgatttgttccagggccaatacaaaaggtttgtctcgagttgacatacaaagcatcttcagaatgtaagctctatactgagactgccattacgctttcaaaaaaaacattatagcacggtaaagtgtcctcaatgtgacaaggtttgtgtttgtatcttctgatcgctctacattcaaaatcttaacttgcttgcatttctcctcctttgggccataattacgcgaaaaaggtgtcggtgacgtttgatcctttcatgtacttgaccttgcctcttccagtcaagaaaaagtttgagaccagggtatactatattcctcaggatccattggcggctaggtaccaggttcgtgtagcgctccattgcgaattattaccagctggtgctcgactacgttctgaagcaagaattttatgttctctattctaggttgatatttctgttcccaaagattcaagcttcaagcatgtgaaagatctcttggctaaatggttcaatgtagatgccaaacgggtaagttcctcgttcatctttttttcatgcggtcgttgttcttaaatcttactgaccaagatgtctttactttcggattgaagcttatcactacggaactctggaaaggacaaatttataagttttggagtgatcacgaagctattagcgaagttgctttgtccgatgtaattgtcttctacgaagtaggaacaaatttgcgttcaaggcatgaggtgagtctaaagtgtctttgattctccattcgacgcccagatctgatgttcgaattgaaaaaaaaaaaaaaaaaaa

SEQ ID NO: 239 - DNA, 27294 bp, Xanthophyllomyces dendrorhous
aaaaaaaaaaaaaaaaaacattgatgcatcaaaggctatatccgtagaggatgacaactacgcagttattcctgtttttactgggtccattggtcgatgtttgtctatccttcttctgctgttccttcttgtcaatatagtatatcggtcaaagagacaggtctctgatcacaagtactcttaatagacaacagccagcccgaggcctatggcgctccattcttcatcacggtcacgagcgagcaatccaaggacgcaaaactcatcactgagttgatcattgagcaataccaacgtattcttccccatacggacgccacaaacttttggaagacggaggcagtgtctctgactagcgagcatgtggatgtggcggaaacccctgcttcgtctgctgagcaagtcgaagagcagatcacggagatcagggttgacgaggacggcgaggtcgagcagaaagacgcatccgtaccgagtcccttgaccgttcctggcactcctatggacgttacatctcctctctcacctgctgaatctgttaaagcttcttatgtggcatccgagactgtgtctccggctacgactactccggctcctcaaaaatctaaacctactcctatcttcaatgtccaagtgttctctaaccgttgggttcctagtgattctagagtcattccggacggcaagcagatgtacaacctccgagattttgacctcactacttcctcagaatcctcggacgataccaattcaatcgggcctactcagcctacatcaaccgaggcccaaccgctagtatacccaggtcagggactcatctgcatctggccatcgatggacaccgttcatcaagtgtttggttcagatgaaagcacgaacgcattcgcctcgacgtacgagactttcactgatcccagcgctgtcccagctgacccgaccacccgaggaaagaaaaaggcagttttgacgatcgacgattgcctagatgagttctcgaaggaggagacccttggagaagatgatctgtggtactgctcgaatgtcagtgcccttgaaaaacattgacgctgtgccaacagtctggaattaatccttcttgttcttgatctgtctcgaaaaaacagtgcaaagctcatcaacctgcaactaagaagctagagctttggaaggtccctgatatcctagtcgttcatctcaagcgattcggaggagcccggaaccttcgagataagattgacaatcttattgtaagtttctctcctctttcctggctttgtcgtctctgttatctgccaacgcaagttctcactctgcgatcttgtgttcgttcaataggaatttcctataaccgactttgatttggaaaaccgggttcaagaaagatcaacagctaaagtgcttgcatcgtctggtgtggatttagagtctcttggcttagagacgactgaagaacctctgctctacgacctctacggtgttgatcagcactatggtggattaggaggaggtcactatactgctgtggcaaagaatgttgaggatggtacctggtacagtttcgatgactccagggtttcttcgatcaccgagtcttctgtcgttactcctgccgcatacgtcctcttctatcgtcgaaggacgacccgacctatcggaggtaactcgcgtgttaaagcggagaaggcgcttcaagaaaaagcgatcgcctcactgaacgcttctgcggccaattctaccctgaactccgctgtgccctcgatctatggtggctctggtcgaacgtcgcctagtggagattggtatcctgggctacgaagcagcggtttggacaatatggactctatgcctggaggttttcctggttcatcttctgctccatccagccctatctcacccaactctatcaacgccgatctaggggatgatgaggatatgtttgaccgatcatctgtttcgtcacgacaggtggactactccaacacgtacaattctgaaggccaacttctttcgtacgactcggaagatgctaaaaattggagattcaactcgatcgaccgatcgaccgatagtccgcctggttgggtggctgatcaagagctggaacgacaggccgatctggacgagttcttagcatccggtaccaacccctctgccgctcttgctgcaccacaatctgcagcgttcaatgctcatccttcgccacccacatctgacgatgaggcgtctgttcctgtgtctgccgccagaccacctgtggatgaggattatgatcaactggcctcggaaaacaacagcgagggtgtctctgcctcatcctcgacgtcagctatgtcaaaagaaaattgggtggtcgttgaagacgaggcgaagccgtagggttacgtacctcagccttgattgatgcagagtagaatccattgggggttattcatcttgtcctggccggctttccgtctcttttgtctcttctgctttatctctctgcttgtttgttctatctgtgtatgatatagtatgacacaaaagaagagtcctaactctttttcaaactgaaaagcaagtatattatccaacaatcttatcccgttgatgtctctccaaatacttcaaattacgaggactgttttctcatcgccctttttctttgctcatcttgaaatctagatacacattcgatgcaaaatatgtttcttttcttgtcttggactaacacgtcgcttgtgtatactaaatgtgtaggggcaatacatatatgtctactataaaccgccttaccctccaatgcatcctataaggtttggatgagcataggtccttcgacatctcgactgaacggtttagtctgtctgccatgaactgggtcacaagcagagataacagtgccgatcgttcctcttaagaaatgttcgcaggctttgatagtttcattgaggactttcataggggaagctgtcagacctgctcgtcggttgacttgatgtgagatcgagtacagaaggaccaaacataaccatacagaaaagagaggtgaggttgtgatacaacgtgtcagatggaaagctgagaaggaggaagaaacagcagcgcataagtactgactcattccgggaagaatcaaaaacacatcacagaaggacggatgggttgatccagggatagtcagaaccgtcgattcattctgaacggtctttgttgctgccaggagacgatcaaagtcgtcagagtctgcgaactcttctgaattgacggataggaatggacaagtaatttggcccttccacgggtcgagacctgaattttgccagaaaacggatgggagtcagtcagatggtctaaaggcctaaagaagaagatcagatgttgaggagaaagactacgaacgctgcatagcagggtcagtagcgatgatagcacgaggattgaaccgaggatcagcggcggcagcgatctgtgttttaccattgagaatccaaaggtcgacgagagagcaaccaaggtgagtacgagattaatgtggaacaagaagaccaagagtcggttgtgcaacagcttcctctcttttacgggtcccctcttgtagagaacgacgatccacttacgacagccgttcctccgaatgaatgacctgccaaaacataattatctatatcgatgttgcccatccattggtctcgattgaatccttcgcggttctccgggcctactcgaatcttctctcctttgttgatcaatcgaatggcctctatcgcgccgtcgatctcggcaagcctcataattaactgatccttccgaaagctcgtctcatcctcaggttgcgtctctaggtctggccaactttagttatatggttagtgatgatgacaagaaattagccatttgtattcgaagcaaaaacaggaagaaagaaacgagtaggcgcactgaacgtccgtccaatttatgaactcgatcgtcctcattgtctgatcctccaacgtgatgaccgttgatggaacggtcccgtcccgatgttccatgttcgccacgacgtatcctctggaggctagttctccacagaaagcagaatacatcaatcgaggagctcccacgccatgactgaagataatgagcggatatggctttgaatctggcggagggagcaatcgggcgtctttatgagcaggaaaagtcgttccagctgtgaggatgctggcgcagaagtctgatgacgcaaaataacaaaaatcaacaatcgaacagattcatgatgatctcaaatgaggtaaatatacggttttaggaagggatgacggagagacttacgcgcaagccatttgtaggctaggttagccttgttgcccatctttaatagcccagcgatcgtgggttccagtctgagtttgcaagacgccaagtttcatcagagtccgatctatacgttggttctgatctcctagccaagagcactcgtggatctagccagaagagtgactcaaaatacaacgagaagaaggcgggagtagcgcgacttaccttggaaaccaaatcacttttgaagattgacccttctcaggcttacagggatagaataacgtgaacatgacggtctcgagttcaaagccgattttgggctcttgtccttctacatgacgccgggcaaaagtccccttggtctccttctctaccatgaattctgcatccctgactcccactttgtgctcaccactgtatgtgggcattgatcgggaaaggagcgctccccatgggctatgcccgtgaacggctgtgaaggccggggtgttgttcgtcaagcttgccatccagtctcgggctgacaatagatagagagtgagaggcagaagaaggagggataaggcaaatagtacagagttgtcctggaaataagcgatcagagaagataccgatataatcatgaaccagttggtatcagtttcgagctgagaagagaaaggttcgaacgttgcttgactcttgtcgttggtctcgctcaaattcttgtccgttggtttatctctgctatcccatcaaacgcgtcatcgatcgatagcatagtcagggttacactatctccgcacgcgtcgatcgacgttcatccatcacccatcaacaacaccattcagacctgtcgtccgctcacttctcctggtgtatcttttgtcgaatcaagtcgatatgatatcttgcatactctcaggtaaatttcttgtgatatttgtgatctcatggcctcgtaggtgttgccttcatctgaacagttcactccttttcctaaattcgtcagcgtgataaagtatcgagatgaacacccgtcaccatgctctggctgcaagcttgatatcttctcatctcgggagacttgctatgtctgagtcctcagtcgctcaagaggtattcagtttttcttactcccctttctgacatcggttgaaccctcgaagctgacatcgataccttcggtcttattttgtccattcaggaagcactgtgttttttgacagaaaatgagctgacacgttcaggatcggacgtctcagtaactgagaccgatgtatgccttcttgtgcatggaagtcttcatcgttgacggcgaccgtgtgttgacacgttcttgtccttgcctttctatgccaggtgtcttctgctgtccgtcatgccctcaatgaatccatggcgaagtccctgcagaccttcatccggtatctgaatcctgataattccagagcttgtcatccgctcaatctagttcagcagatcgccgatgctcagtcgactgtgagagagaatgagtcagaactcgacaggctgtatgaaagcataagttcggatagggagcgtgtgacccaggttggttcctctggttcctacatctatgaatccctcatcctattcctttcctttttgcttgtatagaaagttaagcaatcctctaaccattataatctcccaatataatccacgcgctttagctcatctcagatgtacaggccctgcttgctaatatactgggtacctggcctccgataattttctcggctgaatcgtccattcacaccaatcttctccaaaagctttctgcgcttcttctcaaactttcccttcttccactcagacaacacgacatcttgcttaagtcccatccaaatctccaagccgccatggcgacctaccaagaaactattcttcgccgaacggcacgagcgcagaaagagacggacgagttgaagggagaaataagaaagtaccaaatggtgacggaaaggagcaagggtgaatttgagaggcttatgagaaccaagtccggactagatgcagccagagcgaaggttgagttggaactggaagagttgagaagagcgattatggagcattagacaaatagatgactgtatgcgccctttcgtccagtatatatctccaacgatcatagatttatgttacggtttgaattctctaggaaactcaatgttcttgcccggaaggagcagttcatcaacctgctaagcgatctacgtacacacgacccggtcatcaagagaacctacgtagtctttagtcttcttcctcctcccctatctaatgatgacttgtaactatatatctgtctttagttgattgcatatttcatatatctatataagtttgtgtaaccatgtgtgtaattgccgtagctcatcagatctgtggttacgagaccatgcgttggaacgtcgtgttccatcacctccagaacttcatctctctacacatccaacaccatcatccttaactgccaatttctctttgatcacatctcgcctcactttgtcctagaagaaacagatcagtataccaaaccatgtctcgttcttatgatcgcggtaagttttggtagccttcttcaatcaacgacgacttggaaacgagctgttcgtttgagtcttcccttgcccatcagcttaggtactgatatgtactctgctctgtctacccttgcgtaattgtcttttctgttttttagccttgaccgttttctcgcctgatggacatgtgtgttcctttcgtttccttttttatgcttgcttttttctcaggctcgtattagacctggctgtcgagattataagagctgacgacccagactatgttacacgtcaatatctagctcttccaagtaagctctccgcccatcggactctgtgttttaccatcttcccaactgatgatttatctacttacaccatgaactttttcaatcaggtcgactacgcacaagaagctgtcgctaaaggaacagccgctgtatgtacaatctccagacgtgtgtgccttcattggacaagatcgtcctgtactgatcattatcatcggaacgggcaactttgtgactaggtcggtgtcaagtcctcgtcatgcgttgtgctcggtgtggagaagaagaccgctcttcagcttcaggatccccggacggtccgaaaggtcgccatgatcgacgaccatgtctgcttggctttctctggtcggtgttctactattctctcaattgagcagactgatcgcttctagtcgacacaaagaactgacctatcatattgtgttgtgtacaggtttgacggctgacggacgaatcatcatcgataaggctcgagtggaatgccagagtcatcgactgactgtcgaggatccggtgagcgtggagtacatctctcgatatattgccgcctacaagcaagtaagtattcaagcttagttttctttttttgtgaatgcgcaagacttatcggctcattgagttatcttcttgcctactttctctcgtagcgctacacacaatctggtggagtccgacctttcggtatctcctgcctattgatcggatttgaccctaatgacactaagcctaggctatacctgactgagcctagtggaatttacagcgcatggaaggtttgtcctttcctttcttgagcctgtcaccaacagaatcatctatctatagatgctaacagaatgtttctctttttctctgtaggctaacgcgatcggtcgatcctcgaaaactgttcgggagttcttggagaagaaccatcgggatgacatgaccagggccgagactgtcaagctggctgtgaagagtttactggagatcgttcagacgggagcgaagaacatcgagatcacagtgatggactcttatggacaactcaaagtctgtttctatcttttctcttctttggttctgttcctatagacttggacggacggtgagctgacagaaagacatacgcttttgggaaacacttctatctgttttgttcgtagaacctgacgctggcagagatcgaggctatcgtggtggagattgagaaagagaaggaggccgaggccgagaagaagaagtcgagattggcggcgacggcggctagtgcgcaagcgatgttgagcggtgaggccgaaacgtccggttcgtcgtgaacgttgaaccttacgcgagacgacacgggcttcagagaagacggaaggatatgatcatgctttttaattgtatacttagaattcgttcatatcgagatgtgcgtcttgtagtgaatactctgtaagagaaatagtgtgatttagatcaagacatatgtacagcgtgaacaatagatgttccgacagggaaaatagagagataaagagaccaaactaaaccagaccggtctggaccggagatctagctatcgactccagcttctctccgcctcttttgtctggctgaaagacctctggacggatcgccagtctctacggttattggatcagccagctcatctagtttggactgtctgacgcgtttttgggaagccctagcgtggttccgtgagaagtgaatatctgatgcatgacgaaagtgagaaagaacaaaagggaaggaaaagatcagcatgaacaaaggactaccatgccagaggactaaacaaaggcatacatgttgtcaagagaatagccatggaaaaagctgctataggcatgaccaacgtctttcgacccaacccggcgagcccagttaggttcaagttcaagtcagacatgcgcgaaccaccacataaaggtggcctcggacgaatacacgttccgatttagagaaatacgaagcttatttaagctcaccttgggcgaagggacctggcgaaacagatcagagcgcatgtcaagtggcccaagattcaagtgttagtttgagaccatgagcgactgaaacgaacgaggagtgcaaagcagagagagcgctctctgaaacgataatcattcgaacgcgcagataaaatggacttgcattttgactcttctgaggcgtttttataatcatgctcaaggaaatgtatgggggaatataaaggatcagataaaccgtgtccagggttcaaaggtatgatgttgaagggcagaaaggaagatgtaagaagagaaggagaacgtgggaattgaggctgacatcgttgagactgacatcagcctgatatgccattcgatgctcactgacgcatcctcggtcgatttacctgtgcgccttgctcccatcccgtaagcgaacactcaacatccactcaccatcctacacattcacttgtagtcccatcctttctctctcatactcatgtctgccaaggacgtaagtgctcgtgatctactcatggacctttcgattcgttcgatcgtccgacattgctcaatagaacagattcggtcgtattgatggatccttcctctccctctatttttgtttctcaattctttttttggcatcgcctcgttcacctttgttgccgtgtttctttctgtccctatcagtactgtacgtgttcttccatatgccctcttgatcctgtttctcagattgagattttctgatcgcgtacgcgtgttctttatttaatcggcctcattttggcatttcctcttacagacggaaaccagcaaggaggataccctgttcgtccttctttcttgatacataaccttgttgcaccttctctcccgtccctcgattgggaagatcaatccggttgagggatgttccggataagatgtgccttgtcttgttgtctggacctggactcaaaccttaccactgtgttttgttttgtcacgactgattctttcaaaaatgaatcgtacatcctccttgattcgtcctcctctcctcacaacctttgcaatcgaccgaacagcagcagcagggtggacatcagcagggaggataccctcaacaaggcggatatccccaacagcagggtggatactaccctccccagcagggcggttacggtcaaccccctcagcagcgtgagtctatctgtactgaattcaagcgatccgatgaatgagcaggagcggaagtcgaggaagttaaaaagatgaatgaagctccataagagcttgctgatctttgtgtccttttgatcatggacggatggacgaatgaacggctcattggatgcaaaaattatcagaatagtcagttcccgttccgtcttcatctattctctctcgataaatcactgattcgccttatacttcttcgtcaattcccagctaccgttcgtccttcttcctctgatacgctacgccataaaccagccagatttgaattttgttttttgaaccagcctaattgcgttttgtatttgcctttacagagccccaagctcctcctcaacaggtttgtctgttctttagaaatcttgcgtgtaggctttgatgtactatactagatattcataaccgcacccggcctttctacattttaatgcaatttttggcatcgggctttatcttaggtctatgtccagcagcctcagaagcagagtggtggtggaggtggatgcatggcctgcttggccggatgtctctgctgctgctgttcgtcctttaaatctctctgctcgtgtgaacttgagtggagaaacacagatatgctcaccatgggttttctctttctctttttctgtttgttctctgaatgggtcgaacgttcgcaggcgctgaggagttgtgttgcgacgcgttgttttaatttcgtcttttgctttctattcttttcgatccaccattcgatcatcttaaacaaacggatgctcgcttgcgccccctttttaggttttgcgtcttcttatgtgccgatgtattccagtcgagggttttatttatcaatgcttgaatgcctttttttgtcttctctctctttacgcttccctcctatgtgtctttctcaaatatccaccgagctcttgttgatctttccttttctattccatcccgtacatctcctttcgatcacgcagggcctgcgttcgatcaagacagcgagaaagaggaagactggtatacatttatatcgatcatgcgttgaccgactctgcctcatcgacgtcttcgtgctcgacctttgcgcgttttgccggttcattcgccactgtcacagcctcctcaatagcggaaggggtaggggtagaatcagaggtagaagtaggaagggcagaaggttcggtagaacgagggagtttcttgagtagagctgaactggctttcccgccgttgttttttcttcgtccaagttctttctttgtgatccggtcctgtaagagaagaagaagaagaagaagaaaagaccgagcgaaagagaggaaaaacgtgtggaatcagcgtcagatcgaaagagggcaaagagaaaaacaagagggagaagaacgactaacctgatcctcgacgatcttttcatcctcgtcctctcccacaggctcagcaggccactttggtaactccaccaagggctgatacaaattcaagccggctcctcctttcgatctctcgtctttcccttttcccttcccgttgtttgaactagaagcagacgtctcgagtgggagagggttggagggtgtgggttgggagagaatagtcttgaggaactcatcaggttcagaaagtttcgaccactgtttgatgtttgtggatttgtgatccgtcaaacaaaaggagggaacatcagtcgttggatattgttgattcaaaagagaggaacagcaaaagaacgaacggtctcggtcgaaagatcgacagcgtgcaagccgatggaatcctggtcgacttcatccaaagagacgagtaaagtagaagacgagcgaggggtgaaatcgagcacgggtcggttgaattcgagtacagatacagtctgatctgtagccatgtcatcagtgatcggtatcgagaagagcgcagtcgctctgccagagagaatcataagcaagcacgtcgttagcaagagaagatatagaagatagagcagaatagaagagcaagaacacatacccaagggaaaggaacacaactctggagccaacctcaaccatcttggtaacgacgagaccttcattgtcaggcaacctttcctgtcgactctcgactccgtcccgttttcgaccgtatcgtttgggagggaaaacagtgatgaaaggtcggactgtctcgaggatagggattgtggtttggagctcgcctgcagggaatgaccagacatgaatagaggaatctccgccggcagagagaagaaggggcaaagtggaaagtttgagaagggaagagatgaatctgaatggtcggggatgaggtgcgtcgttaatggaaattgatcgcgtcacatagtaagaacgaacaggatgtactgactttttgtgtccgagaatgaaacgctcggcgacgaaaccttggggatatcttgagattcggatgtgttcatctcgatcagatgtcacaacgtactgctcgtccggagtcaaaaagagggacgtgataggggatgtgtggcctatgatggataggatgcagagcttcatcagttacataaacaaggaatatttcgaagggagaaaacagtcatgatcgaggcttaccgaggatcagcgttgcgtcagggttcaatgctggatccgcatggatgtcgaacttctttcgagcctcgaccgtctcggcatcctgcttcgggtgaagagggtagctatccaaaggaaacacaccaaggtcgacgtaccaaacttcagttgacatgtttgatcgaaatgtagaaaggaataccaagaaacacgaagcggacgacaaacataccggaatgcatcacccagcttgtctccgatgagaatactgttgtctttagtgaaaccaagggtcgcaatcttcttgaacatagacctgaagacgcgttcgaaaagtagaagatgaccttcgtgtaaggataccggttcgaaagagaaaaacacagctgaaacacaggaatcaaacctcacctagtgcttgccagcctgagagtctttttgtcttcagacacttcccataccttcaacgccttgtcatcggcgaacgaggcgacccacttgccatcagtcgacacagccaaattccgaacgaggccgctgtgactgtctgcggtgggttcaagcccagaagtggtggcgagggcatggcctgtatccggatcaaacgacacgatgtccggtccggaggacaagtagagtgcgtccggggtagctgtgagattgagaagaggatagaacggcatggtatggatggatgggtcaggatgggatggatagcatgggtttttttgctaatattttgaagtcaccatgttgggttactaaccggttaagcagttactaacgctactcacctcaacccttcccactgaaatacgccattcatacgaatccgatcaaattattcttttttacaagcaagatggaatgaatgtgttcttctttctttctcgcttctatcatcttcatctcgtcgaccatcagacacacacgtatatacattcagacaccttctcataatggccactaacattaccttccatcctggaggttagttctctcggttgtctgaggatcccatcactgcgctgtcccccatcatcctgctgactcaacttcatctttttccttctttttttttcagccgtctctaccgaggagcgagccgagcttcttggccagcagggagccaccatttggctcaccggtcttagcgccagtggaaaggtcagcttgttttatgctagtaatcgccaacatggttttggttcgtactctcggttgtaatctatgccttctttatattcttcgcttccttatcggcggcaatcaaacactgtagtccactatcgctaccgctctcgagcagcacctccttcacctcaagcttcacgccttccgactcgacggagataacatccgattcggtttgaacaaggttggtctcaattccgttttttttttggttatttatctggtttgtcaaggcgctaactagagtattcggctctctcatcgcgcctcaggatctcggattcggacccaaggaccgagaggagaacattcgacgaattggagaggtatgctcaccttgaccagtgctctttgcgctttgtttctcaagtacatgtcgtgtttaagagtcttttcttctctatattcttttcaaacaggtctctcttctgttttctcagtcttccaccatcaccgtcaccgctttcatctcgccttgttcgtcctgacctatcttcctcttctttcgtctgccttgcgatatgttattctatcttggagtatactgacctagcttctttctctatttcgatatgattttcaaaacagacaagtctgaccgagatcttgcccgaaagctgcacgagactgccaaccccccgataccgttcatcgaggtctttgtagatgccccaatctctgttgttgaggcccgagaccctaagggactctacaagaaggcccgagctggtgagatcaaggagtttaccggaatcagcgccccctacgaggctcctgaggctgccgagatcagaatcgagaccgacaaggttgatgttgagggtgccgttcgacagatcactgagtacttgcaggccaagggtattgtcaaggcttagatagagggaaagctttcatagagtggatttgcagtgtgtgaaaagtaaggcaaaatatatcatgttgtatctcgattttataaatgcagtcaggaatcgtcctgtcgaaacatcttgggcaaaccccggcacttgcgctgaatagtacagacatcgtaagcaatcattgtaaggatccgacgatcaagaaaagaaaaaacagagagaacagaaagcgcctgtgtgtatgacgatgatgtgacgcgtcgcgtcgcgtcacgtcggcgcattgaatatggaaaaactcatttgaccgtcttttttcgttctcccattctctcattctcctcatcctatcggtccatcttcctcttttccttcctgatcgatactgtctccggtcttgcttgtgttttttttttatttcagcatagatatctctcgcgcttaaatatgtccgacatagagatgagtgagcctattcaggtcgatgacgagcctgtaagtctatccttaggatttatccttatatatgtcagatcgatgatagtgatgaggaatgaattctgatatccgtttctccatgtatcttgaacggcatgatcaaaggtcgatgtttccaaagttgcggcctctcttaccaactcggtcaaaggaaaaggcaaggcggctgatggtaccactactttcgatgacaatctaccttggtgggtttctgatttctttttttgtcatagcagtgcgggagagaaagcttgtgggtgcagcgtcccagggttgagagacaaaaagagtatcagagatctcgaactcttactgacggtagagctgactatcgacgatcggttctatcatatgcttttcatcgttcgctctctttggctttagggttgagaagtaccgaccagttacattggacgatgtagtgtctcatcagtcgatcactagcacgagtacggaacgcttctctcttctcttcgtagaccgaactcaaagtgcttagatgcgtcttcattctttattgttgatcgcctgcttcttttgttctatagtcgagaaattcattgaaaaacagagactgccgcatctactcttctacggtcctccaggaactggaaagacaagtactatcctggccgtcgctcggaggatctatggacagactttcagaaaaaatattctcgaggtaggttctcacacagatcatcaatttgaatgcgtcgatttctgttcttctttctcattgttactgagtgcgaataagaagcttacccattatcctttgtttttctttctatcggaaactgttctagttgaatgcgtcggatgaccgaggaatcgacgttgtccgagagcagatcaagaactttgcttccactagaactttatacaggttggtccaatcttcttttttttcttttgctttgaacccctcagatcattaacagattgagattttcgtatttggttctatagtaaaggatttaagttaatcatcctcgatgaagccgatatgatgactaacgccgcccaggccgctcttcgacgaggtacgtagttctactcgcctttcttgggccacagtcggacagccaatattctaacattcgatcttcattgatattatgctatcatctgggatgaacttcatcttaaaaagtgatcgagcagtacaccaagaatgttaggttctgcatcatctgtaactacgtgaacaaaatcaccccggcgatccagtccagatgcactagattcagatttagtccgctgccgatgcccgaagtggagaagcgaataaaggtggtggttgaggaggaaaagtaggttctcggtgttctactggcgcgcaactgcctattctctggctgagtgctcattgtgaactctttgactttctgcgtgtgatttcaattcagagtcaacttagacccttcagggctgacggctttgctgaagctctctaaaggagatatgcgtcgagcgctcaacgttctacaggttcggtctctatcttttgtatccgttcctttagcgcacggtgatccttatttgctcatatcttggttcggtctcacccaactcttatcttccttaaaggcttgccatgcagcttttgatgtcgtagatgaaacagctgtatatgcgtgtacaggaacacctcaccctgaagatgtcaggaggatcatcgagagcatgatgactgctgaattcacaacgagctaccagtgtacgtcacttccttgttgtacagaatataaacagagcaaagactacaaaagaacggatcttgatattgagccttgtcctttgacttcttaacggttcaccttctgacagtcgtccaagctctgaaggccgataaagggctggcccttcaagacttggtaataggcgcgtacgaattcatctcttcattagagctcagcccgcctgcgatggtctacctgttggatcaacttgcatctaccgagtacgtgctactttgttctgtgacatcttcttgttatattggaagggtttgtttcggttgtgtctaacgcaaattatgtctatctgtctgtctgtacatggctgtcttagacatcggctctcgttaggaggttcggagaaaatccaactcacaggcttactaggaagtttcaaaatggccgttgagattgatgccaagtttaggaagaatcaggaggccctttgagaggggttgtttgggctgtggcttgtctgtttgcgcttctacagtgatggatttcatgttgtaattctctctttcttcctttgatgtgtgtagtacttgtggcatccgtctacttacgttcagaagaggcgaatgaagaataagaagggagatggagagaaaggagaaaagagttaccatagatcacatcttccatccttcggtccgtttttccatctttctctcacagccgcacagtcaaacggctctttgcccaacttgccgttcacctcgttgtgtctctcgcacaaccacttctccacgccttctctcgtccgagcggcctctcggacagattcttcaccccctgcgtctcgtacggaacgcacaaagtctgaccgacaatgcgggcagggatacagatgggtgagcgacataagaagggatgttacatgtggctgaagttcggagggaacggttgagggaagagagcttgacatggcgtgaaggaacgtccatgtagacctgagtcgtttaggattggacagattgataaggagagattcatgaagcaaaacaaagtcaagacaacattcgcgatatgaggaaagaagagcaaaggaaggaaggaaagggtaaactggatgcttaccggccaagttcctcgatatcgggcggacagtccttccgaagcgccgctagctcttcctccgttcgaacacccaaacctactatcgaggcgcctacgccgccagcggcggtagcggcaacagtttgcgaccctgatgaagaagaatccgaattcgatgtcgaagactttttagggccagcattcatgaatgacttcaaggatgaacacatctttaacgacgttagaggcatccgaaccaaggaaatcagcctggtttgtcctcgtgaatggatttgtagtctcacaggacataagatccgactagccttgcatggttttccattctcatccagaaccactgaccccttggatagcttcggtcgttcttgaaaaggaatccccgggatcgttgaggaaggtagtacactgttcgaggaagcagattcggcaaagaggagaggacggccggtgaacgcgtatgcggttaggagtgctgacgaagtagctaggccgaggaagataggtcttcgtgtggatctagcaaggttgaacagtctggtagtcattgttcgaattcgtttggaatctatctagttacctctttgtcgttgctgctgctgttgttgttgttgctgccgtcgttgtggttggaaggaaggtgatttgcttacttattgtgaagaaaacccctcgtcatcatcgtcatcttctcaaccggcattgacctattgccactcagtcactcaccactatcatctccatcaccaccatcatcacatctatcgccatgtccaacagcttgatttccgtttctgctaaatccgtcggtcgagtagccatccctagcgttaccctcttcgccgccgggaacatagcccaggtcaagaggcaattcgaagtctctctccaggtatgtctaggagaaatgccaagaacgatttaatcaagatctcatctcacaactttttttttcttttttcggtcatcacagccaggtcaaacctcggtcgaactagtccatctacctgcttggctcgacagagagtcattgtccgtcgaggcattctcagatcacggatcattcgacgtatccatctgtacgtctgttcgcgaaacgaatatgacctcttgtatagccaagactgctgatccctacaccattttctaaaagtggatatctcgttcttcagatctgacgatgatgctcaggagggattttctcagtcgctcaaggatctctatgagctgagagatcaccagagcgcagtgttggataccttaaattctgaaggtgactatagattctacaacatgcgcataaagttcgccacgaagcgctgacctatcctctgcccaaaaaaaaaaacagaacagatccttcgagcctatggagaaaaaacaacctctggaggcatctctccggatcaactgacgcaattcattcgagacttcaagagtaggatgatagagatctctagtgagcgcagaaaggtcaatgccgagatagaaacgacaaataagaagattgcaaaggaggagagagctggagactacggaagaggaggacagccgagagacatgggagtcagcgcaaagctgctggtaggtgaaaagggtgtgaagagtgcagaggagagcaaggtgaatgttagattcatcgttacttacagtaagttcttctgttgcttccctcagcaacacgcctgaaagaatatctgaatcagacggcctcttccgatgttggttaaactctcacagtggtaaccggagctagttggtcgcctatatacgaagtccgggccaaggactcgaacgaacaaggcctcttcaatattgacgtaagcttctccggccgcctgtctctctctcttgtttgttacaactgaccatcgcccaacctatcttcagataaattatcgcgcacttattgtcaattctactggcgaaccatgggttggatcgacgctctacctatctacatcatctccccttcggaacgctcgggtgccaaccttgaaaccataccgactatccttcccagcccctcctccccctccgagtgctccatcttcggcacctgctatggaacctcggatggctttgatgagagcggtaccgaaagtattgatgtctgcgagcgttcaggaaggcgttccggacgagatcatagatggggaaagggctactatgaaaggagcagatgtagaaggaggaagattaaccaccatcttgaaggttgaaggcacggtagatgtggcgtgcgacggagaggaacacactctttcgtacgtaccacaattgtctagtaatgaaggggagtggaatttctggaaggctgactgagtgttccctcttgattgaacaatgaggacgtttaggatcgcgcaactgcaactttttggttcgatgcgccatgtcacggtgccgaccgtcaatgcggctgctttcctcgaggtatcttattcctaccttgcataactcttcatcattgggttaaagccactgacaatcgatcatatctcttctgaacaggtcaaagcgaccaatcaatccaaatacccgctgcttcctggcgctacccgaacgttcctagatgggaattacgtctctaaaggccggttaggcaacgtcaacccaaacgaagagttcaaaatcagcctaggagtcgatccatgtatgtactctattttggtttgttttctcatggaagaaaaacgggagattcataatgacaaaacctctacggctcgcatttgtttgtcctacgataatacgtctcatagcggtcacggtcacttgttcgcccgaggaaaagttcaggaaaacgagtggaggatttatcagtaattcgacagaggtgacttcgttcgctcgtacggtacgttagaagtcgttcggcctcgttatcaaaagaagaaaggattcctttttctctgatcgattcggttctattttgtttggttgggatataggtcaacatcactaacaacaggtctaattatattgacctcgaggtcttgtacaactagtacgattgatttcctttcttcatcccctatgttcttccctgcctggacagagctgaactagcatcccggcctaattgatgttccaacagccctgtatctgaggaatcaaagatagtcgtccgacctatcccgtccaacatattctcttctttccctataaaagacagccaagggaaccgaaccgactggcaagagggagccggtgaatctggctctggccaagtcaaaacgatgtgttcgataccaggtgggaagaaaacaacggtcaaatggcagtgggaggtcgaaggatccggttgggtcgtttcaaagtagggatctatgagaactcctttttctcccttctggttcagatcggaaggctattgatgtctctgattgcgggtgattgatcaaaacaaaaacatgcgcgcacacgtacacacatacacacacacacgaaagaatcacgagaatagcaaggaaaacacatgtacatcatcgaccaccagaaggtctgaacaggtccaaagttctccaaaactgaccaacgagtgctttatcgacatgtcttttatgaggatccacttgaagggtggtgacgttccattctttaacggctgcgttaggggcaatgtttgaccagtgaaagtatatgcctttgactaagtttttttggggggaaacaatcgatagataagcaaaattgaatggttgtagaagagagcaggagaagagaacaaaacaaaccgtgatggaagagttgttttgggtcggtccatttatattgagcgaactgccaagtttgacctgttgttaaaacgcactggactctcgacctttgttgttcaacatgcgtattgtaaagaacaaaaagacacgatcgtcagttcaatagaaatgaaaggagaatgagaacaaaagaaggagataatttagaagaaagaggaaatctcaccaaacttcgtccctgtttcctagtttttgcaaagcctccggaccttcgaccaccagatatttcatcttcttgtctccctctgcacaaaagaaaacgatgaccgaacaggcatcagaagtggaggagaaatgagatggttgcgcactaaaagaacggacaaaacagagaggatagagatacaaacctttgccggaagatggcatcgtcctcagtacgaccaacaaatcttcagctttaacttgaccttctgcgcttgctcgatctcgagcatcttttgacgactcaaagctagttcaagaaagaaagaaaaaacgaggtttgagagttgattcgagcaggaggattagcatttacacacatggatggagtcgtgctggaggatgaatgtttggaactaacactccttcctcgaggaatcgtttgacgttccacatggtgatgagagaagtaggcgaagaggagatgacgatgatcgggtgttgattttcttgtgaagtgcagagacaataggatcagatggaagaaacccagagatgattggtaatagaatagagagagaagacgacctacttgttttcttggcgcctgatgattaaagaggggaaagcggcggaagagatacagaaacaagttggtcagatcaagatctcgtctccaactcgaagagaaagagtttgacaaactcaccaagtgcaccaccaccagcactcgctggtatgccagattttccattagctgctccagccgcgccgttcgacccagcgagtgcttccctcatcttcttgattctatcgctaaacacggtctgacgaaggtaagaaaagtctttcttcgtccctccgcccacaggaagtttgcctgttgtcgacgccatcgttggtgaggaggtcaaggtgagcgtggtggatcgaagaggagtcgaccggttgataagaaggatctcggtttgttgaatctagacgcgttcgtgagaaagattagcattgatcctcttctgtaagacattgacaggaggaagaggggaagggaacaagagcaaacatactttgaccacggcatcgacatctgatctatccggtacgtattttcgtttagcaagcgaggaggccgaaggggcttgtccagttgaggaattgatagactgtcctccaacggtcgtcgtcgcgctctcggtctctgtgctagcttttgcttcttctacaaaacggtcgaaaatttggccagaatcagaatgatcagcggctgaaaggaaagctgaagattcagatttgaattcaaagacaaaatacataccggtctcggcaccctcgccattcaaccagtcaatcgttggctttctcttctctgagggaatgaagctcacgccgtttgctcgggcttctcggaggtactccgagagggtcgaatctcgagtttgccaaacaacatagaggataggaaggttgatagtggaaggatgggctgctggtggaacactggtagagtgattattggcatggtagtcgtgatgacgatacaaaagagtggacgcaacaacggagaatgattgaacagaaacgcgttcggttaggtcgacgtgaataaagagaagagaaggaggagaggtccagacaatgaagagaagagaaacccacctttcgaatgctccaatcttttcaaacgactggtccggtccgagatggatacgggatgctgtcgcgagtgaggcaacggaagaaccggcagagttggagagcgtgatgggtgtctgagcgaggatggctctccggaggtgaaccgcaggggaggcgtccgacatgattttcgttctaactctttttcttttctactttgagcctcttccttccttccagctgtatgtacgtgtgtgtgtttgagagacaggagatggcgacggggatgctatgatgaggctttgtgtgatggttatgatggcgacaagagaagaaacgatgcagaggttcgaacagaggagggcaggaaggattagggttagggttatatgggaccttaggtaagccacatatgtattcaaatacttctcaacatcggctctactagcgtacatcctgaagagcaaccaaggcaatcctcgcgcgctgtatgtggaacgttcatcagaccgagagagacacatcatcagacgatgggcttgggctcagcagcgcttagatgatgggttgtgcttgatcaaagcgacgttggctgtctgttgagtgatcttggacgacatggcgggaacagcgcaagaatggcgatgatcatgaattcataagacccttgatgtatcttcagacactttatagttctttcgtgtttttagccgtgatatgatgctcttcacaaacgctcctgaaactgatgagatgaaaggaggagaagagaactgatgaagtacacaagtgtgtagacggaagaaggatagatggaacactgctagcctttgtaagataacccaacaaaccatgagcttcatccatcctttcttttcccttctcccttcctcatcgcgcttcttttgatacgtaccgaacaggacgacggtacctacagacctgttccaaagagagttcgctcggctatccaacgttcttgatctgtgagtgtcctccgtgtcgttcattttgactccgaatttttatgtgttgttttattttattttccgcgcctctttttttcctttctctttcttgctctcatccatcctccatcctccatccgtccactcaacccattcaagtatccctgcccatcgctcatccttcattcaaacagatatctctttcgacaattgaggtttacattcagaagcaaaagaccgacatgcctagcgcagatattcaagtgagttcagatctttggcctgtcggaaacgggcgaatatataaatccgacgcgtcgcgaccaaggttttcctgattcctcttctatctccttctctttttgtccctctcctacccgacaactgcttctctcataaaaaacaaacaaacaaaaaaacgatggaaaacaatcaaacgggaactcagccggtcgtaccagccaagagaggcagaggaagaccctcgaaaatgtccaagctgctcgaacagcaggcgatcgatagagcaaacggaatcgacacgcctttgccagaactaaagccaatcgtttgtctcttcttcccttctttctcttctacctattcgtctgtcgatacatccacacgcgtaatatgtgtggactttactctcgctcaacttgacgcgtccatcgtcacatcctcgtttccaaatgttccactgaaacgcgtagaaactttgtctagtgacttacctgtctttgcctgttctctttccggacgacccatcggtctaacagttgcctcccggaccgaaacgtggtcggggtcgacctcctggagtgaagaacggagaagggcagaagcaccagaagaacaacctcatgaacaacgtgcctccaaatcctctggctcctaagtcgacgacgacgtacccgaaaggtcccggttcaaccggcacaggcaagcgcgggcggccaccaggcgttaagaatggacaggggaagaacacggcgattaagaaggcaagatcatcagaagaagacggtcaaggcgagattgtggaagaagacggtcaaggcgagattgtggaagaagacgacgaagaagacgcgtacggcatacagtcgtcctctccgaatggtcagaagtcagcaaaagacgcggcagcgatgaagaagggtggtcatccgtacatgccagcttatatatccgctcctatgaccacacatagtaccgttatcccgcccaccggagccaagagagggagaccgcctaagaagtagaaaaaaatcgcatcgaacctctcggggtttccccctccgttcgtttctttccagaatggtatcctcaagccgcctgctctcttcggtttgtgcttctcacagctagccttgggttggttggcttcgcttctcttttccttctctggctttccccgtcaacacacacacatatatatatatacaacttaacttttctccttggagccttcgctctttgcctctctctacctccttttcattaagtcttatcccctctcttcatctacatgcttttcttcttcttagcctctctcttttggcctttcgactttctactcttatcaggctttccaaactactcgtatcgaatgtttgaccgtatcaccacctcacttcacttcacttcaagtcacttcacctcacctcttcctacggcgaagaagcagaagctacatcctttctaaattaaatcatttacatctgatcattcgattatcggctcggttctcgtaacaggtaaacccttggtgacggaaccaactttgacgaggacttcgtcccattctgcttgggcgttcgaaagccaggtgattgctcctcctgccccaatttgaatctctgttttgttgtgatcgtccgatcggttgtcccgcagaaaagagacaagacgagaacgagggcaagcaaggtgagactaagccgtaagaaagaggagaaagaaagcacagggacgaacgatcgttctggacaatcatcgttcggatgacgacactgaagtctgctgctccgtctagtgacaaatatcccaatgcgccttcacaagtcgggggatttttatttatttaaaaaaagcatcagtcatcgagatccaaggccaagtttttaaaactcgtgaacaagatccggtttacctgaataaattcctcgaggagcatggccttctaattcatccaagatctgcacggatcttaactttggagcacccgtcatcgagcccggagggaaacatctacccaaagcttctaccgtgcctacaccttcattcaactggccgacaacggtggtgacgagtgtgtggacatggtcgtatgtttctactcggatcagcttcggtactttgacactactcggaagacatattgacaagagatccgccctgatcaagtctacgatctgaatggcatccaagaatcatctagattagctaatgagcccagagacgaagaaggatcaagtgaaaaaaaaaaaagaaaaaaa

SEQ ID NO: 240 - DNA, 8265 bp, Xanthophyllomyces dendrorhous
aaaaaaaaaaagaaaaaaaaaaggaaagttgcgcaccatcagattctcagcgatctccttccgatcagcctcgagcgcattcttccttctctcatcttcctccttgtcgtccagacatctccccaccgtacctttgataggcttcatctcgacctgtccgctgttagtgatctttaagaatcgttccggactagaacttacgaccgtcgtgtccaaacaggggaaccgaaggaaggatgaataaggagctgggttggattttcggaggaggaggtacaatcgatatgacgcttcctcgtcgatctcttgtccaggcgcatgtccgttttcgttcgtgctaggatgggagccacccgaggaaggaaggaaagacgatcggaactgggtagtcatggtgagctcgtaagattctccttcatgaatggccgatcgggcggcttcgacgagcgagacatattcctctcccgactgatcagacacaaacggtctcaacgacgggcagactccagttcgatcgtctccttcctttcctatcgatttcgatagcccaagctcaaccctcttaacttcagcatcccactcatcgtcatctactccgaaccgaacgccatgatcaatcaaggacctttctaatccatgcagagcacctttgtctgcttccgcaccgttcagctgatcgctaaggccgatcaggatccattccttggtagaatgttcgagcgcgagaacagtactcgaatacgcgaacatcgcgtcttggccacccgatcgttcgtctagcgatcgatcgagcgcaggcggaagatgatagcccgctaaagactctgctttcatctcgtagttgaaccaaccgatccaacctgctttccattccggcccgtcttccgccttcgatccgtcaggaagggatatccgagctgataatgatttctggagtgcgccgagtgcttcaaataatgaggcatctcccgaaacatgagagcttggagggatcgacagttggatgcctgccgagttggattccgtatggagcaatagctttcgttcaggtcggagttcgtagcttaggagatgattcggtcttgataggtacgaataggagaacgagtttgggtcgttcacctttgagctatccaaccacatctctcccaaagcgcttgacgaagaagagcgagaaggcttggtaggcagaccagacggtcggatgtgatacagcgagtcgaagacttgttcgatgggcaaatgttgacctagctgtttgaatcgatgagtgcgcagtttgaagcgcttggagcaaccgttcaaggatggttgagtaggaggaggaatcgaggttatcgagctaggcttttctgaagcaatagatgaaggagatacggcggacacggcctgaagccaagtgggtatcgtataatctagcatattgaaggatgatgttaaggcacaggacgattcggcctttagaggcgtgatgtaggcaaggacttttcgcaagaaattgtgaatgagaaggtgaccttgcgaagaatgaatggactaagttgaaggtcattccaaaaaaagaaaaaaaaaggaaagggctttatattcaattcctgaatgtttgtgactctggggaaagaacttcaggacatgcatacctctgggtggaattggactccgtatattggcttggatttatgggataatcccatgatagccgactcatcatcttccttccatgcatcaacttggagctcttctggcagcgctacaagtaagaacaaagcgcacatcggcatgtgtgagtgatgtatcactgagcgcaaggtagaagagacaatcaaataatactcacacgctcggtcaacccctagactattgtaggtgaccatttcaacgccgtcggtcaccccttcgaaaactccggtgcctaaatgcttgatcctagacttctgtccatgctgaatttccttgacatgaatgatgttccctccaagggaggtagcgatgccttgctgaccgaggcaaatgccaaggataggaatgtcgatcgaggtaatcagcttcgaagcaaacccaaagtcggctggattatctgggcgaccaggtccaggagagaggatgacgcagtctatggaaggaaggataagtgactggaattcttccctgtccaaccagagaacatttaaatcaacagcgagagcagagtcagtatgttctcactagaaggctgaaagagaaagccaaggaatgtcacaaaccaagagaactgatcctggtggatgacgagaacacgctgatggaccagaagatctggataatcagagaacaatgccagaagattattggtatacgaatcataaaagtccaagatgagcactcgagggagaggtggtagagagctcatcatagaggacatatgggtaggaatgaatgtgatcaagggctaaggaggacgccttgaaaaaaaaaagaagatagacggaaacgaacggaggagtcaaaacgccggaggggatcatcgacgatcggcttggttacacgtgaacgccgcgtcggattggaggccgcgtggctgaaagttatcacgcgtcaagaacatggttacgtacgcgtcgacgcattctgaggatccagtgggtgtctgaaacgctacatctatctctacggctattattaacgagatcatgatgtgttgataaagagacgtgtgcttacatacgtatacgttactgggaatcttggttcttgaaaactctagagagactatgcattcaagagagtacaggataatcattaatctgcgcaatcagagcctcggcaacttgctgcgtgagaagagagagttcctatggcaaaaaagaaagtcttcagaaggtcttacatcatcccttctcttgatctctctttcctatcttcaacgctggctagatttcaccctctttcaacaagagttggtagggatacatatatcctttgaactctctatcattaccgacaccatgctgttgctgctccggtcgaaaccattctcctatcccaagaagtcgtttctacaacctacattgtcaaacgtcttcccaccccgttcttctcaatgcagtccgaccatatcccatgtcgttcgctcggccagaccgttcagtatatctcgctatactcgcctcgaggacaaagaaactcgctcttctcccccatcattggagagcttaaaaatcactcctcctgggccacttggcggacctacagatccggcatcagctccggatacttctaccgtaagtcctcagggtatgcatgctgttcatcatctctaagcccgacgccaatctcatctttctttcttctttctctgtttcttcttgttgtttgatttccctttttcttctaacacaaataaacagatatcatctcgtacactgagtgaaaacatatataccatcccaaacttcttgaccgtctctcggattttgtcttgtcccatgttgggctacttcatcattcacggcgactttgtcatggctactactttgctagggtttgctggagctacagatctggtatgtcaaaagatttattatccatgtgatacaacactgttctcctttcctcggatactgacccgaatgtcgtctggcttacataggcagatgggtatatcgcacgcaagtggcacatgggttcggtgctaggtacaattttggatcctgccgtaagtgcacagggcagagttattcctatcgatagcagtctgggattatactgacagtatttttcaatccaacaaattacaggccgacaagacactcatgacaacccttgtcgtctctttgacttataaagggcttctgccttgtgagtgccgccatgacatgtttctcttggtcatttaaagtacaaaggaatgacatcaaattgatgttctcttgggtatagtacctcttgcggcaattgtcttgggccgagatgttcttctcagtttcgccgcattctacttgagatacatcacgttgcctaaacctgtatgccttttgacttcatctttctataaattctcagtcattacatcttctgatattccgacgggcgtattgtctctttcatcatcttagcgaacatggtcgcggtattggaacttggctcagcctacagtcgaagttcaccctacccaaatctcgaaagtaagtcaacaagtcctgcctatgtcttattagacaagacctttgatcaacccacattttatggtcgggtttcacaaacttatacctacacttgcatgttctacctcaagtacaacacctttctccaacttttgttgatgggctcgactacgatcagtcctcttttagtcgcctacggcaacgtcgacttgtttttgattcctcttcagtaaggctctcactcttgatgactttcttgtttctgcatgaacactgacttgagggtgattgcttgatgcctcacagatacatcgttggtaccaccaccatcatctccgggctgagctacctctggacaaaaggagcggtggtcgtgttgaaaagatagatagatcttactgagagcgcgagcgtgctcttctgttgtaaatacaaatgtacttatcgtttcaaagagatcgagaccggaagcaagtatggttagggttaaaagcacagctttgtgaagagtgttcgccgggtaaagcattaagcggacccgacttgtgaccatcgtatcagacttacagaccactcattcttatacagagcagccaactaacatttccttccgcttcatccgctcctagtttctttgaaccccaacaaccatctaccacacttacagtctacattcaggttacatacgatgtctgttttgcaaactcctatcacaaagatgtgtacgttcctaaggttttcacgagccttctgtttgtatctcctcttcgatcagatctggaatgaccaactgagagccctttgtttttttcctcttcattcgtcgttatcttggtccatgaattgtgctcaaccactggtggatggatgtatagtcaacatccagcacccagtcatgcttggtttgtatctgcgatacatacataagcatcgtccattatgtatgtatgtatgatctgacgtgaaatgattcgatcgcttcttttctcagcgggtatgaatgtcgctgctggaccagaactagcggctgctggtgagaaattcattccttgtatactcttcatataatatttcctcgtgtcttgacaatcgatagagtgattatcgtccttgcacaaatcatcagtttctaacgctggaggattaggagtaatcggaggactcggtgagtgagcaatatacccgaagcgatatattcaatcaaaaacaggattggtgaccaggaccttttttaaaaatcccccaatgttgaatttgtcaacaggctatgttcgttcttctgccagatatcatacaatatcgctgactatcaacaacaaagactatagctaatctgatcatcgatgatgggtttcatcccttcagactcctaaaaacttgaggaatcagatcagagaaatcaagaagcacttgaagtcgcccgatcttcgtgagtatgcttgttgctcgatcccacattggtggccgctcaatactgattgaaactcggtttgatgatgaatagctttcggagtcgatcttctgattcccaagggtgtgtccaggattgccgtctagactatatagtatatgtctaataccagactaacatcattctatatcctttatcctcgtagtcggagacggagcccgggcgaccaactatgattacaccaaatacgtcttattcaattttttctcacctaaaaagcataacacgaatacttacttgccatccactctgttgcgtctatcacaggtcaactcggagatttaatcgatgttatcatcgacgagaaaacttctctctttgtatgcgctgtaggagttccaccaaagtctgtggtggacaagcttcatgaagccaagattcctatcatgaacagtgcgttctgtttactttcagcaatttgtattcggcaaaacaaaaggcaagatactaatatgatacgatattgaattttgctactgaatgaatagtgattgggcaccctaagcatgtcgcttacgccctgaatgctggagttgacatcatttgtgcgcagggtggagaaggtggaggacataccggaaatagtgagtttttttttgctggaacgccaaagttttcttcgaaagcgggagattgaatagttctcttgttggatttctgtgacagttcctaccagtcttttgatccccgcgtgtgtcgatctcgtacgtcttgaattctgatacttgataaacaccgcgggacaagataactaacatcaaaatggtgtaaacaggtcaaaggcaagacatcccctcttacaggagagcccatccgaatcgttgctgccggaggaatttatgatggccgaggtttggccgccgcattgatgtggggagcgagtgcagtctgggtaagaaaattctgttttccgtctgtcttctggctcatatgggttccttgtaagggaacacgcgctaagctagtctggttgttcgtttgcctgtcatcaatattacgttgtgatataggtgggaactcgattcgttgctgctgtagaagcaagcgctcccaaaaagcacaaggatttgattctttcggccggctacgacgatgttgagaagaccctgatctatactggtaagcacattctgattcaatcaatatagagggaagaatgaaactcacatcaccaatatccttcgaaatgcaatttcagggaggccactccgagtccgagcgactccatacgtcaaggactggaacaacaatcgagcggacgagatcaagaagctgacctcacagggcaccattcctcacgacgccgagttggagaagaagccggaaaagtcgatggaaggtcgatcttggttgtgagtttactgttgtctttctctatgactgatatcgtactgagtttcatgaaatgacggctttggtatgaacaggatgggaactgtggcgggtgcaatcacggaagttcttcctgcgcagaagattgtcgaagatatgtgagtcctcatatttatcacttgtagagagaaggagatgttttcgcatacgccatatctagaactcaaccgtttttcctccctctctgtctatctgtctttcgcttgttccagggttaacgatgcaaaggcctgcatcaagtccggtagcgagatggccaagctctaagtttcatcatcccaagtgatgatgactaggaaaaaggaggattgcagttgtagctttgtatttcttatcgacttctttcgttgtactttgttccgagatatattctttgtcgtcgtgggtgtgaccatcattctagtgataccttcgactaagaagcttatgagggcatgttgaaagagatctgatacacaacatatcgcacgccagagatcagataaaacaatgttttatctgagctccaagaaagaatcataacaggagcagattgtttgtggctagagaaggtggaggccggggctccacgttcacaggcacatgtctttcttatctaaccttctggcccttctcaccttcgccttcgccttcaccttcaccttcattctcatccatcaccatcctttctgaagtacacacaattctatgcgtcctaccatccctctacaagactcttcttacggagtcagatccatctctgactcgttctcatttcaggatcctcctaagttacattctatagacaatctgtctgagtcaactgattctctcgatcacgcgatccccggcgacccctttcgagcttcgcctgtgacacgtccccagtcagtcaaccactcggtagagcaatccaaatcagtacatattacagccagacaggcatcctcaccacaagaggctgcttgtccggttagccgggatagcttgtctgagtcatcttttcagtcttgctcttcgtcatcttcgtctgatacactgctgggcccggcttcacctccacccgcaccgtcaccgtcatccccacctgcaccgatcagctactcatcgaatcctctgccgtttatctctacttcatcgatttcatcattctcggcaagtagcttcccatccgccatgtcgtctcctccgatgactcccaactctttcaatttcctttcccattcggcctcatccgaactactctcccattcgatctcttccttaggctcgttcactaca

SEQ ID NO: 241 - DNA, 13707 bp, Xanthophyllomyces dendrorhous
ccttaggctcgttcactacacaagacacctataggtcatctagccaagtcgcctcggacgaagaaggatccctaccgacgaatatggatcaagaggcctcgaacggaaacctagtcctgcccactatcgcttcactcgaggcgggtgtctgggacgaagttcttgtcagagaggaaaccgagggcctgccggacgtcagactggttttagttgtaggcgatcaagatctaggaggagatatactgaatagagtagcagaggagattggggtccaggcaggtgagggttcaacagacaagttcacaaaatgttccagtcgtggggttgggaaggatgaaaagtctactggatcaatctggctatcttgctcggcttcagatcctgtaagtgctattggagttccgtttgtttgtttgtttgtttgtttattcacagttcaatcagagagccttattactgagatatattttgacttggatctcgacttgaatagagggctgtggatagtctgcttcgacaaatccatgatcgtcatcttcctcttgccaagcagctttcggcatcaacccaagctagtgatcatcttggaattaaagatatctttgacttagcagctactggtaaaggacgaggagccttggggtggattgactgttgtttggtgctcatcgatccaagtatgtatctgttgaatagattctcagaattctttttttttaaaaataaaaataaaaaatagatactcaagatgatcttatcatgtcccgaccgtttatacaggtcgtttacaacaatgcatttcaacgtcccgtcgactggctcctcgggtacctactttgctcctttcgaccgcacctctttctccatctcaacatgaggaactctatcgacagttgtccgacttgtcgttcgtagatgcctcccggctatcaaccccttctgaccctgctcttgaaccttccgggtccgtggtgtataaacttgccgataagtttactcctttgggttcattcaatgcgccttcttctccgtttgtgtctccgcttcaagatttgttcttaacccgacgaggagttcgctatctcaaccatctttgcgcccgaggattcttgcttactagagcagactacatgaactcgctaactgttcgtcgaacatcacacccaatgcccttcgcgtgttctcgtcagagcacgtaccgacctcgaccggctctgtctagtcaatcgtccatctcgtcttctgctccggcgctcacgttatcatctttccatgcttcggactactcatacatgtccactcaacactgggcggagggctcacctttcctgccaggaacgctctatccaacatccggtgggtcgtccgagagggagactactgagctcgagatgggagaggtttacgatccgttgtgtctgccgagactaattcagggcgcgtggacggcttccacgagaggaagtgtaggtttggtcggttggggggtgttgctattaggagttagcgcgatggtcgggtgggcggcgagagtattccggagcgatgcgtggcttaagtcgttcaggctgcagatgtcgtttggacatcatctaatgctttgatgtggtctcaggttgtctgattcctgctaatctcctactatgttaatgtccaatctctctctatatatacacacacgcgtactctgtacggctcggttggtatgggcatacttcatattcttctcacacagttgtattcagtggtccttttctttattaatcttctgtttctttacttacttcgactcttacgagctcgacacctgctatgttgtacttgaccgtagttgtatgctttttttttgtctccccgtcttcttaacgtcttccttaccactttgttttcttgcctcgtttctccttcttgttccttttgatgacgaccctcacactatatgctatgattcccaccggagacactttattgatcagagaacatgtatgctctgccatatatatacatggccttggctgctaggtagcaacatcggacgtgggcgccctcggaccaccgactaccaagatcccatgggccatggatctagtttgcccccgatgccagggacgggagctaggctggtaacagaaaaggttacaagatgagtaaccgcacaaggggtcttgggtttcagagaagaaatttcgagctcttggggcaaggaaacaggatagatagaatcacctggaccaaggaactaaggagggatagaagtaggagcaacaaaatatccaagcttagagttcatatatacaagtggtctagagagcctatcctatatatgattctcagaccctatgaacatcatagtacaatgcgctagaagtaggagagggaggagtaatgagagtggagggtccataggtcacggcttaccaatcaaatgtaacataggttacatccccaacagaaacactccgacccccaaggctgacacaagccttcaaacctgtgtaaaacctgtgtctatcactctttctgccctcgccccacaacccacacgcacacacgcccacacaagagaacacacagcacacacatacaggtctgtagtccgtttgcttcatccatccatctgttgacacacatcctcacgcgtttggtcgcgccgagttggctactgatgactttgtgatgtgctacatatagatctaaaagacaaatcgtcacaatgagttggtctcaacccgaagactcatcaaccacctcgcaaccaacggcaacgacgacgacgaccatcgaacaaggcgagtttcctgctcctccatgggcatccaggttagagcatttgtctgaggaaccaggcagaggtggagccactacagtcgagtctcccttcaaggaacctagccagctccaaccagaacatcagaccaataggctgtctggttatgtgagtcttggttaccgttcgggcgtgtctcccgggatgggtagttatcctgccgggtcaggaggcgatcaagcaggagccaccggaggagcaggatcagctggtcaggctagccctaatggaatagggtttcccgattcagaagaacgaggagcaggaacagggaccgccacagaaatatttcccgaggaaggagaagaggtcgcggctcctgccactgctgcttccgtcgcgtctgcagaggaggttggaagagagggccagacccagcgagagatcgagacggatgggcagcagccgcctgaaagttcaacatcgagaaatgaatactcgctcagtgcaaacattgacgcggtcccttcagcatcatccaacgcgatccgattaccttcacctacgctcgccgaagagtatcccagtgaacattattcggaatccacgcttccttcggacgcgatggtctcggacgctcatcagcagcaacaacgacaacaacagttcgagctcgaagctcatttggcgtccatcgctcactcccttcgagttgctgaagagcagaacaacgccgccatgggcgtccaacaggaagaagctgcagctgcagctgtcgcggccgaagaatccacatcgacacatcccactcaaggagatgagaatagacctcagaagatggccaaaatcaaaggaaagccggttaccacccaaaagacgcgtgatgccggaatcaaaagaaggaacgtcgaggctcggtttcattgtacggttgagggctgtggatcaagtttcactcggtacgcgatttttagaatctgactgcagaataacatcaatagaggcactctagctaacatgctgtgctgttctctggttctttgttcttcttctactagatcacacaacctctcaggacatcttcgttcacatgccgatgaacgtcccttcaaatgtccagtctgtcaacgaggctttgcccgacagcatgattgcaaacgacatgcccggctccatgtgccatcccaggcgcagagtttcccatgtcctaattgcgacagaaagttcgctagatccgatggcctgctccagcaccgttcgtattcgatccctgtcgttcgaattcttacttctaatcgatagtctagtttcggtattcgatctgacctcgtgtttatttatttattaaattcaattagagaacatctgtgctttcgcacaaactcagcctgctgctaatttacaagctccgtcaccgccttctcctccaacccagcctgcattcccaccaatggaccccggccaaccgagctacagcaatcccgaggaaggtcacatgggcgagaatggatttgaggcccggcagtcgatcgacagtgggtttgacaatggtgtattgcagggtagttcagctgagatgggagggatgggactagagatggagactagtggcgacaaggaagcgcttgaatcggctgtgaacgagtacatccggtgttatcccctgttccgctctttccgatcacacgagtaggtctttgaatcttctctttgtgaaatgacattttccgacctaactcattcacttgtctttgggtacatcaatcttgctgttcgattctttgatcgacagccagcacgatggctcgccgtcgactttacctgacggatccactgatcccaaccaaagagtctataactctcccttccccgccgagctgactcccccggagcttcttgtctggctgtcccactctgcgtacccgagtatggccaaggatccgtctatccttcgctctcttggcaagctaatgggcttgccttctatcgctgatgatcatcctgcgttgtcgacgaacacgaacggaaaacgtcggttcgagcaagccatggttgaccctgaattgatgaggatcgaagagatcgaacggacatttaaagactttcaagccgcttctgggggaaacgaccatggtgcttttgagtttgattccaatattggaataaatgagcacggcggtccgtcagaatccttcgtcgatccaggccccggaggcgacgagctggtagaatcatcgtctgggtcaacaccttcagtagcggccgcgggcggatccaagtcggaaatcactaggtgtaactatatccagcccatcactggggagaggtgcatgaagacgtttgctagagtgtttgacatgagacggcatgtcgagacgatccatcatagctcggccttggatccaaaccggccagggtatgtttgcgacggatgcgagaagaagttttcgaggagcgatgcgctcgttcgggttagtatatcgttctctatcttctcttttcttttctcttcttcggtatttagattctgttcgagaaaacaaagagaagacttggttgcttacaatgaacttggggttctgtttttctgttcacagcatcggagggattattgtgccaaccggaagctcgaccagacggctgtagagtcatggggtgcctcaccttcttccgtcgatcagcagctgccatccggtgctcaaccgaatgctgaatttgagtctccgtttgacggatcggtcaatcagccagagccaacggaaggtgaagatgaagtcgttgtttctgaacatgtcgcctagacctagaacgttcgctttctttcgctcttctcttgtctttcctgttatgtcttgtctattcttctctatgtcacctcttgtctcgattgttccttctctcttatcttctcttctctgtttatatttgtactgttagacgtgtttgacttgatagcgatgtacttctttacacccttgcactcagtgctaatcctccctcttatgtctactaacgatggtcgaaacgagactcgtaattgttggaacgcgtgccacggttacgccggtcacacacaattttacccttttcgttttctggtaagaggatgtttcttcactttaaccacatccaagaatcatgtctgataccgtccagatcaaggccaaggcccccgttgttgagaagaaggtcgaggagaagggactttccaacgatgtgtacgtttctttttgatctgatctttgcttccctcgctttccttggaatgttcaatctgcataaggaacgacagaaggttagggagtgatgaagagaatgaaaaaaattaacagtacaacctcatgcatctctctatcgtttgcttgtcgtgtgacggtatgtctgttgtcgaaaacggatcttctttcacgatggtcgaaatacgctctttgaagtgtcaccaagtaccagactgcctctaccatccttgccagcgtcatcgccaagctcattccccagattgaggagggcaaggccattattgacctttgcaacgagtgagtgatcgctcttttcttggttctcgggtgagacatatttattgatatgtgtgtctgatgaataacctgtggatctaaaggggtgatcgattgatcgaggagggtgttgccgccgtctacaacaagaagggtgtcaagatctccaagggtgaggccctccctcctttttttcttttcttctcaatctaaagaagaaacgacctcttgctggttccgagctaacggattcgtctattcggctttggacccaacctaggtattgctttccctacctccctttccgtcaacaacgttgtgtcccatttctctccccttgtctctgacaccggagttcctgtgctcgctaagggcgacgtcgtcaaggtccagctcggtgctcagatcgatggggttcgtacgcctttcccccctttatctcgatcaaaatacaattcctggtcgtttgctcatctcggacggcgtgtttttttcttctcttctgtgtaaacggttgaaatcttggtttgaaaatgacagtacgcttcgatacacgccgagacccttgttgtcggtgccaccgatgcttcccccgtggaggaccgaaaggctgatgccatcgaggccgcctaccaggccgcccaggctgctatgcgattgattaaggtcggaggaaagggttacgacgtgaccgagggtgtgcagaaggtcgccaaggagttcaaggtgcttcctgttgagggtcagctctcgtgccagcaccttcagaacactcctgatggccccaagcgaattatcatcaaccctcctgtggatcagaagcgagaggagtacaacaaggtgtttgaggagggagaggtttacggaatcgacgtcctcattaccacctctgccgacggaaaggcccgaacggaggaggccaagactacgatctacaagaagagcgatatcacttaccagctcaagatgaagacttcccgaacgactttcgccgagatccagaagaaggccggtgccttccccttcactcttcgatgcctcgaggaggagaagcgagcccgaatgggtgttcaggaggccgtccagcacggtttgctccgaccttacgaggttgtgtacgtgttcttttctttcgttttctctcccttcttttcgtctttgcttgcttctcttcccactaacatcatgtgcgcgcaacgtgctcgttttgatcttgcctacagccacaccgagaagtcctcggtggtcgcccagttcttcttcacgctcgcccttctcccggccggtccccttttgctctcgcccagtcctgtctggtacggatcctcgaaagtcaagtcggccgagtcgatcaaggatgaggaactcaagacgttgatcgcgtccaagttgagggtcgataagaagaaggccaagaaggctgccaaggctgctggagagggcgaggagaagaaggagtaaactgtttccgtccgccggcctctcttttgcatggagaggtatgtgtatgtcggagctgccggtgggtaactcgaaggaacgaagaggatcgagtgaaaagtaatgaaaaaaagaagagagagagaaaaggaaaggaaggaaaaaatgaacatgatgccttttttgtttttgtttctttcttttcccttgatacaacacgtacgactgtatgatacaaagaaggaacgaccatgacataactttcttcaaccaaatgaagagagcggtcgtatcgcaaaaaactattatgggtccattcaactcgaattggcacaggccgttgggaagagaagggagaagaaacaaataaacagcgttgcgaaaagagagaacgaatttaagagaaaagctgggacacggataatagagagagaacgaatgaaggagaagtcgagcgaaagaagaatggtgaagagaagaaaaagaggaaaaagaaaacaaattgtacattgggttgtccatcaatcggagcagacacatacgcaagactatacacaagaaagtatgtaaagggaagacaatgaaggaagcagaggggccaaggcgagaaatctagcgaatgtggatgatatatatgtatattaagctttagacgacaagcacttataggaagggatacatgaggttttgtgtagtgtgcataacgtatttatcacagagagcgggaaaagacaaaaacgaaaacaaaggaaagtagattgcagcgggcaaagttcacacacaaaaaatagaacaaggaaagtacgaagacattggttatgtgatcgattaacaacctctttcacgctttgcaaataatctgcctatccatccattcttttcctgctttctcgacaggttaatgatcgaacttgtcggtcggctgggaaaagtcgtctgggtgatcaggtctgcttggtgtctggatttgtgatctgaataagctgacgaagccgatgatgaggtcaaggagccagtcgaggacggaatgaacataatggcatcggccgagggcaagaaagaattgacatctgctagggctggataacctaatcctggtcctgatccatactgagagattgactggaaggacgttctagacgcaagtgaagaggaggaacctcgtctggaccggctcgggagcggcggcaacggagatttaattgcggaagaaaaaatgagagaaatgacgttatgcgtgtttgtcagggtgacaacggaggtggtcattggtggggatggtgggatgtctttcggactctcttcttcttcctctggtatactgagccgactgctccagctggaagacctgccgagaccgtctggcgcgggcacgggcgagtcctgtaagatctcttctggaagggtgaccatggtaatggctagattcttttcgagaaacctctgttgaaacttgtcaagcgaacgggcaaagacagcatggaaggtaccatcggatgaaggagatctggcgagggtgggcaggatatggacgagcatgcccatccgggcgggaccggtagaaggcgtaggggtggaggtagccgagcgagagctgcctgcttcagagaacgagacgaaagagccggactttactttactagcagtagctgagtctgatctatcaatggagggggaagggtcggaggacagaaatgttgacctcgatcggggggttggagacggggtcgagaaggagcctctgtgggtcgatagatttgaccgggtggtcgtctgtcgacgaaacgccttgggagagagcaggctgatagacgcagtggtgataaggaaggccaaggagagttgttctttgagtagactattgtcggtgggcggagggagaaagtaaacaacggaatcgagagtggggtcggtttgtggggagaacggttgttgtgactggtcatcttgatctctgtcctgtcgggatttctgtttggccgacggaatcatcatgcccaaccgagcagaagtttttcttgttgacggtaacttccaccgaacagcatattccgcggcttgggtgagaagcgcgctgatggcggtcgggctggtaagtgcttcgtcaaggtgtctcactagtgatctctgtgaacgatgctgtctgggctgtctcttaagcagagtgacggcctctgtcgagagtgacgccagtggtggtaggaggagaagagtatttgcttccagttgatccagtattagatcgagcgattcagccgatgggtctaggcgtatggagagaggtcaagaaaggcaggacgattgaaagagaaaaaacggcgaaaaagaatacaaaagatgagaacaaggcgataaagaacagaaatgtacttcatactcaccacctaggacgaggtgaacagatctatgggtatccgactgagcggcgagactagatagctcatctccatccacgagccagccatcaagggctctgctttgtggatcttcttgtagggctggaagaaaggacgacgggaagaacggttgtgactgtccggctggccgtttgggtgtcaaagggtgaggtctgaacggcatcgaggacggctcaagtcgagtcgtagtcctgggattgccaagagcgatcatcctaggagtgaacgatctgaaaggaggagagtgatgttcttgaaggagagcagcaccgaacagagagctctacgatcctggatgaggtgacgatcaaggtcgaaagcaggacagaaagaaacaaaggcggcaagagaatataaaaaataaatagtcagtaactcttgcctccttgctcattcgtcttgatcggatgctctcttccacatcgaccgaatcagtgttcagaccatgttctccttctccttctgcttctccctgtatggtctgctctcgacctgcctactcactgttctatctgtcggactcactagtgatggttctttgtgaacgtcgactcgcttaacgttgaggaattcgttcctgccaaacgagaactcaggcggaaatgtccgcagtcgattacgtcgcgatcagccgcagtttgtttggaagacacgtgaccgtgacgtgacttcacagcagcgctcacgtgtcatgtgatcacttacatagatcacgtgatctacacacgtgacacctcctgctcatgttaggggcgggagctgggctggtaacggaagggttacgagatggtaactacacgaggctctcagggttcaggggagaagttcaggctcttgagactgagaaacaggattgataatatcactaggacaaggacaaggagacaaggtcggggacagggacgagtacaatggaacaaggacgaggacaaggaaaagaacaaggaaaaggggtagagttaaccaaggatccaagactggaatttctatctacaagtggttgagaagcctgtcttatatctagttctcagaccctatgggcatcatgaaagagcgcgctggaaatacgatgcgctgggagtaggagcaggagaagtagtgagagtgaaggtggaggttctatggatcacggcttaccaaccaagcgtaactcaggttacatccctgacatttcctcccctcatcgttccttctcctcacggtggatctccgaagactgatccttccgaattcactctccaacccaccaaatgaacaagctggccggtggactgaaagcaccgaacggactgccccgactgatcctgttctcgggaaaccactgctctctctgtgacgtagcaaagacagaactagaagcgattagacaaaaggtagagcgtgtcgtggtgttcgatagtgctcatgtttctttcattctcaccttcctcttgtgctctctcaacagatcccgttcgaactttcgactttcaacattcactctgaccaaggtgacctccaacaggtcaaacgatggcgcagactttacaagtacgatattcccgtactccacatggagggcgtcggccggattatgaaacaccgaatcgaccgaacgaaactagaagagatcctcaattcgtggaccgggccggtagatcagacggaacagacgaagagactgaacccggtgatacctccgaagaatcattgagtggtcgccaaatgtttcatcctatttcacttccattttcaattcaaacctcaccctcaccctctcccacccttacgaccatctctctccttctcgacccttcatgttcttcttcttcttcttcgtcgtcttgttcgtcaccatcagcctcatcaacttcttcgtactttgacacgccgtttgaaccttcaaatcgcttatcatctctgccgctctcttctccgacaagcctcctccctcctccatggcgtacggcgctgggtcggtcgttcctcggcctaccatcctcctcgcccgagcattggatccttgaatcgaacacagatcccgaaacagacataatattcatccagattctccgccagacatttgccaatttttctacagagcctgtcggtttaaagtcgaacccttttactgatgagggggaggacgatggcgacgacgatgacgatgatgatggtagcctaggctgggtgatggacggccagggagatcagagtctagccttgacagggaagggccagagcgaggactacgacaatggaagcgacaacaagaatgatcaatcgaccgatgatttgctgagcgatttgtttagctcaaaagatagaactgtcggttccaatatcagatacgacgccagatatgacgccttgctcggagcactcggtccgtccgaccaagagatccaattcaacctcaacacgcccacgtccaccgtcagagagtctcgatcaagtaagagacaccgactaaaaagggtctgcttcaactgccagctcgaaggacaccttctctccgcatgccccctcccgttcgacagaaacagagtcaaccaggccagaaaagcgtatgacgaagagaaggatagtctacgatcgaaagctctccaacaatcggagcttgactccgagcgatccgatgatgacgagagcgagaacaacgaacatatctttcaatctagattctgggctgccgatgttgaaatcgcaaccaggctagatatggctaccaagttcaagccgggcgcattcagccggccattgaaactggcattagggaacatcccagacgaccagccaaccgctctatacccaacacaagatgagcttggcaaagatatctggagaggaatgctcgtctggggttatcctcctggttactactccgtccgaggtaagctccgagtattcatcaagggtcatctggcggcagtgagagctgatgtgtttctcttctttcctgtttataagatcctcaggagagtatcttggacagaatcaatcataaagacgaaccacaagaggatggcgtttctcaggatagggagatcagtccagcgctgttgaatgtgtttgacgagagctcggagattcccaacgagtttggtttacacatgttcaaaccagcctcagataatatggccatggacgacatagacgtgggttctcatgtcgagaaggcgtcgaccgaagatcaaccgcgggttacactctcaccttcatcttcgcatcatcggtattcttcttcctcaccgccaccgccaccatcatctccatcatcatcaactcagtttcctctcccagtctctacctcgacgagatgggttgcttatccaaccacatcattctcttcagtcctgcttcccgttttccatctatccaaaccttttcctttacctcccattgcttccgatccggtccatttcgtttctccgccgtccgtttcatcaacactgccgctaaaggaagagacagaagccgaacgaagaaagagactgtggaatgagctacaaaatggaaagttgacaagaatggagatgggcgtatccgttcctcctgtttccctaaatactcctccaccccctcctcc

SEQ ID NO: 242 - DNA, 13435 bp, Xanthophyllomyces dendrorhous
ttcaccgacctcacatcgtcctcattccccgtcctattcttatccccagatcttccgctcctctcacaacaacgattacagccatggtcatgagaacgagtatgaggatcgatctaggttctcttccggtctaccagtgcgctcagttcggcgagcagtcagctcggactatcgttcttatcgttcttaccccaacccagacgttcgaaatgaacagaacagggagagtagcagacgtaaccgagatgaaggaagagactgggttgacagagaacgcacagatgatgaagatcggaaaaggaggagaatcaggtggtagagcgatctcgtttggaattgtatcgtggactgttctcttctttttcgtctttgtctcttccaaagttggcccttcctttcaagttgatttgatcaagaggggtttcgtctggtttgacttggttcgtttcatcgcatcttatcccaacccaacatcattctttttgtgcgtccggcgtggtcatcattgttctttcttccgaaccctactctacaatacctcggaccctgtttctatgttccacgatttacgttctacgttctacgcctcacgttataggtttcgttcccgtttctttcttccacttctcactttttgatggccgtccagcacgcagcctatatcatcgcatcgcatcatatcgtatcatccaatcaaaattgatcaaaggatcgatttcagttctatagttctatcaaacgatgatcgttgaaggaagagacagacctcgtattggtatttgagcatcccttcgctgttacctgtatatccagatgggacagtactctcctcctgtattttgttgtcattgttatacatcagtcaaacatgaaacgttttgaaaggtcatcgttccgaatcagttcaaactccttctgaaaaacaaaggggctgatagaagtcgagtaatgcggaaagagagacaagaccgagtagaaagaaacagaccttgatctcgaatccgacttcagcgacgagagctttgacttcatccaaacttaattcgaccgagacgtcctttgacgagttattctcccagcttttatttccccccccggacaaacacataaaatagatatcaagaatcaggtcaaatagagagcggttagtacgaggctctagaccaactatgagcggacgagtgagtagacatagaactgactgccacaggagaggtcctaggttgatccaaattcctccaggtttcaacactcgatagatcgtctcgagatattctacaacgtttttcgcctatctccaccattcacatccacattcatatccagcgattcaaatgctcagtaaatcattaggaaataaagccaaaagaagagagaacaaacgcacagtatcgataaagaaagaggtggccacacagtcccattcttgatcctcgtctccacttccatagacctccaaaaagtcaccggcgatcagactgaagtcgcttcctttcggtaaatcggcaggattgacatccgggatcctgatcggtcgaaggagagcctcagtagaggtctgattggagaaagtgtggatgtatggatgaatagtgtgacagagaggtgcggttgtccggttaaggataaagaatgagcagagcagcataaagaaagagaactcgttgccctgggatgcatagccttcattcgagacggtgttataggaccatatgaaaaaacaaacgatcagcgcgtaggtcaaactcgtatacaacagggactgatattgaacaaaccttgaagcgcaatatcgtatgccagtcgagccagtccagcaccaggtgtcagaatcttgacatccgcgctgaacgaatcaatagccgaacatcaacttcatcccaatcagtaaagatgcaacttgacgagactcaaatcttgatcatcaagacttgccgttcttctttggggatgtgaccaaattgactctcaatgacgtccatgataggcttgtacgcagcgtccctctcgggtcgacccttgaaaggcggttatgacggaaaggggagacattaggttcccaccctgaaggccacaagcgcaagaaaagcacaagaggctgcggactcacttcgacactccaatccctaacaaactgctttatggtcgatctcatcttgtccatatcactctccgatgatttcctgctgaggagttccttcttctcggcctccttcttctctttctttgcggattcttcatgcatatgatggtgcgatgatactccaccgtgggagtggtcatgaggttcatcgtgagagtgtgaatggtgctgatgaggaggagcaggcgaggatgtatcaaggtcgtcatagtaggcatccaaatctatttggccgtggcagagtgattcaaaaagagtcccgtcagaattcagtggaaaaaaaaaccttttgcatagattagtctttaatcaatccactcaccttcatcgtcttcatcttcgtcttcatcctcttcctcgtcctcctcatcctcatcaccaaacatggagcttccgactgtatcggcgatctcccgaaggaaatcagcattgactctgatagcatcgtccaccttggacaacttctctcgatactttagcttgttgagaatggcctggtgaggctttgaaagggctgtaagagaaccatcgtccacagacacttacttagcttctacttaatcgggataggctgagtaactcttgaaaccgtgggcttacagaggaggtctttgagtcttcggttgttagcggataactgtcatatgaaagcaaaagcaggagcaattagatgaatgaatccccatagttttcggcaagcaagtcaaaactcaagagaagacttgaaggcaagagaagataaagagaggacggacagagtaagcctcgtactgatagaagcatcggagcacggcgtcgaacgcctttcgctcggccttactagcttcgatctcctgaggagttggctctctggggccaccacagacatggttgggatcgctgtggtcatgggagtgagaatgtgacgaagcttcgtcatgagagtgagagtggctcattgtgcaagtgtggttgaaggtgatagtcaatcatcaagagatttgaggattcccaaataaataaatagatacacaattcgttattttattttatttccgaccattttggtatattcatttgctcttctttctcccttgtatctcacaccttgactcatcgcgctttgcacagtgtccgacacaaacacacacacacacacacacacacacacacactatatatccgttgaggttttatttcaatcagattcttgacccgttatgcatcattgataaacatggtgtacgagaagtgcatctggcgcttcccgttctattcattttctcaatcctcttcttcactcgtgtcgtcccccatatcgatctccgggatctctccgtcgtcatcgtcatcatcatcccctcctacgttatctctggcctggaattggctgacacgagcttgttctctcgcccgtgttctctcctgctcttccgccgccattttctgcgcaacctgactatccttcaacgcaatcgatgcaggaacagtcatcgtctcgtccttctcctgaacctctgcgacctcaacaggaggatcaaacacactggactgggacggctgaacgaacgcagtctcgaacggagcagatgtgatcgtaggagggattgtggtaggaagtgtagcagacatagacgcgctcaatgaaacgtttgtttcagttggtacgatattctcaatcagagtgttgagaggggcagagagatcgagcattggctcgacgggtaccgaagttggaccaagttgagcggtagaaagcgtatcgaatgaaagagactcccggttggtctgctcagtacgtccttcagatttgtataacagaagcgaggaggctgctggaagaggtcggggaagagcagggagaagaggatgcagcagagatccgagggttgactgtttaagcggaaaagtgaagacggccagtcggatcagcgaaaacccgatcaaggaaagaagaagaagaagtgtttggatacgcagagagcatgatactcacatccttaccaccctcgtttagagactgaacaacccacccagcctcaggcccaaccgtcccctcccttgcgctaggtccacttgataatccatcgaccagtaatttcttcactccatcctccaactgagcccatgcctgggcagagtgacctcctgcctgccttctagcagaaacaggcaggttgatggagagcgaaagaagaaccttggtggcaaggacgtaaagcgccggctgaagcgccggatgagggagtattgcggagagaagctcgatcgaaagcatcgcagtaggaacgactgaggcggcgagagccggaagagaggaggtgagggcgagcgagttactctctgcgtgcgaccgtttcttgcctttccctttgcttcctccattagaagagctagggtcttcttgtgaggcagataatgctgccactcgagaaggctcaaggagttctcccaggttggtcaaggcgattttaacgattcgaccagttagactgcccgagaccgcgtggatcggcgcgagaggtccgatcttgctaagaacgagcgaaagggttttgagcagtgcctgatgcaactttggctgatgggccgtcttttcgagtagatataccaaataggacacaatctccatctgatgtggaagaagggcctgcccagagcacaaagtgagctggccgagtagaccgcaggcaaggatatacaactggggaagcataactttgactaggttggattcctctgggttggcatgatcagccatctggaagagtgggttgacgttgatgttggtcagaatttgaaccaacaaagaactataacacacagcgacgaatacgaaaactaaccaatccgtccgaggtgattctgaggatcctgtacgggagtgccagcacggttcctgcagggatggccactcctctggaagtaggttgccgcagcataccagtaaccaacctaacgaacccatcgagcctctcgagcgcaacagatcgtttcttcaaactatccctttctttggcgagctctgtgaaacctttccatttgattcctaactctccaatgtcatctctggcctgtcttccgcccgcttgttcctcaaaaactccctggaaaagcgcatctagacattcgtgcgcgctcgtgagagcagattggagatcatgaacaaatgcctgaggcgaggccgattttccgggcaagaggtgaagagacgtgtaaagcttgacggcagcctggcgtgttgacggatgctgtgcagttgacagaccggcaagggaagtggaaagcagagaggcatgaagcgctcggacggatggcggatgtaaagcgacaaggtgagagaggaaaggaagaatggggggaagagcgaccaaaggaaacttttcggtccatacgaggagattcaatgtgtacttttggaggttgggtaaggtgatctcccgatggaactgggggttagagctgcctgagttgaggaagatggatgaaagaagtcgaacgaaagggccgataagatgagacgccaattgtttctattgttgggggttgaagagacgaaagaatagagtaacatgtattgagacaatcgatatcagctctttcctataaagtaaaaatgcatgcgtgaacgtaccccgacgatacccatcaggccgaccacccagtttctaccaaatctatcaagaatttcggctgaagctctgctttggtccataacgatagctccgatggaccatcctgccaatcggtttgcctcttccttggaaaggatgagggcatcgagagctttgaggaaagacgttaagacagaggaagggattttgggaagaacctccggatgaaatggagcgtgaatttctatgagagagacagtctgagagagaaaccccgggtgagacagagtactccccaggaatgccaacaaagatgcagggtccgacatgattgaacgagagcgtgagtgaaggatagctaggagaaaaataatagaccagagaagttcaggttgactgtaagaaaatgaaatatttgcactgcctcaaaagtgttgtaagtcacgtgtgtggcgtcaaatccattccttcgccatctatccctccatcctgtgttgggccctccatcttgtcaccttgccatcgtcacaccctcatcgttcagtcgagcgtgctgctttatcctcattatggcaagcaggtttgagccggatccagcgatcgaagaagttctcaaggttgacaactttcaggtccgtggtttttattggatctctctgcagacagtttcctcaacttatcttcggtcttgtgccctctcacctctatctctcttactcttcacaggatcaattcgatattcaagagtttatctcgacactttctgacaagctgatcgccaactcagttcaatcctccgctcgtatggtcaaacttctgccttttcggatactcgtcgctttcaacttgattgccacgtccgaatagactgactctggctctcttcttgcttagcatttacccccttacccttccttcagacgttttctcatgcagttgattcccttcttcaagttcgaaaagaagtccaggctagaacagataaattagaggcagaagttagcaaggcagagagagagtacggaaggaaactcaaagagctcgatcgcggattcgaggtaagttgatctttcttcatctagagaagtatgctaagattattgactgatgttcaatcgtctacaatgcacaggccgtttcagcttcatttgctactatatccaacaccacctcttcaatcggttctccagcaatcagaatcggagaaactctcgagacgcttcatatctctcgttcaaaagcgcagtattcatccatactactctcctactacatcgctctctccaatggcgacagttctctgctagacagactgctcaaggatgcccgtcgagacggccgggaaggcagagacggaagaatgagatgcgcagtggtattgagaaggctggcgagtttagtcaaggaggattctgcagatgcaggaggtaaaacaggaaaccgaatcgaagagtattgcgaaaagtttgagaaagaggtccttggactgtttgataaatactacaggtgagcaaacccatattcaatatttgcctatttacaactcaatccttcatgagtgcatgcttatatgtccttctgtctttacagacaaggggatcccaaaatgatgggcgtaagtgatactgatcaccagcgcatgtatttcctgaaggctattaacttttctggttgtatcatgtttcaatcagcactgtgcccgagtccttctggagttcaacggaggtacttcctgcgttcaaatttatgtgaatcagcatgactttttcatctccaaagatcgaattggacgtgtcggatctggaaattacggacatgaagaagctactctgtacgtcatgttctgatacgaccccatgatggctgcatatatttgatggtccaaaaacatactggcggaacacactcaaacgttgatttccttacaaaatacagttggcagacccttcccgaccctttcaagtcatcttcgacaacggaaccaacgctccgtagcttgtatgatgagattagggtgactgtctctcaagaggctcagattattcaggctgtatttccgaatccgccaatggttatgcaagtcttcctaaacagagtgtttgcccaagttgtatgttcttctttcatatccatgatatctctctcacaggtcagcttgtcaatatttctcattcgttgacattattcgtgtttatacatgatagatccaacaaatcctcgaacgcctccttgataaagcgggcaaaatatcaactctcgccacccttcgaatcctttatatatcacatacaatgacgtccactctgatcgacgatctgaaagcgtacgagtttccctctgcatcatcttcggggagcagatcatcagcctcagacccatcagcaggggattcaacagtgggaggaaaagcaaaaggagctgatggtgatggtgccagtactgcggtggccgtcatgctggaaaactgtctggaagaaatgtttgcgcctttcattgaaggggtccggtacttggagagagagagtaaaagtttggctgagctatacgcgggattcttggcaaatttcaccaagtaccatgtttgttctcttctgtcactatcttctctttcattttattcatatcgattgagtctgagacacttttcttctacgaccggcttggttatacaataggaaaccgttcataaagcaaagcccaacaaattgttcgatagagtagtcaatcaactcgcctccgcctccgcctcctcaagctctcaaactacccaagccgctgcgtccgctatattgaagtactccggtgtgagtgaaaaaacaccaggcggctcggtagaggcagagctagaggcaggcggaatcaaagttgaggatggagcactcaaaatggatgttgcagaaacgatgttgaagtggcatgccgaagctgtggggagatgtgtagaactgagttcatcaggagaagtgtgcgttctgcgttcaaatttgcgagtatctttcatgggacgcgatcagctaagaccaatcgatccttttatgcgattgttgctcttcaatagaccgaaaggagcgtttgcattgatgcgcgtactagcagaagccctaggtagatcatatatagagactgctcttgattcgtgagtcttcgctctcttctctctttccttaactctgcctcactcaccacaactacgcttgacaccccattatcagaacattagctaagatggacgcgcatgatccaagactggaaccagatctctctgttcttgccaccgtcaggtctgctgatctactctgccatatgtggcagaaatattcgtctgtggcgctgcttccgctagctttgtcttcagtcaccatcagaagagaaatggtcgcttatagtcagacgaatattggtagggcggaggaaaagatcaatgcaatcatgcagacactcctcgaccgtacgactccctctacctattcgctttctctgattagttggcttctatgagatttactaacctcagtttttttttcactgcgcgtcatcagtcatcaattcttggcttgctcttcagctcaccaagcagaagaaactcgattttaagcctaaaaacgatgatgtctcgttcgagagagtaaacaccgaaccctgcacattggcgctagacgtattggaaaaagtgaaggtagcgactaagtcgtacctcagtggtaagaatgctgatgggtttttgaccgaagttggagttggcttccacgcgttagttatatcatttgttattcttcacgcctctaaagtggtacagcggaatcgtggtctagtatagtagctgatagatctaggtgatgtcattattcgtaaaagattgctgctcgatcacctcaagaaattccccgtcagtgtgactggagcattgatgctcacaaagtaagcttttgccgagcagtttttacttcctttgatatgacgacatatctgatcatctttctgaccccgtctatatgtttctgttatacctgtttacagagacctagcgacttaccaagaggcaatcactgcgtttggaatcccagtgttgaatgaacgattcgccatgctccgtcaactaggaaacttgtttgttgtccagccggaggtcctcaaaacgttcatggcagagtcttacttgggccagattgagccgagattattgagaccttacttggcccagcgagtcgattactcgacgtatgtctcgagttaatattgacattcaagtcgattcaattattaaccttgttcttaccttctgttcgtattcattttcatcagattctcgaagagatttgcggaggacgaacgtttcggaatcgacgtcgacgcggtggcagctggagcagccgacgctgccatcaggatgcggagcaccctcacaggtcaagctcgaagcttgggcaccaaaggcttgaaccggctcagcgtaatgatcaaagagcttgacaactacgcggcttcttcctctgcaagttctagtccgacaggaacagaaggacagcacgtcggtcgatcgtctccgatatcaggaagagcatcgccgaatccggctgctcggggagctatcccttatttttctaagatgccactctgagagccgtacttttgtcttgatcctctctcatttgaaccgctcgccttgcttcttctcttatcatagatgataccccagtttcttcctcgctttcttatctcttccaataatatctagcacttgtatctatcaatcgcatctcaccacctctcgacaatgtttctatttaatgataccctgtctctcgtcgttttcttctgccctgaccatactgtacatagcatgcttggattttgcagaggaagaagaaagcaattacatatgtcatgatcatacaaacaacaaggaactgagggaagaccgagaacattcgtatatccgaagtttcgacctgcaggaaaggggtttctatatctacgaggccatgacttcatccttcacaggatgatctccgtcaaccttgttgacctcacccagagcactcttctcgagttcccaactcctggaacgatcgggaaaagggtttcgatcaacactgtcagcaaaacatcggattgaggacgccatgatagggacaagaaaaaacaacgaacctatcaaaccatttgttcggatgatccaccgactctccatttcctaatccttcacctttctgaacgtccgaccgatgggtgagctcgaataccctcgtgcaagcgacatgatagtgggtactcttcacttgattcatgacctcttgaagatctggtccagagattcgataatctttttcaaggaagagagatagtcgggcgggagcaaagtgtcggaaggggcagccatgaatgtcttgtgcgccaggctgatcttgagtgagaattcgttgacaacttgatgcaaagagttttagaaagggtagtaacgattattatttcagtaagagaatgttgcgcaatcttatgtaggtagaactatacagaagaggtgatagctccgtacctttttggggcatagttcatctttcgaccttcaagtccaaacgaatgtcgaatattgtactggtattccttcctaaacgtatcgtccgtcatttttgacggcaccaaaaatgcctttctccaccataccaaggcttcctcgactgacagacccactccctggaggtgatattcacgtttccagaaacccaatcaatgtaacaacaaggattgtcaatgtaaaaacttaataaatagaatgagtagtatgtcaggacgaaccttcaggaacaacccaagctgaagtcgagcgtagtgtttcaggtgatgcacgttttctgtaacattccaaagatgccgcatgcaaggtgggaaatgtctaggcgccagatgatcgatcatctctgccgtgacagtctcggaattgttgtccggatcgaatgtgtactcggtagacgccgagccggtgaggtacgagagggaaagatggtttaaaattggtaagagccgttggtcttcgtctaatcgaggaagatatttggcagtgagctgttgttggttgttatcattgaagcgaacgaatgtttatcagttggcccttaggtaaaataaactctgaacacctctataatgatctttacaaacctctaaaccagcttccagtcgagcagaaaatgcttgaagaaccagactgagctgttcgctctgcggaacatatgccaatcctcccttaagtaacacttttctcttctcaaccagatcggggactagtgtccagtgaactttgtagaacgactgcgctcggaaggcgctttcgtctaacttggtaactgttagcagatcgaacttgagagattctttttctggttcagaaacctgttggtaccaggtgaacgagagatatcgatccatttgttcgagaggaaaaataggagagcggaagaggggaagagggttagagactgtctgtgataacagggcgatgttgagaacgtcgactgaccagcttccaatcaagctgcaactctttaaggaagtttgttcgttcctccttatcatcgctctcgaatcgaattttaaacagggttgtttctgctcgtaggtatcgttttcgtagttcctcactttaggcaatagaatccagaaacacacaacatgtcaaaagaacccgagggtatccaaccagatgcttcagtttgggttgtcctgcctaaggagaatgagcgagtagagaatggctgacctcccgcagaaagctagccttagtacgaaatgactgatcacatccttctttctctctgcacttaagtcaacattctttgctgtgttagcactcaacggaaggtacttcttggacgcttgctcgtaagacgttacgagctgggatggcggtagtcctctgatctgagcggattcgataagtgaaatgactgtttaagagatccagcgattgaaaaataggaagcgaaatagaactatgacggttgagccaaggaagttttgggaccatgaaagagggaagacacgcaaacaggacgtacttctaagtcgagcgattgcgtactcctcaaattcctccaaagttacatcatccggaggaggtcgattataactattcgtgccaggaggaaacggaacaaacaaaaagcgttagttcatgcatgggcaaagctcaaaatctcatcagagaatcggtctttgtgtcttttcctagctggtcctttataaacttcagaacgaacaaggaaaaactcacaagtttaacctccaaggatatttcgaactctttccatgttttgtaacttccgggccagatggaccccttcttctcgagctagtagctgcgaacatctagtatggaaccggtgatcctgtcgattgctaggggtatctttgtggcttgaatggtcttaagtagagctctgctacggtaagaaagagtgtaccaaatgagaaatggtcgaaagcaagaagtaaggttcgagtaggcaaaaggcaagaaaaggcgaagaggttctcttgacgcgacgcgtctcgatctcaacgcgtgtttgacgcgtctcagtcaacactcattaaacacgctcttcacaaagaacaatggacggcttgcttttcttcaagtacacgttttgcatctatcatgtttcatctttttttatttttggtatgtagtatagaggtg

SEQ ID NO: 243 - DNA, 66452 bp, Xanthophyllomyces dendrorhous
atgtagtatagaggtgcacagagaaaaatgaagggtaagagaagaagaataaagaacagaacaagcaaatgtaaggcagcgtgaggaagatgagaaaccagggcaagccgagatctatgaccagatacgtatgattgaagcgggggggagagaacgggggtcaaactgcttgccaatgaagtagaagaaagtggacttgacagaaaccccgttaagaacacgatgagagagtggaaccgatggtagagaaacgattatgcgtcgatctctccattggccacggcagcctcagccttggtagccttgacgacggctgggtcaacggccttgagcttcatggcagattccgggtgaggcggtcggaactctcgctcatttcgggcgagctgttcttccaagcactccgaaccagaggcggcggcaatgaaaccaaggaaaggaggtgatgggttgagaggtcgggagcagaactcagggtgagcttgaagaccgacaaagtaagggtgacctgtaatttcccgatgaatttcaaccagagccatatgagatacagaatgagcaactgcacgacttgattgtgcctgattgacgtagagaaagcatcagtctgagacggaaacataccagtcatctcgatgatctgcatcctctgtccggtctcatctctacccaagaacttcaactgctctccgtccttgtctcgtgccttctcgaacgtgggaaccattttagggttgacctcgtaccgatgtctgtgcctctcccaaacggcagactttccaccatacaatcgtcggattttgctatcctcagtcttgggctcgaacatggttggtcgcaaacccaaccgcatggttcctccaaggtgagtcttggagatctcaggcatgaaaatgacagccgggttgagggtatccggggtcaactcagcagagccagcatctatgatgcggagaatttgatgattgaaaggttattgatatagacctcgaataacgttgtaagaggggaaagagaaagcatacctttgatgccacagacgtgcctagcccactcgatgacggcaatctgaagtcctaggcagatacccaagtaaggaaccttgtgttctcgagcccacttggcggccacgatcattccctccgttcctcggataccaaaccctccaggaaccatgataccctcagcagagcaaagagccttccaggcatcgtgatacttgacagggtcctccgtctggacgttgggctccaaatgggaagattcaacccactggagcttgagcttccgaccacatcgcatggaggcgtgctccaaagatttaacaacactcatgtatgagtcctggagcgaggtgtactttccaacgagaacaattttgacagaatcgaaccgacgatcatgtctggtagaaggtcaggatatgaagttttagcaaataatccttgggcaaacattgcttcctcgttagaaatgataatcagaatgatggaaaatcagacgcttacccagaggtcaactcggtccatctacccagaagactatctcctcgcttctttccgtcaggtccgagatcgatctggtcgagcgataaccttttctggaggtaggtcaccaaaccctgatccctcaacagcaaaggaacgtggtaggtcgaagacacgttgtgaacaccaaacacctggttcgacgccactttgcaagtcgacgccaccttccgcttggtatcagactcgagctcaacctcacatcggcatgcaatcttttaatcgtgttgaaggaccgttccgcgcgaagattagtttgatggattacttggctgatgaagtctaggataaaagcacgtacgatgtcggggaacagaccggcattcctgagcgccttgacagttgactgggtaggcttcgtcttctgctcacctccaacgacagggatcaaggtaacaagtgcgacggcaaagttctccacaccgactcgctcttggaactgactcatggcctcaacgaaaggagccgactcgatatctcctacagttcctccaagctagtttgaggtgagagatacaatgtcaacgacataaatcaggtggttaaattataatggaagagacgaacctcgatgatgcaaacatcaggcttctcagcggtctcatcaacgggctgagcagcgacgttctcgatccactcctggatctcgttggtcaagtggggaacaatctgtgaaccgagtgccatgtcagttcgcacatggcagagatagaggtaatcaacgaacgtacctgaacagtctttcccaagtagtctcctcgtcgctgtaggtatgaaaaggaataacagatttaggcttattcggctagaaagataatctatagtatggaccgacctccttctcaatcactcgctggtaaaccttgccggtggtcaagttgtggtttttggagagagtgacatccaaatatcgctcgtagtttctgcgcaatgatgataataatcacaagagagtaacaacgatatccacgacaacagcggtagtcatgacgtagtcaagtcaaaggggaatatcagtccatcgtcctcatctatgccaagtgatagattgaggttgaggttggacgaaccccaagtcaagatcaacctctcctccatcgttgagaacgtagacctcgcctgtaacgtttccggtggcgtatgcgacattagcgattcagggctagaaatcttgtatttgtttttctgaacgtgagttagcttaagaacttaccgtgttcggtaggagccatggttccagcatcgatgttcatgtaaggatcgattttgacagaagtgaccttgagaccggtagtcttgaggagaaggccggtagaggaagctattgtagtactcgagcatgagtcactttgagcccttagacgtgctcaagaggagaactatctcactaaccaataactccctttccgataccgctggattatggcagtttggccgggtaagtataccgttctatctataagggtgagtttggtaatgaataagaaatctaaacgaacgaaatgacaccacctaaccggaataaaaccaagagcacatcaagatgagacatggtcagcttctcaagattcactatcattcagcctagacaacagcctggacacgtaaggtccgatatatcttgcctctacaaaatctcaccacacaaccaattaatacatatacgtaccacagacaaggatgtacttggtcattatgtgatcttgattagttgttaacaaaagggccgggagggaaggtaagggatatattgcacgctgcaccaggcagggaaggaaagaaaaagaagaggaaagagaaaaaacagaaaatgcagaaaaagattaacgaaaaaaattaggcagcagagttcgcggtaacaagaatccggattgttacattttgggttacgatgatggccacgtgaatatcgattacctaacaaatgttcattacgtaactagttcggccttgcctcgtaccaactccaaacatctcgtctagatacacggacaccaaggaggaagcatcgacaaatacaaaccatctcttaacatgtcggggaatacatacgacattccttcagactggcattcctccttggccactccttccacttcatcagcttcgcagtcagctacttcggccttgttgctcgaattcgatccgttagaatctccctcggtcacagactcgccctcagcaccggctacactgccatccagttcagcttcaactcgatcacctccacctgcttcctctcctcccggccagacatcgtctagtttaaatttgtccaggccctcttccatcaataccatctcatctttcaggtccaaatcatctaacaaacctcactcggagaaagaagaacatgacaaagatagagaggctaggttggacaaggagggagatccatcagataatcgtgtgcagaccgctcagtttgattttccaaaagtgagccaattagtaacatcttcgagctgctgtgactgtatgactaaacgtctctcatctttacacttctttgatactcctgattgatagttcctggagcaactaaagtcaaagccagctgagccggtagccaaatatctgaagaggtgtgttgatgccaattcgttctttgagcctgttcataagtaggcactgccttggctaattctcaactgtggttattttccagttttctgatgaattttgcaaagaaatcgttcagcatgaatgagatgattaagctcatccatgattttcttcaagtgagaactatcttctttgagttcatatgtttgcgtgtgcgtgtgcgcgcataagttaatggattatatgcgcttcctctttgatcgtctcttgtagttcatctcggccaggatgcgagaggtacccccatggaaaggaatgagcgagctcgaatttgacactgcgctagattgtatggagaaactggtgatgaatgtcagtgtcttctctttctgctagctcgtcttggtcaacctcggagagtttctcttcttgttcttcccaaacttacctttttagcaacctcggatcacatgaaatagcgtctgcaccctttgttcgtctagctgatgccctcttcgtctgaattgatagtatgtctccgaattctaatctttgactcccacctcttgaactcgataaatatctcggattagtactttcaccccagtaatagattcttccaagcatcacatcacgacggatgaccttgagcgggacaaaatcctgcaccaacgaatcggtctctttggttggctcgaggggaaacatctagatgtgctgaatgaggatgatttggatagggatcaagttgaagggtacttaaaattcgctatggacggtaggtcaacatacctgctcttcaaaagaagggagcgcgccgtcagcgtatctcgagactatatctattttggcatttatgcatactgatttagtgtctgtcttgctttggctatctccctttgcacagaaatgattaagatgaatcactataaggtaagacgatgaacatcaaggccagatgaatctagacatacgcttatatctcactcgcttcgtccatgatctacgtctggttgaatactccatgaacacgattgttcttgtttaggccccaagagataagctgatctgcattttgaacagttgtaaggtgatattcggttagtgtggtcgtttgtctctgatcacaacgaaccaatctgaatatcgtgttattaccgggataatttggagcgaactataaaggaatgattcggcagttatcagcgaataagaattcaggaaaaaaagcggaaggttcaggagccgacactttcatcccgatactgattttggttgttctaaaggccaacccagagcatttgatttctaatgtcgagtaggtcttgtctattcttttgactacctgatgatatcggtcgagacatgatccgattctctgtcgccttgagtatgctttttgtggttctgatgccgtgttcttgaaacagatacatcaaccgattcaggagcgcttccaagctacaatcagaagcgggatactacttgtcttctctagtatgtcctatacctcatactctcatcgacatgcttgactgctcttctgatatgatctgacacacttcccttgcgtatattcttgtttcgaagatgggttcaataacgttcatagaatcgatggaccataccgttctatcaaacatcactcagcaggagttcgaaatgtgagttcggaagataatctggcgaacgactaccgtagatttgcctgacccgttcttgttggatcaatcgaaaggaacgttgaatcggccatcgcccaccttcctccaaattctcccctatctcctaccgtatcaggatttaaatcgagcatctccccattccctccccctgcctcgtcctcgtcgtcagcagtagcagcggcggcggcgtctgctcctttcggcaatacctcggaaggtgaagaaccagcaaacattatttcctttattcctaccaactttgctcttggatccaagcgattctttgccaagacgggtgaggcagtgacaagacctttgggcgcgattggaaaactatttacggatgtcatcgagggcggtctggaagacagtcggccttcctccgcatccggctctcgtccagagagacaacttggtggagggccatcggaaactcaacgtccataccagccgagaatcagatctccccgccctaggtcccatgtagacctcaactcagacccagcatcttccacaaataccaatgctgagatagaaacgtcaacaatacaaaaaccgaagcccacgcaaacattatgggatcgggtatcatccgaaattttgggatctcaatcatctcaaccacctggctggcaagagagctaccggtctcatccttctgcgaacgctcgtcctccccctcaacaacaccagcagtaccatcagcagcaactgccacatgacccgtctagaccatttgcgctcgccccaccggagaacaactattaccacaatcatccaggagaatacgtcttctctgatggaaacgttgaggaagacaacattgactacgagagactacagagcgagttggacaagagggaccaacaggcaaagtacgtcatatttcctttggtcttctcctcttcgaacttcttcgttctaaccgtcgtcttataatacaacctcttgattgggggattgcgcctatcagacaagccaatttggagacactgtctcaaatctgtgagctctcaagcctacttctcccaaagtatcaatgtctgccgatccgaagaccatttgctcacaccccaatgcttcacgtttcttccgccccggtgtgtatgtgggtatgtgacagttccttctctggacgccgaattagcggctttaatattggacaataaacagggcgacctaagtggaacgatcgacacgcttctggagatgggaagctcatgagccagacccaaataacatctctctattcttcatgtcttgatgcaggttatcttcttttgttcatatcctgatgaaatcttccatgacccgttcaaaaaaatctcttcaaatgccatgcagaacgtgaaccttagcgaacacactaaaccacatcagagatatgttcccaagacaagtaacatgacaccttgtatatttgatcaagttcagatccggaccctcgggaacgccaatcaggtcgatttcttctcgtcgagcgatctaaggtatatgtcggctttacccaaggcccagatgcagaatgagaacttgaactggataacaaaatcgatcgtgtccaagtaagcttgtattcagcctctactgcgaacatgagacgtgcactacttacgttcggatatacaatctaatttggccagataagttgaaagattgaatggataatgacatgccatgcgaattagtctttgacatgacggtctttcgtacaggaatgagggaagcttacagcgcagtttttattctttcagacatcgagagaaacaacgaaggctttattagtttgaagacaatacaatgataccaggtacagatgagaaacttacgaagataccctcgatatcttcttgtgcccaacttccattgggcaactgacggctcatgataagcttcaatgctctatcgataggcgctctgtctggatacttggctgataccaggcagagtacagcccaggaggtttgaacgacttgagaggttgaatggggacagtatacaccggtgacgcacgactaggattttgaaaatacacacacaaacaaatcgatagagggttattcgtatgagcctctgtgtttaagtaggtctttgtattctgtaaggaagactgtagagagcaaaagagctgatgtaccatgtatgtctctccccaacctccatcctccatctgcttgctcaacaaaaacgaacaagcccttcggacgctctcggagttctcaaaagtttctccagcgagtgctagagactcgagcgcgaagttggttgcatacgtgaaacagattccccatgaaccaaaccaggcaccatcttgttgctgagaggaatgaatatacccgactgctcgcttcacacaggacctattcgttgcggtggtcttcgtcagaacttgatacgcgatgctccaaggttggaaccatgaaaataacattcaagaacctactgaatctcgacttttcggtaattgggatatcgccgggagaacatctgaagggccgagagaacagacgtcgtacactccggatagttatattcggtcatgatgttacctgatcaaagaatgacagagtttgtgtcatttgacgtgatatccttcatccgtgaagcacaagctgaactatcatcaagaaaatagactcaccaaacacttcggcatggttgaaaacctcaagaatatggggagcacggatcagctcgtaactagcgaatccgccgtttgaattctgcatgaccagcaagcaatctaccgcattttcgagtctcttcgcagagacagcttccggcatggatctagatccgtttccaaatcaaacacagagagagatattccagcttatttcttctctttctatcttgtatcacggaagacgtgaaaggagatgaacgaagaactaagaactaacggtagatcttgaagtcccagaacggccttcatgccctctgccgtacagtccgagacgatatatgattgctctggggtggaaaatggccatgctccgagggttccctgtctaaaggattccttgtggtgcttcgcttaatttgtataagagagagataccatcaattattgtagaaatgatcagaccgtgctagatggattgaaaaacgaacgattcgtccgaatctgcgctttgtccagccaatcgagacatctgagcatggatgtatggttggaaggctccgtagccaattcggtttctaccaaggcttgagatatgaaggatgcgtcctgagatcgaacaacacatagtgtatggcattaagatgtgggcgcatatctcacatcaccgggtgaggtcgattagaacaacacatcttacttacccatagttgacttccactacagaaaggagaaccatagagtaaagatgtcaagcataagaaagcgtcacaaacctcaaaataagccctgaccaaatatgataagcgaacacagaaaacataactgacttggtaccacacatcatcaagccttctcggcccatccataagaaatcgtccacgacttttctatggtctttgacagcctgagaactgtttaaatgaccaacataccgcagtattggtcaaccaaagaggaacatgcattcttcttctctgatatcactgaagtaagagtccaacaaaggagaaagacacccactctggaccatcccctacaaatctagcgaccaggttgtaacatttgctgacaggtccaacagtttgacaattcgtattttcgtcctccatgaccaccatccgatagttcctttctaaggctaactttctaatccaggggaagaaccgaggaatgacgtattcgaggaaagcaagtgggtaggtcaacatctggaagactggatgatgcgggtagtataggtcgataggagagatagcgttggagagcttatggaatgggatgttctcatatgtgccaacaaagatttcctgtttggggttcgatcacgattagagaaacttatcatgtgaaacatgtcaagattattcgggacaaagaaaaggacgaacggaacgaagctcttcaatgagcggagtaacaggacactggaacctcttgccgtacaagtataccattgggaaatctgtattgaaaatgggcaggattagtgtatgagaatttgaacgtcagagcaaagcaggcataagcaatatagagactgacagaccgctcggacatgaatccaccatctccatggatggacaataagccattttggcaatagactggtatagatggaaatcgagatctcaataccgatcagaatgagaaaggaagagagaagagactaacatgagctcaggacaaatgggactgagtccttcccatttatagcaattcaatattgccactaagtgcaaaaatatgttgatgttcagtttatttggctcggtgtaagagattatcgccgacttaattcaagaaatgtatgagcagccaatatactcacgccatgctttaccccaactagggacgacttcagctccacccatctccatgagctttttcctggctttttcgcaaacagggtgtgaagacgggaggcctaagattcgaagagaaacgtaattgagcgccgttccaaacactgtcggaggagaatgggtatgtctgttgagaagtagataggcatcacaagaagcgcgcgttcgatagattagccaatttacatgcgtcccatagacagtgaagcgtgtaaagtatacatacattccccaaccgccttctttcttgtcggctctgttgcaaaggtatctgatcatctcgagtctctgttcctcctcgaggggctcggactgagtgacatagagagagattatcaatcctgatcgacagtgcccaccaagattacgtgttgtcagccggataggcagctttcatcgaactgaaatatataataaactgaccaggaatcaaaaacataggtcctccatactctccactccaatgaccatcggcagactgaatttttttgtagaactcgaatccgttctgagcggcttccagaggggttgaagctttctttaacttgggtagatcctgctcgttttaaggatcacatgtgcaaagaatcatggattgtcttgagcatctatgtttctgatttcatatttattttgaaaaatctcactgtctccaggccgagccagaacttatcctccgtggtctgaggccatgcgtcttgctcctccttcgttcgaaggtacttccattcatgtcttccatgagacccatgggacacgcgaaggcgccagttgcgtagatctgttgcctggtttggcggcggctgataagaatagtcctgaagaggtggtggtggtggtgctttctgtcgtattaaaaagagcgtattttatcaatacagagacgagtaaggagaccagtgtatcaagaagaaacgcacggccttggcctctgggttggcagacttccagatggctattcccgaccagtagataccgacagagaggattcctatgaggacaatacctgtgggcgtgtatccctctggaatcagagaggtcatggcgataatgataactctgtgtgtggatgagaggaagagattgctgggagagaaacctatccagcatcgttttatcattcgagttttgagacgatcacagaagatcgttcgaggtgactaaccgcggttcatctcggcgcccactaatcgccggccgcttgtgatgctaaacgattacctgttgactcctctagatgtagatagcttcactgtggtgatctggattatcaactctcagaagttatatgtcaggagaatgagatgatgctcgttcttgctttgttcagtagtgtttaactcgtcttcaatgtaatttttaattgagtgccagggttgagaagttcgctctcggtggcttcagtcggttgacgttctgtttattgatactcttcttctttttcaagttgaagggcggccaacaacgattttgaagcatcgcagcataccactggctagagcaagtacatgcaacatcatcccatagcatacacagagaaatgtcagtggtgtggaaaagcaaatcgtcaattcatcaagtgtagaacacgacaagccgacaaagaaacaggaaagtaggggttctagagatcgaatgaagcccaggagacgaaagctaagaataagatcaaaacgaaagagacaaattcgaagaaaaggacaagaggaagaagaagaagaagagaataagtagggtatattctggatttccatggagaaacattagttcctttgttgattagaagcggaactcgagagtactggtctagacggggagtcgaacaagcctcgagaggtttcaacccgagatttagctgcaacaaaaggccgaagcaacgaatatgtcagttacacagatccctagaacgatatcgttgagtagaaaaagatatagacacgagaatcggacaaacagtttaagacttccatgtcacggtcgatcgtaattctccttcgagcacgcgcagaagcgctgtttgacttttggtgtccatgataaggtaacggaggtggcttggctctagaaggtatataggtagatccagggctgggtctatcatatgagagtccgtcaaacccaaaattaggtgacccaggtaaagttcccaaaggttcttttgtatgacgggagcttgtgagagaaggcgaggatgggtaattgaggctagatgtcgatggagttgggctcgctacaatagattctaggcgggaatagttgtttgatcgaggaagggtgtgagctcgagtgttgtctttgttgatgacagatggtgagcgactagaaggcgtatcacaggatgagctgggtagagccacatggagttccgcaatctggaataaaagtatcgaagattctgtcagaacaagcaacaatagatggagtgaacaaattacatcagacgtgcacatacttcggtcaacttattgagtctactgtgaagctcggcaattacatcgcgctgtacgctgataattttattcactaagttacaatcccgatcaaaacatgaacatattagtcttcggcctagagcatgaccttcaagtcagatgatttacttacaatcgttcaccatctcgtctacctcgacaccccgagtgaaagaagatcttgcagagtcacggctgaatcgtttgctctccttgagcgatccgctgtaatgcaggttgagcccagaaggaatagcaggcgaatgagtgatggtattcctaccattcgaggtcgatgccgtcaagatttgagcgttgagggcattgatccgttgaaccttttcagcaacttgcgcctcaagatcggccacgatagacgctgtttgggtgtggtcattcttctctaattgaaggtctcgagacgcgagttcggcagactgtttgaagttgtccgtttcagaacgggcctccttaaggtcgcttgtcagtttgtcaaactgagataggagctcaatctgatgctttgtttggaaactgagtgactcctcaagctcgctgatcttttttgaaagactctccatctctgatcctcttgcttccttctgcgtcttcgtctgccggtccgactcctcatgcatctctctcagtagacgatgctcgttcgccaaaacgctcgcgtgagcagactcggcttcttccatcttgacctcttgctctctcatctgtcttgaatgagacttgcgctcctcgtctaactgctgttcgagcataatccgtaagctatgcatttcttgcgcgtgtttaatctcctcctcagctgatttggaatcaagcagagccttgagcgcgagcacttctgaagcatgttgagacgtctgctgggaaacctgggattcaagagtggcattagaggagcgaaggtcatcggaggacgttttatattcggctagttgacgtttcagctcgacctgagaggtgagaagatcctgggtttgaagaagagacgcttctctttgttggcgaacctgattgagagaaagtcgagtagaatcaagttcgagattataagcgcggtcttgatcgactagacgaagaccaagctggtcatgttccagcttgagagcgtcgtacgacttgctcagttgttggaccttctcggcattagtcgaggaagaaatttcatgagactcttccgtagcggctagtcgggagcgcaactcagtcacttcgagctcgagctttgcaattttgtcggtacatagaagtcgggattgagcggaagtctgttctaaggaagcataattggtcgaagcagtagctatctcggattcaagatcagacactttgagaagaaggtgagtgattgtagattctttctcggcaagctcatctggagtgatggtaggtggtgactttgtagatgtcatatgaaccaacaagagtcaatatgtatgcctgtgacagcaccagtagagctcaaattaaacttactagagtggtggtcttatcaatattctcctcctcttttaccggagtacttgttgagttgtccgccgtagaatcagaaaataatcctctcgcccgtcgctctttccctaaacctccaaacgaatcttcctcaacaactccaatagcactgatgtatctcttcggcgttgttggcaaatcaactgagggcattcctaaaccgaggcctgaacggggaagttcagagatccgacgtcgggtgtgaattggcaagaaatttgaggatccgaaagagggagaggatgggacggcctcgctagtcagcatgagacccgatctgagattacacagacggtgatcgacagagatgtagtgaattataaaggtcagaatttaggaagaaggaaagaagacaaatggcatatttatgatcgaacaaagacgtacaagttggtgatttgagactgaatcttggttctcaatagctgaagtttttggacctcttgctccgactatcatccagagtcgtgtggttagttcttggctttcttcgagagttcgaaccctacgcataaatcgcacaaacgatatggatagatcacatacctttattctttcttctctaagtctagctagcttttctttctccgattctaagctagcctcaccttcggtcgcttcagaatcactgtcatctgagagatcactggatcgaatacgtttcgcagaagcttgcatagaagctgcaagttttgttttaagatctgcgatttcctggaggtatacctgaattagggcattgtcgccgacaatctggagacatatgaatgaatttagaagacaaatactgttcagcgaaagggcacaaggaggttgattcatatgtggatatgaacttaccgttcctcgttcagctttagtgacgaccttagaaacccgacgagcgaatttcaaagttgctaaagacgaatcaatcgacagaacagagatcagccttaaggattggtgacggcatatgtcgatgcacatacgcaagaagcaacgtacctaatgattcatacgcgtgtatctcatctgttcagaaagtcgtagaagcgaaattcgtatcacagtcagtcaacttgatggtcgtgagaatgtcaaagaaaaagtaccgatctcttgaacgcatactcaccaagagatatcgtgcagacgacagctatcttagcatgaccggacagagaattttgaagtaaccttgtcaactttgattctcgataagcgataaacccaggcttcggttcggtaagcttttcgatcacgttggctagtgttaacagactatggattgaaaaggcaactccatttcctctgtcagctggttacactgtacgcaagaaaggtagtcaggaaatgatatgaaccttttgttgatatagcctccctcttgacggcgagtgtcatccgtggtggctctttctgaacctgccaaatcaatcagattctaaattcgtcaccagtatagccattagattcatgcttctggatgtaagaacagaaatttttaaaagcactaacaagtcgactcattcgaacgagacccatagatggggaagttttcggtcttgattgagagttagaggccatggagttcaaggaagatgaggacatggactgtgacatcgtcgatgcgtttccggattctgacaagagtcgtgactcgatgacctgcatgtttaaagtaccaaagaataaaaccatgggatatcaaaaaggactcgtttctagatgactctgtgaagaaggaatgaaagaaaacatacgactgaaaagactgtgtgggatcgagaactgtgttcgttgaaatctgtttttccgttgcgccgattgccctctccctttttcaaacaggcctgaacttcttcaggagacctgactggtactacatgagggcagtgtgcgcgatcgataagaacgatccggataaagtcaacattgtacggcaattaacttcaatcgcgcacaaaaccgggatgacgtaccttcttccaagttatcgacaatcactctcccatcccgctcatgaatcaccggaatgacctttgagttaggattgagcaggtcgcgcaacgtctcgttgtaaagctttgagggttgaatgaaccacgagatatcaatatgtaatttaatccagtgttgggcatcagaaacgaacggtgaaccgacctcaagatatgaaacgcgtagcaaaaacacgcgctctttgcactcgtcgatggcatcgaagatctggtcgatagctcgtggaatgactcctggatctccttccactcctccctgggaattgagaatgatagatagcaacatgtcaagattcgttcagaggaaaagcaatgcgtagtacagaaaggcttaccatggtgtaagtttttccggatcctgtcattccgtacgcgaacaccgttccgtcaaaaccatccactgtactggcaacgatgggtgagatgaccttgttgaacaaagcggatgtcggtgtgggcggaaggtgcagatgatctagcgcacggtgtgattaacatgattttagagatgcgacggatgaacaccagagattgggttatacaacatacctatgtgaaattctccctcgttctcccttcctttgattactccaccgcgtttcatgtttgtcggatggtgctctgctaaagaaatcgtgttggtctctgttgaacagtcatatattgaggatgttggatatggcggctttgccctgatcggtcaatatacaatatcgccatgtgtgttcaaggatgttttgtcattcaaatagctcctcacagtcgatctctacaggttgaaagcaaggattatcttgacttaccgaacgcaaaccatgactcgttccctccctcccggcttcgcctgcttcctgtttgacgcgaccccagatggcttggcagcagataagaccttcgtgctcgtcccatccaacccaccacgagccgtcttgatctgttgcatagaagccatactatgtatactggaggaaggtgtaatcgaaggagtgtcgtcggtacaggttgaacttatcgaagaacggagtgacgactcctccatgtaggggatagccaagttggaaaggctggaggttgatgatggcgcttgaatattgtccgctatcgaatagcctgacggacgaggtgttgtagaagccattgaatggcagattagtagggtgtgtaggatatgtgtgtcagtgtattaatacaggtatatgtttggccgagtagcgtcgtgagtgtgtaagtcggaggcagggttgaaggaatggacgaaagagctaagagctagttgaacaatctataaccctaacgagttaaatgatcaacgacgcgtctgttgacgcgaatgtttgtgacgcgttgaacgagccacgtggataatcttaccgagcaatgcacgtcaggaagatactactgtctctgcggtcaggttgatgatgatgatgatgatgataggatcgaaactctgaatgctatccattaccaccatccttgtattctgatcatccattaattggctaggctacatgagttcttctgataacccatagtgagttatatgcatctgtctcctagtgcacagctctcaataacttggcgcactaactaggatgaacaaactttctagttctctgaattcggcattctctccactggaagcctcagttctactggaatatgccaaactatctcaacagctgaaaaaggtccgtagttagcccaagaaacctccagtgtcctcatatgctgagttaaagaatgtctattggcaaataaagattgcatcttttaaacgacagtcaaaccctccacatgaagaagttctcttagcatttcgaggcttagagaaaaagatgggtctggttctcactttggtgcgtaaatgtttctgctcgctgaaaaaaaaccatctgttatgacttgatactcatccttcatcccttggttatatttgacgcgctcagtttaaatcctcagtatgggcggtcacgatggaccaagaggaggaattcgcccaagaggcatccctagtcaataactctgcccagctccagccggatcaataccctgtcgcctatcctcaaaggtatgacgagaatgccgaagactcgctggatgatgcagatatcaccattcaagaccaacaccaaagaggccagcaaggatggagataactatagaagccatgcagattagaagccgaagtgcggacgcatgctctcagattgaccgacatcgaatgtaattgtataatcatgacgactcccataactataatatgtaccattcaactcgctcatgactagacagctaggagagttctagaggtttgatcattctgtgttgatggttactaaccggtatcatccagacgcgttccccgcatctcgacgatctggaagattccacaggctcatctctccatcgtgtctttatgaatcgttaattttgtgtgaagtatccgttgtgtttcatcctatagcatatagccttgagggccgaatgaacttccactcggtatctgctcctctttctatgccgtttcaaaccaagagaacatactcggagtcctccctgtctccaccgtcatcagctgaagaagacgacggaatccgatcaccctcacctcctcggaaacggccgtttgtctccggttcagatccttcaaccgcccagtccgcatccgatggattctcctccttgttcatgaacggagctagaaagaggccggcttgtgactctgatcttgaaggggacgattgtgatctcgggatttcatctgacgagcaagagattactggtcagaacccatggagctcggacagtccttctggcttttcatctggaaatttaaatagccatccgtggaagacgtctccatttctaggaagcagaccggaagatggttcctctagacagcgggagcagccactaagaaaacgaaccaaacggggcttgtcggaagggttcaaccagctgggaatctcggaagatctccgaacaccgttgattgaggaggagcagccggggttcatccatccatctcaacagagcgctcaacagtttgcgttccccagagccggaaatcttggaaacaacattggcgaagtgaacaacaatgaaggagacttgcaaccgagtagtgtggttgaacccggtgaagttggtccggctgtgtggttgggtcacgcgcagaatgacgacgcatcagatgggctcagatttaccgtgttaaacgaggatgggaatgaagaaccgaaactgtctaggcagtctaatcaggaagattggaaggttggagtatggaaaggcaaaaacagagaccaaggttcgtcctttgcacgttcgtatgttttagatacatacactccttttgatggatcgttctggtctgaacagcttaactgatcttgtaggtttgacgtgtagggcccggacggttgtatgttcatccttcgtatatgaaccaacacccatcacattcttcgtatctgccgagttctcatccatgggacccaaaccaacctcataaagacatgatgtaagaccgttctcttccatatcagatattctcaagactgaccgttttgtgatctttccctgttacgttggctttcaatatccaaacagattatataacccactaaacaattcacaaaaactgcttgaaccatcgtcaccgacatcttctagatcatctttcttatcgagtaacactccaatcgacgctatgatggatactgagctgtattccaaccctaatggaccgtcatatcaacaagactggttcgggaacggcccccggtttgaggaaatcgcagacgacgaacccagtccagaggcaggaggaggaatggatattgactgagccggatcactagacaacgaaaagccttcgttctctctccaattaactcactcaacttccaattcttcaacttctacattcttgacctcactggctcggggcttctttgtcttcattcggggcaaggggcctgaagaattttgtctcaatattggtacacacaagattgagtggaaagagcgcaggacttgatacaaacccatgaagggatcgtcaccaacatcatttattgcctatcaatcatctctatcatccatcatacattatctgccactcgccgctcatcatatgatgcgcaccttcctttcctgttttcgtatcctcgcacgcgcgctctcttctccgttgtatccatctagcacacaataccccttctagtctctatcatctacacttgcatccttcctctcttcttcttaaaactagcaccctcttacatgtattcgatccctcgcacaaccttttgacattctctgagaatagaatgatgctacactctgatcgccgagatttatcagctgaggacgatggatatgcaggatgagtgaaagatgggaagaacacctgagaaaggatataggcaccccgatagataccttcttgtagtagtaagatctagaggctcgtccgtctcaggtgtacatttgagaagccttcgactcattgtcggttaacatcaacaggttgagagagcgctcctctgcaaacacatagtcagtgttgagcacaacgactaccagaccaggagatagatggaataggatgtacagagagttgttacgcgcgcataacaatagaatcactgagacgtctagatcacaagagaaactgccgggtcttccttccggtatcatatcactcgttcctattcgcctatcatgatcaaccgtttcaaggatggacgagctggtaaggaagtttgttgatctgagcagggtgcaagtcacgagacacacatggaatcctctaactgcagccatggtctatctagcccaagatgaaaatgcacgactcggctgtaaggtctagattcgacacggatacggagtctccgttgtcagcaaacaggccgtctaaactagaaagtatgcgtcagaagccggaaggccctcttcgcagtcagtgccagataaacgtcagcgaagaaccgaaggaaaagaggtgcactgtcttctttcccagtaagaaaacaggatatctcaagcttgccaacgcgaccagaccacgggctaatctctagctgacaaccaacatccaattgacatgaaacaaatgttatctccgcagatagagaagcatagatgatgagtgttggcagccagtatggtcgcccaagatttgttgtttcttagtgataacagaagtcagatctcctccatccgagggttcctgacttttgtggaaagcgaattgctgggcgagcggcctgctgcgcatttgacggcagtgggcccaaggaagacagtcaggcgtgtgtagcaacaatctagcagcagtttgtacaccaactcactcgtacgtatgaacacccgttttgtcagtttgtcgacggatggaggagagactatggcagatggatatatgcacatagtagccttacagaacgaacgaacgagaacctaacgtttgattgccgtttttcttgctttttttttctcttcgctttttatccgactgtgggaaataaattatggtcaatttttgggtacaactggaatcctcgttcaaattggaacttttcgtctggtgtctatcgttttttgccttcaaccgctctacccgtcctttcagctcaagaccagacttgtggtgagttttcggtggttttctagagtttcaggtttggattcgaatgtttgatgtgaaagaggtctaacttcatcatgcttttaacgtgttgtagtagcaatggctgttcgtatccgaaaaaaatgctggtctcatcaagttctggaaacgttggatttctgaccttgaacaaactctccactcgctgtctttcctccgatatgtttttgtggttgtctctttagcccgttcaagctccttccaccttcaagcgattcgtccaggttggccgagtcgtcctccttaacgatggaccttccaacggaaagttggccgttatcgtcgagatcattgaccacaagcgggttagtcaacaacgatgtctttagcgaaatgaaccgagatgggtttgaaggatggagaagtgaacagccggcatagaacatcaatctgaccgtctttcattttttattatcacctcaactctacttcgctcgccgaccctgtcttgtttgaatccccaaatccactcatcctccctgcctttctcacctccattgcttaacctgtctacactcgatgatcaccctatctccgtccttttttctgatcacttccggatccccttcgatatgttatatccccaaccgctctccaatcgtctacttgcctcgccaacaacctcatttcgaattttgaattcgactccctctctgccacgacatcctattctaaaacacgattataggctcttatcgagggatcttccaccggtgtcgtccgacaggccatctcctacaagaacttgatccttaccccttacgttcttaagagcttgccccgagctgctggacccaccgctgtcaagaaggctttcgaggcttccggtgttgccgacaagtgggctgcctccgcctgggctaagaagttggctgccaaggccaagaaggccgagtctaccgactttgagcgagtacgtgatgttcgcttttttgtgtgtggtagcatctgggtcatcagttggacgagtggtagaaggaacgaaggagagaaagatgaaatagtccaactggccaggatgttcacaacggtagtgttgaagatactgatcatacttcgctcttttcttgtatcgtctagttcgagcttatgatcctcaagaagacccgacgagatcagctcaacaaggccatctacaaggagaagaagtccgcataaacaaaccgggttttttcttttctgaggagggttttgcatttgttttttttaccatgattcgatgggtttttttttgttgtttttgggcttgttaacgcctttagccgtgcatgtcgatatctgtcaattaggtcggcaactggaagtcattttgtgcaggacttagttgatcactaacattgctgtgtcgcagaaacaacagatggtctctggcttacaacacatagagaatggagggtcagttggtatgacggatgacgaaacggcactagatggtatctcaattggatcttgcgttccgacctacagagatcgactgctcgatttttaagaagcagcggctcgttcattcgtctggatcactcgacaacgcaatccctcgtttttccgagtcctccatccaagttttgtttcacgtcacgtcagaggtcaaccccctccgattcgactctatctgataatcttttcatccgccaacgccgttcgacttcagccctagctgactggacaaataagaatacacgagtccaaagctgagtatgggctgatggtcaaacgaacggatggagagcggaggctgttggaactcctctcatccatccgttcggtattttttctgagaacgagaccgcgcgtgcatccagtctaggacgcaaggatgtacgactaaatatgacagccgaatacagttacatacaacgtcacacaaggtatagacgtcaaaaacgaagagaatgatcagaacgggcatcaattcatgacgactgttctcgtatttgaaacacgcctatgacttctatagtggtggcacgataggctatcagacctgtatgctttctttttatcttgaccctctgagagtctgatccaagtctcaaaatcggaagacagaaaggacatgcagccatctccggatggtataggagaggcaaagaaaaatccatgatagatgataagataccaacgatgaaggcacgaagtgaacaggccaatgaaagaatacccagttaaaagatcaattcataatacggggatgaagatagaggatgagaggccaaagaatagactacaatgtgataaagatggaggagaagggaagagagatccggacgtgaaaattgcaaagtctagcttatgattagaacccgcgatacccggtctgctgctgctgctgataaggattgaatccagtggactgaggccccatgaagcctgttgcctgaggttgcatgaactgctgttgttgtagaggaggctgcatgcccattcctcccatagggtaacctacaaagatcgagaaaataagggaaaagaaaaacaggtcaaaacatattcggtttggtatgctggtttagagtgagacaactcaccagtagcttgaggctgcataaacccagtctgctgtggctgctgcatcatcatccctgggaaacccgtcacctgaggtcggagagcgtcatatttatctgtttgatggaccacaaacgagtgatcgtttagacttgcagtagggatacatctttatgagaatgaaagctcaccggaagattgaggagcggcactagcatccagcacacccttgttgttcttcatcgcagcaaacacgttagacggattgaagctttgctgttgtgattgaggcgttggctggacacgagcggacgcaagcgcgttaaactggtcggcagaggacagcgcgtttgcgtttgcattgacctgaccttgttgatagttggagttcataccggtcatttctgtacacaaagaagtatttggtatcggacggtcagagtttcaccaaagacactaccctttatagaacgatgtcagccatctccgaagtgaaagacgtacgaggcatgaatccaccacttggttgataaccagtcatctgagtctgttggaagccggttggctgctgctgctggaaaccagtaggctgttgttgttggaaaccagtgggttgttgctgttgatatccagtcatctgaggctgctgttgctggaatggcgacgtgctctgttgaggtcgcgtcggaatgaattgtccaaagccagtggccgtggggatcaacggattgagcaacccctggttctgaggaacaggtgccaaaggacctcgcggtcctgtctgttgaggctgctgttgctgctggaaagctccggtttgttgactctggagcaattgacccatcggagcaggcgaaccggagaaccctaaaccattgtggaagctctgggggacacttgtaggctgaggggcagggctaccaccggagccaatagacaagttgctcattcctgtagtgagaggttgttggataggcgctgagggaggtcgggcctgtccaatctgagctaggaagtcgaacgcgctagaagcaccttgggtagcaggctggataggaggagcgactgatacaggggcctggattggaggagcaacgggcgtgggcgtagtaggcttggcagagctcggccgaggagtccacgcatcatcatcaaagccatttacagcaggaacacttttaggcgctggttcaacaacaggcggagatggtgctggagagacaaccacgggtggcgcgggtgaggggttctcccgaagaagatcgccagccgtagcaatgcttgtcgcatcgactgatgaggtcgtcgatttcctttccggccgtcctctcctggtctgatttttcagactaccgtccgaactagtaaagagactggcagagttgttcgttgtagccgctgaaggactgcttacccggccagactgctcctcctgttgtagtcgcctggcgagtgcctcatcgctttcaatttgcttctttgtttccttatctttaggagggtttctggccgagattgcttttctgacacggatgacgtcaccttctcggagtccaagagatcgcaaggtggaagcgtccaaatcaggcaagatcgtggtatcaattttgtcacgctcaaaggcggcagcgtatcgggtgcagtcgtccatgtcacaaccagcattaaggaagaactcgaaccagtcgattgttggcttcttgacgggtgtcgggcgagactgagactgagactgagccgacgaggaaggacgactggaagaggaagtatctcggctgacgctgctagtaggtcgagacttgtggggatgggattgagcaagagggagatcatcttcgttcatcgcagggtgagcgggtcttcggtccattcctcggtcgatatattcccggtcctcgggcgacatcttctccagcgggacctcgataacgactccattgagcttatgtaaccggatcttgccctctttgagtccaagaaactcggcttcaactttgaactgtcctgatttgtcatgccaagttcgaactcggttggccgagggtcctgacacaatcaacgaatgaccaatgttgagtcagcatagggcgcttccagagaggggcgtagaagtacttacgagatcttccggacgaactagccttctgaggtcgatcaggcatgcttctgtctttgggaatagggatgtctcggttaacggcctccgaatgagaaggtctagacctgatttgaggaggctggggagcgccttgctgtctagcccgttgtcgtctaatgaaatgaaatgaaatgaaaattttaagtaatagagttaacagtaagctcgatgagtatggacgaggtcatatacggttgtcaccgtgcagaaaaagaatgatacgtactcggccgcctcatcctcccttctcatcttttcttcgaccttctgtctcctcctatcctcttgttctcttctgaccctcctggcttcagcttcttgagcggcctcagcctcctctctctctctccttctttgagccttggcgttcgcttccgcttcggcctcggctgcctcccttgccgcgctctctctctcctccgcctcgtaatcttctgctgaattacccaccgagttgtctacccctgctgagccgacctcgacatactgcgcgggtacaacaccttcctcgcctcgctcgttccggaccttccaccaatcctcggcactctggtccagaatgactaggttctcaccctccgtcaaattaagctcgtcctctccttgagcttcgaaatcatacaaggcaaccgcggcggccgcgtccgaattttcagctgggtgggattctgtgatcgggctggaggcccaacgaacgttcttggtcgacgtcgacgtagtgagctgaggtaatgtaggcggagcaccgatgatgggctcatcaacggctgagaaggcgcctcctgagagatctttagaggtacgaagcttagagacgatctcatctgtctcatctcgagagctggaatgaaagttgagtggggcggcgaggccggtgatatgcagtgataaatctttgtggtcgtgggtgacagaggtaacggcagagatgggatgttgttggataggggtctaagagagttcggttcagttgcccgatcgtcattactgtcaaatacgaaatgactctgacttactttatctgattcgcttgcaaagaagatggcaccattaccgacgcccaaggttccctttttcttctttttcttatcgtcaagttcctgtttgagattcgtttcttggcatcagcttgtattccgatcggtgaatatgatacatcttcagacaatatcacgtactgagaccacccaagtctgaatcgcgtcagctttagccttgttccggctggcggctgccagttctgctggatcggtatacgcagccgcaggttccgttggggactcggtctttggaatgcagcaagaagtatagatgaaaccgagtgagcctttcctatactcgtgctttcttgctataagtgcctcaaaaggatgacgtaagcttacttctgcagagactcctccgaacgcgtcgctttctcctgtgccctcttcctcctgaacatatgaagccgggacatatccgagtttgttcgcgtctgattgaagctttaccaagagccactcgtcatccttttcgaatacctggagcgggtcgtcctcgttcatcgtaagttcctcatcgttggtggctgcgtatgcgtagatcgctcgagcaagatagaggggagacatctaaatggaagaaacaggaatcgcagtaaccgacagaaggtcttagcatgatctacatagagaaaacgacacacaggccagaacgatggaacataaagacgagcgaacctcttcaacgtaattggacgggactagtccgaccgctccttcctcttcactagcctgatcgagttttacctttgctttccaccatctaccagaaaagtttcatttaaaacgcgtacaagaaggttatccagaagcagacaagaacggttgaatgaagaagaaggaaggatgtagagaaacgttccaaccgagttgtcaacctagtgcttctcagtcaacatagcgggaacgaaagactgactgatcgtcctccttgtcgatgatataaagctcctgatcctcggccaacgcgagctctgtttccggatcctgaggcgtatagtcgtatagggctttgtacaggccaaacatctgggacagacttgactcgagatgggatgtatagaggaagagatgggaaagtgaagggaaaaggcgaccagaagaaaaagccacgcgggattgagaacgataagcgtctgttagggttagctcactctagtagcatcatagccgtcggaccgtgagagtgtggatctggtacacctagcatacagcatacagcaatcagcaatcagcaatcaacagtcagcaatcaacatgggtctactctctatattcaagtccaaaaagtcctcggtgagtgctggtagccgggaaggatcaccagggaaacagagattgaccttttttcgatcgatttcataggagggatcaaacgatcaggccgctacatctacatcggcgtaagaccgtttacctctccggctcagagtgacctgtttttgcggttgatcaagcgtttcatacatgcatggcgttctcaggataactcagaaagggcaggccggacagttgtggtgcgctcggtatcactctgaactctccatttggcggcttgtactgaaactgtcaactacctagctacttttctatccagataaatggcgagcctgcaggaaacatcgtctttgtaagcacccatactccttctgatttgagacagaaatcgtttgatgactcgggtgaatctccattctgctctgaatcgacagaaactgtatgatgatgtggtccccaagactgctcggaacttcagagagctctgtaccggtcaaaatgggtttggctacaaactctccgggtcagtccattcatgctcgtccagcttcaatcactcagacacgaccgacatgacatattgatcaaaatcgacatcactcgtccattcgaccttctagttttcaccgaatcatccctggtttcatgcttcaaggtggtgactttactaggtatatccatcgccgtcattcttgatatccgtgtttcccagcgctgactcgcaggaacaatccatgtacgcgttttgcctaggcacgatgggacaggtggaaagtccatctatcctggacgaggaggaaaattcgaggatgagaacgtaggtgttgagcgcttatcgttcgacatgaactcagattgaacgcgccgtctctattcttgtctttctgatcatcagttcgtcgtcagacacaccaagcctggacttctctctagtatgttatttgcttccatcctgtctatcaaccagtttcgtgatgaaaaaaaaagaagcttacctagacgactatgggtccttgtataaactagtggccaatgccggaccggcgacgaacggttctcaattctttatcaccgtagccagtacaccccatctcgagtaagtgggccgtgcatcatcgtaatcagaaacatcaaccccctacaagagaaagctgacctttgttcttggtcaaacgactttatccgggggaaatcgtatcggaaaacgtccttagcgggaaacacgtggtatgtgtttctcgtctcttgatctgcgcggcgtacacatatgacgatgagagaaagctgaccaggctgacaatctttctgataatgcggtctaggtctttggtgaagtcatagaagggtgggtagaacatcatgcgagacgatcaagtatttgacaaaactggacaaggctgattttgttgttctgctctgccatcctgccttctatccattctccttctgggtggccataaagtatggaacttgttcgacagatcgaaacactaggatcctcatctggtaaaccgaaagccaaagtcgggattgcctcctccggagtcgtcatctctggagatgattccgattcggactagagaacctgctgtcggacggaaatcgtataggagtttgaagagggaagcatgtactacgtattgacaaatctccttccagattttccgttgtcagatgtgtcttttgtatatcaatgcacccaacaggccttattcgtcagatctagaagtcacgtccatctctactaagctatgctacatttcttcaactactcgggaagcatcttcaacccgaagagttatcagaagacccctccaaaaaaaaatcacacgttcataccccgcttctacactcaagccttggaagccctcttggcgatagcctcgtcaacagcggccctgatctggttgatgacatcctttgagtcctttgctccaaagatggccgaaccggcaacgatgacgttcgaaccggcgtcggcgcaaacgtggatggtggcaggtccaacaccaccgtcgacctgaatatccttgttagggtaaagctctcggagggtagtcacctgtacgcgcgcagagaaagagagagatgatatgtcaacaaccccacccacaaagagaacatgatcagagatcattgagaagagtcataatggacgagacatgtctgatataaacataccttgggaagacactcagccataaacttctgacctccctttcctttgaaccatcaatgtgtttgacaccagataatatatcaggaatcctatttgttatcaacaatgtaccaagtcagaacgtaccagggtgcacagtcataaccaagatcatatcagccgcatcagcaatctccttggtgatcacctcagccggggtatcgggagagattgcgattccagccttcattccagcgtcatgaatctgcttgatgatcttgatgtgatcctcttttgtgttcaatcaacgaccgcacgcgtgcccagattcaaaagggaaaacaggttaggcgatgagtctaaagtttgaaactcgagattttaaacaaggaaactgttgaagtaaaacgcactggtggcctcgtagtggaaggtgtacaactttcctccggcggcagcgacgtccgaaacccactgcgggataacacacgtaccatagaacataggcgttcaataaagggacaataaaatgggaatgaagagtcgacatctacaaaaaggacatcgcttactcgttcgggatcagcgaccatcatatggcagtccataaagatatctgggatggcctgcttcacgcaagtcagaataggggcgcctaccagaccaacaaaatttcacggacagcttggaattagtacctcttgtccaaaacaggtcttattgaggagccagaattgagttgcacaaagaaatatcgaacgaacccatagtgatattgggaacaaagtgtccgtccataatatctattgaaatgaagagaacacgaaacccaagatcagcaagcccagacgtcataagagaaaggaggaaaaaaaaagaggacccgtagaagagttatgaacatacccatgtgaagccagtcagctccatccttgatcattcggctgcactcgaaagtgagctttccaaagtcagaagcaaggaccgaaggagagatgatgctgtttggatagatgtttcaagggaactatgacgtgagacaagaagagaacaggagcgagaaacgtccaaaagaaacgctaatcaagagaaagagaagagataaataccttttgagagtcatatttatgcgcccgagttgatttgcagaaaatgtgagagagaagaaaggattacagatgatacccaacaaaatgaaaagatggtcgataggaaagaaggaaagattcgttcacggaaaaagtcgagtgatagataaatatatcgtcaggcttgcatcagcctcaaactcaagtgaaaaagatcatatattcaaccgtctagagtatcgtacaccacacaagtggaaacagaagagaaagaacatagtgtcgttcgttagaccaaagtctttgacatgtaaaccccgtcgagctcgtatcccaaacgtcgatagtaatccctggttccgataccggcgatgactgcaatcttccaactatcgtgttcctctcgggctatacgttctgcctcttccatcaagagtgttccgataccctggtgttggaatttctttgggtttcgaccatgcactccgatagccgttccatagacatgcaactctcggaccattgaggcgcccatgccttcgggtccgttgaccaactctttcctaaatgttccctcctccgaacactttctcaaccgaagaagaccgacaaggacgtcttgttcagcgtcttcataagacaagaaggtctcccaacctccattggcagcgtaatctcttcggatcaactcgaggtggtaaggccggactttgtggtgaatctcgtgaatctgaggtgtcaaggaggcagttgttcagtagtgatagctgaagaggcagaaaaaggaagggttcggtcaaagtgatgaaatttgtactgactccgacctctcggtatctaacgtccctgcattctgctccaaaatccttcattcgacccaacgccagctctctcaagtttccgttttcgactcccgaactgacaagcggcatggggatatccctctgaactcggtaaactctcgtccaagggggaacgagcgccatgattcgagcaacgatatcgactagcgcattcggggtatagttcttgtatttgcccgtcttccagagttcatacaacccggttcctcggatgacgagtgtcggatagagcttgagtccgtccgtcctgtacgctggattctcgaagaattcctataagcgagttgacgcaaagggagcaaaaactcattaataccatgttcagagtactgcgtggtaaacgagtgactgaccttgaactgggccatatctcgctcaacacctgttggcacgatttaaaacagaacaacaatatgtgtcaaccaaatagtcagagcaagataagggggttgtcccatcttattgggagagggacaaagggggctttcccgataactaaccgacgttaggaagatcgggcatcatatgggcaacaatcttgtaaccggcatccttggacatatggaaggactctgtcacagctttcacggtgtgcccactgaaagtttcacgcgcagcatcgagaacaaatcacgtctctgatcagataaaccaggaccaaaagaagaaaaggctaggagaagataagcgcgtaccgattggtgtctcgagccacatcctcgtaaacagactgaactccgatctcgagtcgagtgcatccgtaccgcagcatttgacttttgataccatgttcagagcaacataaacaagagtaagatcaaagagatcagaaaacacacgatggagataggcatgtgtaagcgcgcgcaacattcatattaaagcaccataaacacacgaacctcaaatgcggcctgagacagtaatccggacgagtctcgatcgtaataccaacacatttcgtcttgctctgctccgagaaccgaacggcttcatcaacatctgttccagtgaatccggagagcgcattgtgtagctgagcgacgaaaaagtgtcgatacgactcgggcatggacatgaatgttcctcccatgatactggaattgatttataaattcccacaggtttaggtaccaaattaagagacgcgcacagaaagaaagagcaaataactgcagacgtacatgatctcgaccttttcaacattgtgtcccaaacttttcagttggtccactctacctttgcactgctcgtaaggatcgtatctggcctgtggggcgataaatcatatggtcagttcttgccttgacaattctgtgggagcaagaaagaaggaaagaaagataaactcactcgaatagctcgcatggaggtaggctcgtatccagtgtacgactgggtagagtactcaaagtccgagtctggtcctccaggacagtagacacagatgtttccagtcatagcgacgtgaggacatcggtgaggtttgcacatgacggccacgacggcaatctaagtcgatcgaggaaaaaaataccaaagataccgaattcagccagggagacagagggtataaggatcatagtggagttgagagatcactgacacctagtgaggttggtaacagacgacgagcaccaaagtttgtagaccagcaatacgttaaattatcaatttcctatgttccaaaatacattctgtagagaaaagggaatcaagaagattcgacgaaccactagctgtcctgacgggtttaatggtgatctttcctccaaggatcgtcttccactcctcaggaacagccgccaggatatccattaatcgagggagctgcttgagcccgtttgccttcgagatctttgcccgaatggtattaagggagatatctgccggcggcttcttggaggtctgtgcagctaggacctgctctttatggttgttaataagggcattgacgatagctgtacacacgagaaggtgaagctctggttgggaagggcctagagagaagaggtaagaggaggtagagcaagcgtggttagattgagccagagtttgggacagacatgaaagaaacggaaccaggatcaagaagacagactcacctgcttggacgaccatggctgcgagcaaagatctggtctccgaaggaagagagtgaggacgaggttggatgtgttgagtagtttggtgctgctgaaggaaggactgaattccttccctaccaaatgctaatggctaattgggtagccttgcagggaggtcgtaacatttgggcctggttacggcgccgcaacacgtgcttacccaaaaggctgaacaaatctacgcgaaccacgacttgcctctgtgatcgttgaagctatgcccgcgggtcgcaaatcatttgttgcacctccacaccgtgaaaccttacaaaatcttccgtcctgggcaaccaggacatcaataatatcgaatacaatacagagaagattagcattgcccctgcataaggatgacacgattcgatcagagtggagaccttcgggtcaaattatttttttctttcgtatgtctatatctgttgagttgtgtactttttatgtatacatcgaggatatgaacttatgggacgtcatcatctgagctctgtattgataaacattttgatatatatgggtactttccttgtgacacattgtagcagagaacaccatgtatatgaacatggatgattcagttgattagaggaacctggcaaaggcaagggtaaacaatatcacaaccagcgccgtacatcgtccaaaccaatggtgagaccggagtcctcacaaaccggagggagactctggaatatgtgtgtgttgggttgagggttgagccaaatcacgtgactgcacttcttgctagttggctcgacgctcatccaattatctcaacagtcagcctcatcaattctggatgcacaccagatgaacgtcgagctcctttctcccttcctccaggactttccagatgcaatcacaaccactctggatgattcagccatctgttccagattcaatcatgctggagtctttgctggctccttcattgcctctggcagagcggacggagctgtctgcgtttgggacgtcgagaccaaacgtccagtttggatcgaacaaggccacgcagagtctgtagaaaccgtttggttcgtccaggtttagtatcgtgatttgagattgagagatcctgcaaccactaatctttgccccgcgatgatcctattggctgtagttggtcgaggaactcaaggtttctcctcacttcatctagagacgcgacatgcatcatctgggatctagaaacaggcgaccgaaaacaagtcatccggttcaaagctcccgttctgggcgcgttctttcatcctcacaactcgttcgtatccttccttgacgcgtattcgtcctttttccagagtagctgacatgaagctgtcggtttgatccctcgttttaccctgatcatgttcggtccttcagacagatcttcctagcaacgctgtccactcatgagacatacttagtcgacctccgcccctcctcaagaggtagatacgagctttttgacacagatacatccgacccaacgtacagctcaagtacaaacggccagtcagatgaaaaaggaaagggaaaagatattagaaaaacctctgggtttgtggtcgctaagttctcacccgatggaagaaagatctttcttggtaccagatcaggagagttgatcgtgatggatggagagactagactggtcagtcatccctcttcagcttatttttacactctcaatttgattcagaaagagctcatactctacaatatgtctcatcataacaggtagaaactcgaacgaagttatgcaacgcgataatcaaaagcatggagtttgacctctccggtcggtgagctctctctgtccgctttccttctttctgtcatccaacttctatcgctctgcttactcagtgcgcataaatcgaactgaacgtaaacagtaatttagtgatcaactcgtccgatcgagcagtgagagtcctctcagtcgctcccgtttacccagaagatccgcgctcggtgtttcgagtcgagcttctccatcggtttcaagatacaatcaatcgaacgccatggtgtggagttgggttctctggagacggagaatatgtctttggaggttcgttcagcctttagacgcccttttgtgtcgacgccatcctctcaagctctgacatcatgcgtccctccttcgtgcacttcttcggataaaaaaggcgcgggtcatagaatatctcatgatatatacatatgggatcgatctagcgggacgctcgtcaaagtactcgaaggtcccaaacaacctctcgatgacgttcatgtttgtccatcttctctctttttctctctcattagttcactcggcgacttaatcggctgactcggaaaaaaatcataaccgaataataatcaatagtggcatcccaccaaaccagtgatcgcctctgtatcaagcttgggatcgatccatctctgggtaaccgcacaagctgacacatggagcgcatttgcacctgggtttgaagagttggaggagaatgcgatctatgcggagaaagaggatgaattcgatgtggttcgtcgcctgttttcctcattcgactacctatcattagggctaaatttagttctctactcatctctttctctcgctattggtggtgatgaacaccaatacaggaagacgaatcatccctccttcgtcgtaagcttcaagaagaagacaacccgatagacattctgcatcggtctcctctcttcgcatcaatcacattacctgatccaccgcctcttctgaccttaccctctaatgacccagtcagagcaaaatccgaatctcctacaacaggttggtggtgggatattgaaccggatgaggacacaaagctcgattggttcatgcctcttaggctggatgagaacggaagggtgcttagggttgatatggacttcttctaaaaacaaaaaaaccaccaaccaaccccagttctgatataatgatgcgctgtttgtacaaccagtcatagactcaccattgtcttcagacttactcgcctttattgtaaaaactcgacataatattgttcttggtaatacaacgtgagagcaaagaaaaaagaagacatgacaaggggaacatatgggcaggatggttcaacatatagttgttgaagtggtgtcgatttaccagaaagcacctgttatcggacgtacaagagagaaggaaaatagtaagaacggcttgatgtgacgggtgcaggaagcaatatcatacgtacaccatccgatgaagcattgacaaagattctccatgctggtagcttgttgaatcagttttcgtacttgttcgtcgactggtagaacctgaggtggtctgagatctcggccctctcgacctacgaagaacatcgtacacagaatggtaagaaactccgtgcatcacaaatgatggcatgagtcagacccgaaagggtatacataccgaaatctcgtccggtgagtttatcttggatacgctggatgaccttgacggcatgagcattttgaatctcttttccatcagcgcctatggaccaaacacaatcaatgaatcatagtcagccagagaccgagtcaaacaaccagcatctatgagcttacctcgaagcatctcgttctcctctccacgtcgtctgttacctggtccgcctccgaaagcgcctcgatctggatccatgtctactccatcatgcaatcaacgtcgaacccggtcagtatgaaacagacatagtacaatagacgcaacaagggcaaaccttcaggagcggcggcaggttcatccggagtcaatgctaatctccagatgaacaaagggtcgtagacgaatgcctccaacacagccataagagactccttgttgtctcgcatgacgcgcatgacaatctcgcaacttcgactgtaagctccatacacaccgcagatctgcacggatacaaaagaaaacgctctagtcagatctcaaggtttgctataacatccatgcgggagcagacaggagatgaccaacctccatggcatttgtcaacattcttgtcagacggaagggaatcttctccggaaatttgtctcggtgcatcgtgatttcgaaacaatcaccctggacaaatcaacaagaaacaacgtcagaaggcccttgtttgcgaataaaaataaaaataaaaataagattgagtgctcggacttacaaaatcgatgtgtacaatctttccagacaccctgtccaaaagcagatttgaggggtgtcgatctcccagtcccaaaatataaccgaccatacttgttgaagcgagagatcggatataggttgttcgtctctcaacccatgactcggagtttcgactcttgagccacagcactctatatagatcttgaccagtcgtattctcgagagcatactcgaagacctcaaccttttgcatcagagtcaggtagtcatagtcgggtgccatctaagtgaaagtggatacatgcgatatggttttattcagtggacgtcatggggatgccaacgttgaacgaagacacaaacctgaagaatgagtcggtgctcaatgtttaaaaggatcttccgtgattctcggtagtccttgatgagaacgtgcatagtatctgtatcttgaacccatccgatgagaccggaattcggcgataggggcgtgatcgagtagctttggatgtgcagatgtcgcttgaaactttctggatcatgagagagaagagtgttgaccagaccgaagagttgcatgaccctctcatcttgtcgaagatcctcgtgacctaaagagaaaagacggtttcgatttaattgcaaatatatgaattagataaacactagtgattactgtacctttcaacacaaactggtacgcctttccatctccgccattcactgttaatcgtctagggcgttgcttagaagtgatgacggtgaacgtaggcacaaagctgacgatcctgactactggttttccacttcgataagtacctacagggagtcaaataaaatgtcagtcatcgtgctgactcaaaaggtacaagattacttaccaggaacagccaactccagatctcgaacttttaacagtttcggcgaaacgtactgcagctctagtgtcggcagttgggataattgcttcgagagcttcttgaaaacctgttgaagaggaagattcataagtttctggaaattactgcttcgtcacagctctgtacgaaccatatagtagatatcccatgcagaactcaagtcgttcgcatctccgtgctgcctataacgtctacagaagtctcttgcaacggatagatcatggctgaagctttggatgaaagactgttcgcgcagagtttcagcgccctgtatataagagaagcaaatcaaaattcagtattgatggtcatcctcaacgtgtatacaaatcatttaccttatcgatcatttcatgaagcggttctaaagtgttgaacatgccctgaggattctgctcagcaaagtagaacctcgacgcttcttcaagaccctcaacccataactcatgccagaggattgctactcggataagctcgtgactgacaagtgacgcctacattacgattaaacgaacattcgtcagcagtcattcatagcatacggggcaggacacaaatatggtagtttacctgatcaacgagcagtggactgtgatctctcatctggttcatgatggcgtaggcgccttctgtacgagccagcaccgtcgatttggaggctacaaggagcgggtaaatcaaggcttgaggatgagctcgaccgacggagttgagtagctgctcaattgcgtttcgaactagtgaattggggttgttgattcgagcaatgatctgttggtatcgatacaccgacaataagcgaagaattctcttaaactctacagcttagcagaaagaatatttacctgaggaataacctccaaccagacatcaatgctgacgcttgaggcacccttcgtgatagccatgttcaccgactcgtggaaaccatagttgaaccaaagagtaagcagtcgaagagtgtcctgaagggagtttcccttcaaaagagcaaccgaccgatagaatcctgtttcggagaagacgtcagctaaactttctgtgagaccgaggatcgaatatcattttcgagacctaccttggacagccggaaccacatagttagcgaatacatcggactgtatcagatcaggctgagtttcaaatcgttggataatctcgaaacaccgaagtgaaaattcgtgccaggccttataccagtcagagtctagctgggttgcacgcttatacaatttgagaatatcgacattgtcggtctacggagcgaagcgacgacaagagtcagcaatctcgaaccatgatacatagtactcgatttcacttacgggaatccaatcatctttcagggcaacctcccattctccctgtttcaaataacatctagcaagaagctgagtgaactctgatcgagcttccggaggaattaccatatctggagtatcgagacccagatctgaggtaagcttagtagtaaacgactgaagccataacaatgtatcctgcttagaaccctgggcccaagtgtatttgaagtatgcgtatactacatgaggaggtgcttgaagagcctgcacgatgaacgaatattatgttcaacatactacacaagatcagatgacggacatgtcgaaataacttaccccatctccatctccattctcttgaggacctaatagcgaactaagtgtcttctcggccaagcccaaacggtcggactttcgacaaagattggcgaatttgatccacatgtctttatcttgactcggcgtgagcacgagacttcgaactgatagcactcgttgccagatctcaacatcttgctcgcagcctttcagtctattgggggcgaacagaaataatccatgtaagctccttcctctgaatgattgaatgcacagtcttaccttcgcatccaggttctgcgcatagaagcctgtcgttgaggttgatctgcagattgcttgtacgtgatgatctcttctagttctgagagcatctgaatccgaatgagtacactgtagaaccaattcgcgatgaaattagcgtttttaatttacaatatttataaatgattgacaatctagaatacacgaacttatacgctcgagcataactctcgttaaacaacgaacagagctccggatctgcaccctctcgagacttgttgatatactttagcgctttcgagtactgattgccgtgaatagcgatgatagctcgataaaagaagtactctgcggaatctttcttcatgaccgcaacgtagtcctccatgagatcccattgctttaatgaccaagcagcagcagcagccaaaggggagtactttcgatggtcggcggtcgttgaggatccccagacactctgaacataatctgcaagtttgtcccactctcccaaagcgtgcagacactgcatcttaccccagatgacctcgttgtcttcctctccggcagccgactttctatcgaaagcctcgtaagcctcctgccatcgattgagctccaagtaccatttctcgtactcgaactgggtgtgatcaaattggtcgtcttcgtgacgagcgaaagtaagaataccccaggcggtgtcctgctgctgaagtttactattgacgttgaccagagacttgactacagcagcagacggatctgtaaagtactcaagctccttgtagtgaagagctttggcgaacgctcgatgcgtaagggccttaacggaagttacaggatgaaagagcgagaagtcaataaatattgacagaagaagagagacaaagagatagaagtacattttcaccaagcatctttgggtccagaggtaaaaccttatcatcgtgctctgcaaactcgcagaggttcaatagcagattggtgacctcggcaggaaccatctcagcagacatagcattctgaatagagttgatgagatcctcctatgggtagaagaacgaagaagaaggaaagttgccgcatgttagcttcaatgtttcactaacggcgttgaacgcgacagatgtaagacagacgcacttgatatggctcatacaaagtaacccagcaggagatgaaagcaacgttgaagagttctcggttgagggaatcatgttcttgcgccaaatcttgacaagctcgaagggcaacagagggtgattcccgaagaagttcaagaccaagctgcttggcccattctctccattcatccggcgtcgacacaagtgaggtattccaagtctgctttagagactgttggttgacagcgacgggagcaggtgtagctgtctgtgtggcatcactcgttttcctatatgtaatgaagacaatatcagacctcgtccagttctgcgcggcataacagtctttgactcacacgtccgatttaccaaagtcttgcggcaatggctctcgcttaaggatctttgtaacaagctgatcataagtcgtatgctgaattcgactggattggatgacctagaggatgatggcatgggtaagattacagtgtaaggatcgatgaactgaacaaagaaaattatattcggagatgaataagctgaccttgtgcatcattgggatgaagatagcatacgaagaccctaactgaataaccaaagagcccaaagcattcatcgcaaggagagcaaggtgctgagaagctggatttgatggcgaggaagcggcgatgacggaggacaacggatggatgatctgcgaggcatgctccgagaagttgacctgtctagagagactaccgatcgtgacgatagctgtttccttaactttcaggctaacatctgctcgatccaagagttttagaatagcaggtaagatgagatgagtgtactcctcaatacttaatccgaaggcggccaaggcatgaagggtctcaaccagaacatcttgtctcatcggatccgacagatcaccgtcgaatgtccgaaggatttctcgtagcagacgaggaatggatgatttgaagtcgccctcgagcgatcgagcgatgacttccactagctgaatcacagttgtctgaagttctggattgctccagaagtcgaggatgactgtcaagataggatccaggaagttttggatatgatgcttgacaagggagattagggttcctaacttggtgagccatggcttttgataggctggactactttgtcgaatagcggctaacatggcaggaacgacctatgataaaccacaatgtttacaaatcagctgcagacaaccaagcatgataaaaaaacgaataagagaaaggcgcattccatgctcacctgaggcaggaaagggatacacttcaacccctgggtaaggaagatatggacaatagcatccatcgctttggtgtaatgaagagcgctcagtgaggggtctgagatgataccaacgagcgagttgaaagctacagcctggaaatagtcctcatttgtctggcctccaacagtggtcatcaacaaactgatatctgtatgagttgaccttgttcgatcgttcgtgcttccatccactttatcataaagaactttccgtcgatacggatcgagtgctcctagaattccaatgactcgaattgtttcccttcgaaccgatggcgaagtctccaccttgaccagtctgttcaggatgatgagtagttccggatgatcgacataaggatcgatcactgttcccgtgaacgaagccacttgaccaagagttttcaaagctgcgtctcgcttaatagtcggcgatgaatcctgaagcgttttgatgaccaggttcatgatgtccaccactcttgggccaatattttctccagcaactcgagctagttcacctagacaggttacgacagaggctgccacgatcggggtcgttgtctcatcgtgagcgactcggagaaggacatcaagcaactcttccgtgtaattgacgatcaacgaaggagaagcctcgacaagtaggcaaagtaatcgggttgtctcctccttctgtcgactgaagattgaaaacagtaaaaatcgagtacgaaaaggtcaatattcgagatagcaggtgaagaggttgagtgtacgaacctctttgtagaaaactctaggttagagatcatctggatcaacacctttctcagggatggcatcacataggcgggattatgtaatgcgagtcgcccaatgattcgtatggcaagaacccggttgatgaaagaggtatcattcagggcaatgaagattgtccgcacgttgtcggcctgggcgagatgtctatcaaatttctcggacaactcctcaagtacaatctgtctaattcgatagtctgtgcgcggatgcaataaaaaggcagtcttcagtcagtacgttcgttctgtgcagcaaagattcaccggaaacttgcctgggtcagcaattccaacagtcaacagcttctccaagacctcgctcatgatctctattgagtgtgcgctcgtttggaaacaaattggatcccgagagaatagtcggcagcacgtcattgcagctaccgaacgtacttcaaggctgtcgtcctccagataaggtaggacacagtctcgcacaaattcgttcaagacatgacctgttatacaccgcgacgaaatcaggactgtcagtcatccaattggctacagtatcacaggtaatacacgacaccaacctccgaattcgaaagagcttagtgttcgaagagcaagagcgatggtctcttgagactgtccacctggtccggtcgtctaaatgtttttgaaccagggcaacgataccgtcattgggaaatcagtcagcttatgaaaatcatgaattgcatgtaggcatatcatgttaaagtgatatatacctgaagggcagccatatcccaggtgaccgaagcaatgttggctctctttggaggagcgcccaacgccctgtacggtttcccactcaatatcatcgaaagcatttccaacagccgatcttatcgtagagggtacacaaaaggagatgaatgaatgaataaatcggatccataaggccgcgatgcagtctcgcaatcagacatgaaagaccacagatgagtctgattctacgtaccctggatagtcctctgtaaaggcttgatgctatctgccgtgacaaccaatgcctgacagagcggttcacctagcccggatgcgaacattaggtctaagagatcatgcatatgtttcgtcagaattggcccaaacgctttggctaacatgccaatgcattggaatatggggtcttccggtggtgcattcttctttctgtagaatccagtggtgagtcattgagagatacggacgttcagaaacatgccatgttcaaagagggaatagcagccaggtacataccctcgcatagccaggccttccttaattgctgtcaagatagcatccaagaagcctttcatttccgttccaaccttgtcggccacgtgtccgatcgagaggaatgctgatcgttgatacatacgatacgtgacagagaatatattaggctattgatctaaacccagcggctaaattctgaagaagaaaaggcgcgcgcacctaaagccttctcaggctttttcagctgagaaagtagatatctcatactggtcgccaggaaactcgagccggaaggtcctccattctctgcgacaaaactctggggatcataactggccatgtgaggaataagcgcgatgaccgtttttcggatgatcgcgtccttgtgctccttgttttgtaagatcagctcgcaaatattataatagtgcgcgttcatgaactaggtatgcgtgcagacgacaacaacaaaagctcagctcgtgcccgtgtagaaaatttacctaacgttgaacatctcaccatttctccgtgatcgaagagctcctgatagacaagtaatgatccatggatggcctcgggagttccaattcctagtccatttctcgcctcctgacgcatgtgttcgtaactctctaggcgaggtctgctatcccttgaggctaaaggggtgatgttgtagatctggaaacatttggaaacaagcaaggcagctcgttctcgaagaattggctgttgaagggcgtccaagacagagaggcaccgtgagctcattacgccgcgatgatgtacacaacatgtgagagaatacacctacacgtgtatctcggagggacgtccatatggactgaagaattttaggaacgtaaggctgaacaatactgggtgcctcaacagccaattctctcgctaacatcagatgtcttgagatatccgttcctatagagagtaacccagacaaaaatcaaaagcaatcagaagcggaggcgatgggaaggaaactgaagaaacaaagcactcttacctcctagacccggattctctccgcgcatgatgtctacaattctctgaatctcggtcgacagtaagctcaggatctcagtagatctctgtcctttaagcgcaataaaacctgaagagcgcagagtacaacatcaaaattgagtggatttgataagatttagcaagaacgggttattgataacgaaagaaggattagaattcttaccaactaatcggcatgttgctgccgtcacgtccatatctttccttgagaagtattcctcgacttgtttcctgaagaagactaagatacgaaagcaggaccccaagtataccaataagcttgggtccaggtttgacaaccttgtcaaccatgtaggaaggaaattactcacatccatgtattcgaagcaacacttgaggagtgactggcaactgagcactccccgtcaattcaactgtatcccgagtaagattcaggttgagtacgtaacttggaagtcagatttcggtaaaagcagagaaaacgcgtactcattccagccaaaacagcaagcttctcctcccttgcttgatcgtgagggagagcaaaaagtttttggacaacttcaacccagagcagcttgcatcgctcctcacccgagtactcctccacacacttatcacaatcagttgtatcagccggatcatcatcaatcagtcattgacatttcctatatatacaattggtggatgatttactcacaaactctcgtagtttaacggctgccacccggcgttcttcatcggttctagtgagccgtttgtcaagtggcggtttccatcgagttagttatctaccacaccttccatctacaatagggcgtgtttttttccttcatggaagtctggcagagcaaggacacgtgaaattcatgggttgctcaccgtgttttcctgagctccaaaaacagatccccgaatacctccagttgactggaggcggaggtggccatcgcttgaagtggactcgggctactgggaagacgggaatggaaagcaaaggacgtcggattagtcctgacgacattgataatagcaaaacggtcagattagtcggaaagacaaatcttacatcaatcactaggcagttaagactcgtgtgttgatgtatatgtctgatgagaaaaacagagaaggcgagaagatgaaaagaaaaattaacagagaggaagtagatgaaagtgatggataggaagtagaagatgaagtttgaaggtagggatcgctacatcatcacaccttccctactactacctttacatcctgataatgctagtcttctctttcgccacaaacaatgagctctctacctcctcctccatatacagtcacacctcctaaatcggaccctacgctggcgaccatgccattcgaggttcttcaaaggatcttccatttcgtcgtgtcggctcggccgacgctaagtgatcgcgctttggcaagatggtcactcgtcaaagagaccagactcgtcagcaccatcttttacaaaggtgaatctccgttttccggatcttaaactatttgaagctggatctgttgttctctagttttggttcgttcgcgaccctatcctgactgacaatctatcgttcatgatatctatcagtcattcaagctcaactccggactctcctgcttcaaagttacttggcctctgtgcgaccaccgttttcgtcgacctttgttcaactgaccggcattccatcgcaacagatatcaattgtgctggcaaattgccctctgaaggaaactcaagtgctcgacttgttcatcgccgcagcgacgagggagaaagcggagcacattgagagtgatctgtacgaggagatgaattggaggaatgatctctttcttttcaaccaagttcgtgtctctttccttttatcattgtattcagtgtagactcttcccaaaggctgatattcttcttttctttcctatacggtttgaacctcagccgtctgctcgattgaccgatctcctactggcttcacctttagttccatctctacccttttcaaaatccgatctgtccgtatcatttactccgcgacgtgttactcttcaccgaacatcttcagcacatggagggaaacggacggagctgctgaaacttgatcgagagaagggagagcaggaagatgttgtaattttgaaattgatcgaagcgctgaagcatctccgagcatcgggtggtctgctggttgacacgctaggataaagagtgccaaatacctaacctgtatctctatgtcgtatatatcatgtatcatctagtctgtagtacgacagaaggagagatgtacgatgagtgtatgcgtattcataaggagtgaccagaaaagatagtcaacgcctagggttaaaggccaacaattaccgaatggaataaatcaacctcagacgttgtcttgttccatctcatcccattgttcgatgaggatccctctcatctagaagacaactagagaatctcgtacatgaaagttggccatgagcttttctcgattcttccatgcagctacattaggaatacatgtaccagaacaacctctctccgttcctcgtttaacggccgactccaccgctgaagaccggtcggcctgggttcatcaggcgttggggatccatcagaaacgacttgctttctacggttcgttctgcttcctttttatcacgatgaacagtccatctttgaaggctgagcaagtcgttgccgctttgtctccgggtgcattcatcatccttgttttttctcagacgagcaactttcggtctacttgagcatcacactaaatgatatacctgtcgccgaggatgagcaccgtccttctcaggagctgctactgtttctttctcatctccaggtcagatacttcattcatatctgttcgtcataagatcaacataagatatgcgaggtgctaaaacagacagtctattcggattcgttagatcactctagaaagttcttatgtgtctcatcttccagcatccccttcgccgtccccacagcatacagcaacttttgcatcaaactcgtcctactttcctgccgctcctaccagctcatcatctagtcccggtccgattttagcgtcatcgactcctatcagtctgggcgttcctcctaatgcgtcgaatcgacgatcatttcctggcacaccaaccgaagccggatttgggaacgtactgagcactccgtttcctacacctggcgtaggcagcctggaagaaaagaggtacgctcggagcgaaggagtccaggcttggagtacaatttggggtcatgagagcgcaaatcacgagagaaagtgggtcgggttgagtaagaacgaaaaggggagttgggtggccgtttgggagttgcaagcgcctgttggtgagtggtcctagtttgcctgattgtttctatcctctcatcttccgatgaatcaggggtgtgaaagacagcaaaacctgatgtggaacatggtttgtttcatcatagctttcatgaagacccgaattcaagatccgctgttttgcttgaccgcatctatcacactgagggataagcctgctggagatatcatccagggttacccgtctgcctcgtccgaaaacacaatggagggagtttcccacctcggtcaagatattcacgataatctggaggatatcgatctactgggaggactaggtagatcgttctttcccgtctgtttccattccacagaacgaacgcgtctaagacctgcgcttacgacgtgttctgtgctggctttgtaggcgaaggctatagcttcccatcaaccaggttgtcttccaaacagatccgaccgagtcacgcggtagctaactcagtgtcatttcctgaaggtctccaccaggggccaaaggtaatccctccagtctcgctcatcgatctaccaacccttcgaaaatcttttcgggcaatttttgctctggcatctggtctgtctctccgaatgagaaccgtctatctgccaaacttactgactaatgcaggacagttagaaggacaagatttgcctgatagaacgagtgaggacgaagagggagacgaggaagaaagaaagattgtgatgagcgtagaagttgagtcaacaggtggggtgacagatgaaggagacaactcgtgcgggttcgagatcgagacggtcgaggttcttgttggtggcggctcgagcggagttcatcttctggaaccgttttcttcagaaacacctgaatgcagagatagtgtagaaaaagaagcggcaaagtcggtgttcccattagagctaagaccactggatcaattcagcttgctgtacgtcgtctcgacaactcatttggaagggttatcgactgggtcctccacagcaatatcatctggacaatcgggacctacactgtttcctcctgggccgacagatccgacacatcatcgccgacaaacttcgattgtgcctgctatactttctgttgtttcacctgagcgaccggtctctatcgctgtcaccggccgaccgttcatctttcggtcttctgcgccttctatggatctgccgtccacagagagcgagaaacattatctgtcgtcctcgtttgtctcgagatggaactgctcgctcgacctgactcatcttgacacaggtctcgtcaacaagcggatctctgttcctgctcttgctggacttgctcaacctcggggtataggtcttggccgaccttctgtcggtctcggtgggggtggccatcaggtggcgggaaatagacgatatagtatagctaacttggcttcactcgctcaatccggtcgaaatcattctagttctagtcacaaccctaatcagcttcaacaacatcacccagctctaccgagtataaactcgcttccgacgattttaccaacacctcctcaggcttttccacccattcagcagattgacacgtccttagcttcggggtctgcttcgatcaacggaatgaaagaacctttggccacaccagcgtttccttcctacccggctcatgaccgacagcaaagacagccatctggaatcttgccaccttcgcagttagcgtttgttaattctagaactagtgcgccagcagtgagtacagcagaaggaggaggaagaggagggcacgggacgcaatacgaggaggaagggctgttggtatctgtcaacgtacacacgccttatggtgcttcttctgatcggaatcacggggagaacggcgaggaagcaagagacgaggagagaagggatcgacggacggtccggccgctcgaaccgttcacgcttgaggtttttgtgttcaacaaatctgaccgaatcagacggttcgttgtcggcgtgccggagaaacggcgaggacgattggctgggcctgcggaggtgcaaggtcattcgggagaaactggaggagatggagatgtagaggacggccggatgggaatctctcgtatgtatttctctctttctctctctttctggttaatgctctctgtatatatttctgtttctgactggatctattgctttctgcctggatagaactgcgatcacgtctagccgaacatttatcgtcaacaacgccgttgattccactggagaacaacatccgagtcggaccacttctacctcggtcatcacagagtgtacggatgaaatttttggcgttgacggaaggcgttcactcggtggacacattggcaatcattggtatcggagattcgtttgctgtgaatctaaagcgagtttttctttcatcttgcaaaccaaggttccccctttccatgttggaacatgcttgactaacgcaaaatatcttatcttttgacgaacgcatcagatcggtttgtaacatcatagtcagacgataaagcagaccgtgttgatctatttttttcttgcaagacgtatagatgtacgctttcttttgcttgtgctcacaaaagtgaccgaaagccgggcccagacttctgacagaataccggattaagcgactaaaatggcttatcgagaacagaccacagataagagcaacatcgaagtttctcttggcataaacgacactccggtggaaccttctgtataccacacagtcccggttacgaccgagagcaagcaatagaggcaacaagcgggatgaaaagttcatcgatcggtctctatagaagactttcttgttttcttggtcttggaactcttatcgatcaactcttttttcttacgacatctacgattcctgccccaaactcttggaatttcattgatacacacgtctctcttcccgaggacatcgcatgtgagcaaatttccgcaaacaaagaacatagaaccctgagagataggtgatgtgcatgatatctatcgcttgagtcttgtcatccttcggaggagttagatcgggtcgtgtgagtggaagacacaaagcaggagatccaaagatccaacagcacggggtaaggttcaataaccataacagcagacagagagagagtgtgtgtgtacgtgtgtatgcgtaagatacccggtcaccacgaggtcgcttttcgacgatccgcattggcgtttgaattcggtccgccgttgtgggctgtaatgaaaacctgagatagaatagatgaatgattatgaaattcagatatgaattcaaatctaatccccaccgccaactccaccgccgaaaatctctcgggtcatctgctcggctttttcatttttttggtcgtacaaacacaaaaagctaagagaccgtcaagagaatcttctttctatttctttttctctccgtgtccttctctccttctctccctcgtcttggatttcgtcctcgttgtcacttctgtcacccacccaatcacccatcttgttatccatcatgacggatatcacgcccgccacaccggttctgaccgagaagcaggtactccctccgacctcggattcacccgctgactatacctccggacgctcggatacctaccctgaacgagagagtgacgacaactctgtcgacaaggaagtcatcaagaccggccagacccttacagatgttcaggccgcacatgagatttctgaggattctgcccaggttaatctttctattcttcttgtttgatcctgctcgtatctcagcccagagtatcggggataacccaaacggttctccgtttttttatgtgccttctctgctactgctcttgttcataacctcgcctctaccaggtcgcagagaacaaatggagacgacacatggcatggaaaagacttcgatatgttgtccttcccgcctttgctctcctcgtcttgggttgtgagtcgatttatttctattttttctttcttttcccttctattcttctgttagcttcctttggaaaatattcctttccatgttcaccagatgtgcataccttcttgcgcttctctttctttatactaatctcttccatcctcttctctacctcgtacttctcttctcttcttagggtggatcgcttctatcgttgtcaaggataccagacaccggtggatccagtcgaccatcttggcgtggtggattatcggtcttgttatcgttcgtcctctcagtctttttttccctcttactaccgacctcgtctctttccgacaaaactcatattttatctttggaggttgctcatacagttcagattcgtgccctcgtccgttgtcggccggcctatcggcaaagtctggacaagtacgtttatccatttgccgctcaccatgccgcagcgcgtatttatctctatccgaaagacttgttggctaatgtctagctacctcggtatttttcattcttgtttttgatacctgactattattagctttaatctccaacccgttcttcaagcttaaccgaatcgcccgactcgccatcggctggcttattctccttggccttctctttggatcctgctatgggttccctcttccggaaggaacttcctacgggcagcgaacgatctctgtctttggtctcctcgttctcaactgcttgtactttgtttgctctcgaaaccgaaagctcatcaaatggtcagtttccatactctgttttgtcgcttgtgtagttcaacgagctcacgctgatgtgatgtgatgttatgctctgggacccaaaaactcttgtaggcacaccgttgtcgttggtctcatcatccaacaggcgatcgccatctttgtgctcaagtccgaggctggtcttgatctcttccagtggatcggtatgtactcgttcgaaggcccaaaaccatgtctttctgtctttacagcactaatcttgtctttcctgatttttctctactcccgcgcctcaagccaccgctgccgctgatttcttgcaccagggtggagtggctgccacatttttcttcgagtcttccttcagcagctacttctttgtcggtgtcctcggagccgttgtattcttcatcgccttcgttcagatgatgttctatcttggagctatggtaagtcaaagtctgattcccatatctattctctcgctcggccgttgtgttgatccagcctaatacatttccaatgattcacagacctgggtcgtccgaaagttcgcttggatcttcttccgagctatggatgtctctggagcagaggccgttattgctgctgcttcccctttcatcggtcagggtgaaagtgcctgtctagtcaagccctttgttgatcttatgactccttccgagcttcacttggccatgacctctggtttctctagtatgtttccatatttggtttcttcctgtgcgatgccacggtttactaacgtgtctttgattcaatcgtatcccagccatctctggatccgtgttgactggttacatccttctcggtattcctccttcggctttgattactgcatccgtcatgtcgatccccgcctccatcgccatctccaagattgtttaccctgaagacgacactccggtgacgctcggtcgaatcgtcgtcgaccgaggagacgaggatcatgaaagcgaggccaatgcccttcatgctttctccaacggagcttggttcggtctcaaggtagctggtttgatcttgtgtaacgtcttggtcgtccttgcccttctttacgttgtcgacggtcttttgacctggatcggaaaggctttcaccatcaacgccctcacccttgagctcatcttccaatacatcttctacccgctttcgtggctcatgggagtccccaaggccgactgtcttcttgtgtctcagttgttgggtctcaagctgttcggtaacgagtttgtcgcctacagcaagctcatgaccgagatcaacgccggttaccccatcaccgctcgaggaaggacaattgccaacttctgtctcgccggatttgcaaacctcggttccttgggtatccagattggtgtcatctctggtttggcaccatcgagagcaaagatcattgctaccatcgctccttccgctttgatctttggtttcttgtcgacctgccagacggctaccatcgccggtatgcttacttgaagatagtgaaaagtcgatcgatcgggcgagcgggtcgtttcatagctggtcttcacaatcgtgcccactagagaccatacgcttgtcttttcctcttcgtttctttaccttatcctacctttattctcttctctactttttctttcttttcatcgttttatcactcttctttcctgttttgcttagctaaaaaaaaaccccattcatcggtctattgacggttgacgttccttccgtcgaattcctttccttcgtcttttcgttattctttttcatattttgctttcgttgcttttggtgactttctcatgattggtctttcattgtacttgggtttccgctccctttctcgttccttctcattcactctcatttccgccttcctccttgtatcctatacctacaatcctctacattttcaaatatactgtgccctaactgctcttcttagtcagggggtttctcacctctttctcaattctctggattaaacggatgattgtttctgaatagacttcccatcgatccttttctctggacagggcgaacaagagaaatccaacacgacaagcaagagagaaacaaaacaaaacaaaacaaaaacgaagacgttaaacaaaaccatgaggactggacacggcaaggtccctagttcaaatagggaaccctcttccacaacatcctaacaaacccatccagaccattccgacgccttcaccctcggcccctcctccttcaccagaaccaacgatctgaccggtctctttcaagacgatgtctggcgattcgggtgattcctccttttggataagtgcgagtgaggggtgaagaggttgagtaggccgagcggacaggagcgaccgattcgttagatgggctgaagtgacgtgatgagagctgattgaaaacgaagtgtttcgatcgatacgagaatgcgaagatttagcgcgcactcatggagaaggattcaaccaagataagatatcagatcttacagaggaagaaataggtttgcctggccgattggtttcttggtcgatggattcaactgaccagtgttgaactcatcacacatgtctacagccgttctgtacgtacccgatgttcttttgacagatatcgccgatacatgatcagatttatctcccaagctcagaaccagatccagaaggaatagtatatcaaaagaagatgaactcacccctggaggacacaagaactccacacgtaccgctcagcgaccatcagctcttccgtcccttccatgcgctttctgaaccctgcatcgattccaccaggatatgactcgtcattaggcgtcttcagtaattctttcagtatctctgacgtccccataggtggaatagagggtagtgaggcttgggccgaagtatcagaagggacttcaagtcgagcggagagatggagtttacggatgaacgcagtccagtctggtcggagaggagaagtcgatgtattttccaaaggagcaggcgccgtggtcaaggcagaaggcaaggttcctagaggttcaccagtcttttcgtggcaaccaagggaatccgttagataagacttagctgataaagagaaaggaagagggaagatcaacttatggtccgtaccgcttctagtatcatccatgtcgtagttccatcgacctttccatgccctcttgttctgacagtgaccttccaaaatccaacgacctctttttcgatcttgatgaccttgcccaatcctccgttacgaatcgatcgactgccttccataaccccactgagcgcagtgtgtagcctcgacaagacaaatcggatggccagacgtaaaccctcaggatcaccataaatctgtcggtcaatggcatcaaacgccccttctgagtaactctgattgatcaagagttcggcatcgccagcacgattcgaggaagagtatagttggtgagtacgccacgcatgtcctagccagctagactgaacgagcttgtatcgtgctcgaagttcagcgcgacgagcccgatagtaaggccataggttggaggatgaagaatcgacctggcggtgagagagaagtgcagtggtcaatgatccagggaagtcccgcctgacatggtggaaggctgacaagtagactacacaacaaaagaaaaatcgtttgataagcccgttgacatgtaatcgtttcggctcaaggaggaaaatcaacttactggcataccggcctagctttcctgtctgggcaacatttgtcctctcggctgtgcctagttcagagaaagctaaggcgagaacgtgtattctcctccggagacgataagacggaggaagtgagattggcttgacggttgataaataggtgtctaagtgtgcgaccggaaaggtcagagacgtaggtgctgttggcggaggcgaacaaagaagagaatcaaggactaccaacgctgtaattggggctgaaactgaaattggagctggagctggagctgaagttgaggtgattggcgatgcaggcttggactgtgaagcatgattgggaactaaaggcgctttgaactttttgaattttctagatactatttgtggcataggtgcagggaccggaaccgaaggcaaaggtggcggagagtttggagtagcgcaaacagctttaatcataacctctgctttaggtttgagaggactgattagtcttgcggtaggcaccgaggcaaagggtatatgcgtttcattcgaatctggccgagagtcgatggtgagtgtatgctctggactgaagctgacaggagtcaaagagggaggagccgttgtgttcaaagacaggaccttcacgatttgacttttgggctccttgggtttctttattttcttcttgattggcttcggcgttgggtcgaaagttggagccgcagaagcgtcactgtctgttgtcataaaccctttcgcttgaagggaaagatcggcttctatcctgggaggcacggcaagcgaagcttctttcctggccttcttttgacgaggaactgtatgcggcgacggcgaacgatgggtagacttacgggagacaggtatatgctgaatggacgctgcttcttgtggttgcgcaagaggtgacggaatagcagattcaacaagaggagcggacgctggttttgagccacctgtagtcaagaagtactcaaccagcttggctacgaggagaggcttgttgagcttggagtatcccgacagggatagctggatacatcagacgacacgataaaatcacatcagcgtggttcagccctacatggacagaagcagatctacttacctctttgcactttgccttgagagccggaatattcaacttagaaagggtcgcctcgtccatgtggagtgaatgttagattgtcctgagagatcaggaatcgaagatgaaaagaaagaaggacaggaggaagaaagaagcagaaaggagaaaaagtgtcagcgatagaaagctgtcagtctacgacaccacgagaaccgatttctggtcagtatacagctctctagtcagtcatcaatctggtgctccttgtactctcttgggtgtgtatacatgtacatctgatcatgtagcatcatgaattctgtgaaagaaaagaacgagttgatgatggatgatggatgactatgaacgaggtggccgcatggacacagcttcaccaacgacaaatcacccagtcgtcaatccacgcgatcgttcatccatctcatcttctttgtttctctatcccaccaactccatccttccgattctctattctctctattctatcctactatgaccactcctgcagaattccttacctatgtcgatgagcacgctgaacagttcatcgacagattagccaaggccgtcgcaatccctgtgcgttccttcttctctttcttcctctttcgatctctctcggagatgtgcgaaactccgactttcttccatacttttctcttcctctcctctttgctgcttctttctcttggtcatggccggaaacatcacttctctcaaagtgaaacgataatgctaactggagaatcttgtcgttcctttctcatgcgcctagtctgtctctggcgaagcttcgtacaggtgagaatcctcgccttgtgtcttgattttttcctgggctcatcctttccactgtatctcttgtttgcattatagaaagcatgtctttgagatggccgactttatggcctctcagctcgagtctctaggatgtgacattgtcaagaaggttcctcttggcgagcaagttctagagggccagactttgcagcttcctcctgccgtcctggcttctttgggagacgaccccaagaagaagactattctcttgtatggtcggtacctgttttcttaccgtgcatacactccagttaggctgctccgttgactcattaattctttctatccctcttgatcgacaggacactacggtttgtcctgatgacactaaatacttcctctgacaattggcattaactgctcgactttggtttcttagatgtccaaccagccttagtatccggtaagtcccaaacgagattatattatcctgaagatagtcccaatacttgtctcatctcattggatgttactccctatccttagatggatgggacaccgatcctttcgtcctcactcctcacgaagatggtcgactgattggccgaggatctagcgatgacaaggggcctgtacgttctcttctctctccccctctcactgctcatatatcactcacttcttcttgcaatgcatgaaatatgatatcgtgaaagatactcggctggttaaatgtaattgaggcgcacaaaaacctcggtctcgagctccctgtaaacttgaagatgtgtttcgagggtatggaggagtccggatccgagggattggatgagctaatcgagaaggagaaggacggattcttcaaaggtgtcgacgcatgctgtatctcgtaggctctgttctctttcttcaagtagtccatctgattttggcgctcattgatcatggtttaatcttctaatctgcgtctccgatcctcctcatattagagacaactactggctcaatacgaccacccctgcgctcacgtacggtcttcgaggaatcgcatacttcggccttaaagtcagcggacctgcccgggatcttcattccggagttttcggaggtgtcgtgcatgagcccagttcgtactttatgttttctacccagcgttcatacagactgtccatcatcatactgatatcttgagttctcatactgaccaactctttgaacaaaaaagtgaccgatctcatccacctcctctccaccctcgtccagccatccggtaagatcaccatccccggtctctctgatctggtcgctcctctgacagaccaggagcgaaagcgatacgaagctattcacttcgaaacggctgatatcgaagcttcgaccggaagcaagacggccatcagtgaggataaggttgagagcttgatggccaagatgagggagccaagtttgagtctgcatggaatcgagggagcattctactcgcccggatccaagacagtaattcctgccgtgagtgtatcggtttgattttcgaaggcgatatagctgtttgctcttgttctctttatattcatattgcgtatccttcctgataactatgccctaattcgaatcccgttgactagacggttgttggtaagttgcatacgtcaattcttatacattcaattgaagtcggctggattcccggcgttctaattcgtcctctcgtcctcaggaaaattctctattcgacttgttcccgacatgatgcgtgagtaccctcatcttatcttgtttcaactagtatctttgcgggcagtctgaaccatgaccgatatgcttgtttaaatcagccgaggaggtgacccgacttgtgactacccatattcagtctgaattcaagaaactcaactccaagaacaccgttcgtccccctactcttggcttttatcaatctcgcttgcatcggaaagaacgatcatgtgggatgacgaaaagagtaaccttgccatctttaccattattggtcctgtagatcgagattgacatgggtcatggtggaaagccttggggttcgttttactcttatctccttagttgcccttatctatttcgatttgcgcatctgatcaatttttttaaaccttaatataaacttgcgaccacagtcgcggatcctgaacactggaactaccgagccgctttcaaaggtacgtttatcaggagatgaaatttgtgaatagcatgtacggatgatatccaacgtagattaaccactttgtcttctttcgtgtccttccatatgtcgtgatctttatcattgttgcaaataatcaagctactgagacggtctacaaacagaaacccgatcttactcgagaaggttcggccatgttcccttccatctttctgtcaatctctaatcgaatagaggctgatcttgctcgtatctcgcgttcttatctctgtcgtttataggtggttccattcctgtcacactttcttttgccgatgcgctcaaaatcaacgtgcgtgcccatcttatctctctctctcttttccttacttgtgggaacgtggtaaagctcatctgtgattaatcgatatcaacctgtcgggttccacaaccgataggtccttctgctgcctatgggccgaggagacgatggcgctcactctatcaacgagaagctcgaccgatcaaactacatcaacggagtacgtctatgttctctttttctcgttcataacgtctctcggactcatgtaattctgttcctgttttggtgaatcacgacagaccaaggtgttgggtgcctacctccacgaaatcgctgcagtcaccaagtgatctttgtctactctgccgtatctctttcgtttcttccttactaccctttcatcgcaaatgcctttgcttattcgatgaaagttttagagatgttcaagcacaaatgagaaggggaaagaggaatagatgaaacgaaaggacagagaacgacatgattatatgatcacccgtttcctcttcttttgaccttcctcgatctttgctcttactttttcctcgtccattccctctgtctcccagaaggaagctgtcttgtcactctcgacctgtcgttggaggaatttgagcgcagcaagattatagccaacggtttctttctgtcgtcgaagagccgaacgaaggtacgttcggagagagatgatcgtaggtcgcatcacgttattggaaacaatctgagcatgatgggttcgaagtaggaatagaaggatcctagaaaggagcgaagtgttccattcctttttttttttgccacaaagaacgcacacgcacacgataaaagaaaccgattgtcaggatcaaagaacatgtagtccaaaagcgggaagaaaaaacggatagacataccttctgtgcccagtagctcaagcactgaagcatcgaagtcacatacctaaacggcagtacaaccaatgcatcggtcaacgaggcattcgggatcttctctaccactttcaacacgttctcttctggatcgatatcccccattgctttcaataacgggttcttctccggcggctgcaattggtctccagcggctgaaccggcaagggtctttttagcatcaaggtaatcttgataggtcaacctttcttcgtccgcgagatcgagagcttccatgatcttctctccggccataagagtatccgacgtctgcttggtcacctcggtagcttcggcagtttctgcaccctgggcttcgtggtcggctgttcggttaagactttcagccaggttggcatcgaacagtctgtccgtctctttctcgcgctcttcgtccaaaaagagctgaagcatcaaaaagatgatagcagccataaaagagtttagttcagcgtttttgatatctgacaagaaaaagaaggaagagacgtatagaggtgaagaggagagaaagaagaagacgtaccggctcatcggtcttttcccaaactcgaatggatcgatcgtgagaaccggtaacaacaaacttcccttgtttacttgtcgccagagcccagacctcaccgtggtgaccttcgagtttctggatcatttcaaactattagagatttggacattcattcggtcagtcgagtggtcagtttttgttcttggaaacagagcagagaaagcagatgtcaagagaacagaagattgggagaacatactttgtcaccatcccagtacttgacagctcggtcttttccaaccgaccaaaagtagtgaccctcattctcgaattgtactgccatcacactctcttcgtgtgcgtagatcgacttgtggcaatctccgaagtcaagtccccaaatcttgatgtttttgtcagcagaagatgtgatgagcaactttgaatcggctgagacgtccatagagagtacaggtagcttgtgaccgtagagcgagaggaaaaacttgagagtgtcctggtagaacactttgacggtggcgtctaacagagcgatcgcgaggaactttccatctggggtatatctcactgaaagaacgtcgtccgtcatcttgagagtcctggtgtgaacgatggtgagaaccttgttcttgaattttcgctcgttacccattcggtcgacgaccgtctgggacacgtcctccatctcgaccaactcgaaatcccaaaacttgacgtccttgtctgcacttccagagacgagacccttcccgtcgggtctgacttgaatcgaccagattgcagcggtatgggcctgggtctcagaaatcagggtggacgaggagacatcataaaggaggagtgtgccggctttggtgccgacgatgatatgtcggtctccaggaagccaggtgagacagatcgcatacccggtttccatcgtcctcacacaagccagcgtcttcaagttccaaatcttgacctgtccgttcgatccactagccaccaggtcatctccaccagagatgtctagacatctgatatccgcacggtgaccgggcagatcgattcctgctataagatttgactcgggagtgacgtctttcgagggttttccggtggagggagggagaggaacagaatgagttgagactgcgtttgacgcgttgtggatcaagaccgtcagctggggtt

SEQ ID NO: 244 - DNA, 26661 bp, Xanthophyllomyces dendrorhous
tcagcatctgttcgaattcggagagcagagaccgtcttgtcggaggtaaggacgaaaagcaggggtgaggttgggtggtaggccaagttggttatcggcgaagacgacgtcggcaacggcacagacgacaacgggtggatgagcacggggagctcgccgtcatcagcctccttgataccatgaacgaggctctgttcgttgataacccatcctttgacctctccttcctgactgcctgtagcaacttcccactgtccaaacaacttgccttcctcctcgccgtcctcgccaatcacagcgtcttcacctggaggaataaacctgaccgaagcggcgctgacgcctgctcggtgagcgaccacagtttggatgcaatggctggtctggagatcccaaagtttgagcaacgtgtcgagagaggtcgatatcaagtatccagggtggtttgataccgtcgggtgaggcaagaaggtcagtgagcttatgggggatcggtgagagtgaagtcggacgattcctctttcgtcttcgacgtcccagatgacgatttcgccttcggttccaccagaggccagtcggccgcctcgatggtcccagctcatcgcggtaacagactttttgtgaccgttgaagcaaacgatctcggtggcttctcgctcctggctgctcgtcgagggagggaatgaccacagacggacggatccgtcctggtaaccgactgcgtatagtggggaggacgatgaggaggaggaggatactgtcgagttggagctggcgattctggtgactggcgatgtatgagaaggtgaatgccacatagatacctgtgtataaaatgaaactctggtgagtgtttccctcgtacaaagaggactgaatgtgttcaagcatggtggcttctgtagttgctactcaccagcttggctgtctttacatgccatactaggatatcttccaaagcgggaacataggcgagtttcccatcgaacagagagtttccctgaggggaggcaataagaccgaaagcctgtgttggctcgtgtctgagatatgagcggaccatgattgcccaggctgaggtgactggttggaatgatttctgatgatttactggagagaagcaggccgtaaatttgggtacaacttttttgtttaagatagatgaaagatagatgaattgaagttagattagaatattttctattcaaactcttggttcagactacgacgatttgtagtccatccggctgcccgtccgtgagtgggatcgaccataccagatcggaagcaccattcactcaacgagtctctcttgatggaccgtgatgctgaccaatgaggctctctgacagaagcactctagagctctgtggatgagaaccatagaggcgcaagaacaacgaaagactctgtggtttgtagcaaagtctttatcttttgattgcaaactacaaagatgacgtaatagaaacgtttgactgcaatagaaaaagactagaaaacttttgtaatcgaaatcggccaaatactacagaaaaaggcctaatgaaaatcgctgcaaacaatagaaaacttgtctaatagaaccgccaagaagactaggaatatttaccaataagcgaattctcaactcagccgccgttccttcctcgccttcttcgttctcgttccccgtccgttttgctctcgtcattgatcctcatccttttgctttctctcttctcttcttgttcttgttcggtcttgcttagagagtgtctgcaactcgttggctctctttcaagtctgttgatcacactcgttttgtcgtcatcagttctcacacaactctctgcctgctctcgttcaaccaccatcctcgtttttgggcagactcagctctccctatctttgaatgttctcatttgcagaggatgatccgagacagaagttgagtgtagcgataggatacatgtccattgcctgctggtatgttttctgcgtgttctctttcctgtttagacatacctttcctcttcactctgttggttgaaagaacatgtttctttgtttgttctttcttctctatctgtctttcgtgtctcgtgatctcaacctcgaatacacacacatgtatccaggctttgggctcaattcccacagatttaccagaactacaaggtcaagagctgtgagggacttgcgctgccattcttattgaactgggcattcggtaggtgtcctcatatatgtcctcctctatcaactatgtctttcgggcgctcagaccttctccttgtttggatgttcttatcaggtgatttaacgaacttgataggatgtgtgctcaccgaccagctagagttccaggtacataattcttgtcttcatctcagctcaggaagaacttcgcgatagagaggaatgggtttactgtgaatacagagtcatctctccggaacctgagaacatcctgaacctcctttccaatcatctcgcccataacgccttatcttaatttcttaccccggaatgcttttcttcttcttcttttctttctgtgtttgcctatctacagaaatatctcgccttctacttcgtcttcgtggacgccaccctcttggcccagtttttccattacaagcgagttcgcacgcctcctcgtcaaggcccttcatcttcctatcttcctacaacagcgtcgaccgctgtcgccccttataaccatcaacgatcctcctcgtatctcgactcatctcgtggacccgactttggctctcccaaagagcttggaacacatgtctcggtcgccaggagtcattctaaccatcgacgaaggggttacgcgacctacgacgagatgagcgcggccgctgccaacgtggcccgagctgcagaagctgttgctgcttccagacgagcgaacggaggtgtgaaccgaagtaaatcgcggacgggcaagaaagaaggccgtcggtctcgttcgaacaaacaactaggtgctttagacagtgatgaccaagatctgtcgacgcatggtttgcaaacaagtgtaaccagtctaggaggccagagtatccggtcggatacctctaggacgtcctccattctcagacactcgggtgtctcaaagaggacccatctttcgggttctatcacctcggcagcttctcagactagtgatcgatcttcgagtcaaagcttgtccgcgcccaattcccctttaccatcgcccgctcggtcacctacaattctcaagccgtcactcccatcctcggttaccaaccagtcgaactcaccgtcatcgaccgaacgaggcagatcgcttactcggccgggcgcgctcgtgtttgaccttcatccgccgacgcccgaaagcgcgagtccatatctggatgaagcgatgaggctcgaaggtcagtttcaataccgtgagctggggctgagacctaatcatccaggtagaagcatcagcagagaccccaaggcgagtcaccatcaatccagcaccggagggaacgcccgaagacatgctgcagctgccggagtcgtgctgatgggcttagggacgttcttcagtgttcgtgggatgggattggagttggtttcagcaccgggttcggtaggatatggcagtttggtgggttcctcaataggacatgttctaccagaggagcgagaaagcggaagggtgctctggaatacaggtcgctcggtcgcgcatgagactcgatccgattcatcagcgagcaattcagatagtgttcttgtagagtttttgaacgttcccgaaggagattcggtctacgacgtacctgccgttgaagaccctgtgaagactggcagcgagcaagacgatgaagatgatgaaagaggagataaagaggaaaacaagtctagcagccaaccgggaggtcatcgaccgactgccccaccgttctcatggcgaagagcgatcgggaggatgagcgcttggtcgtgtacggtgctttatctaacatcaagaatgcctcagatatggaaaaatgtgagtgccactttttctccttctgttgtggttcgtcaggaaccgtgtggatgaattgaaccggtcgacatcattttcacattggataaactcagttcacaagaaagtctattgaagggctctctatcttgttgtttgtcgccgccttttgtggaaacgtacgtccatattcctcttgtcttcttcttctctcttgcgtacgctaaagtacgcgcacatgctcaacatcttttgtttgcaaattatggtttcctcagtctttctatgtgctatcgatcgtatcgaacccgatgatgcatcgaccccgcccagaagggacagaattcttacttgagagtttgccttacctcgtcggaagcgggggcacactcatctttgacgtgacgattatgatccaggcaatcatctacggctcggccccgcctcttcctgacacacctccaccgtgggctcggaaaccatcgacaacgtcgcatcgtcgagctatcattccctacgggcacgctcacggatactcctcccattccagggggcattccaacgtgccgaacgacgagatggagaatgcccctttactccacgagagtcctatcgaggactcgttccctgctttcgcaggatcagcagatataggaggtggacgaaggtcgccttcgacgatgagatcgccaatgataccgaggcagagatcgttaagttcgagcaccggcatcaagtccaggggcgagtcgttgtacccttctggtaggcgacctttaagccgagcgggatctacccgggctggccaaactggcattgatggcggtggtgttgccagtgtgggacgaatagacgcaacttcagtagtagcggtgggagctggagccggagccggagccgagggacatcctccttctggattgtacgaacctccgcagaaacgtaatagacatcggtccacttcaggaggaaccgcgtcgaagagtatatctttcctagaggaagatagggccgaagtttcatctccgtcggccccatcgtcaccgacaatagcactacagaatcaaagtttgagcatggagacgtctgagaaggggggcggcccaactggttgaatgggaaaatggaagtgggggcggaacgtgaactgtcggaaccaagcatcttttcttttactcactattcttatttcaaatcaacagacgaccagttttctctttaacgtgtgaatcgtctttttaaatcttattgtgcatggattagcaagctcttctatggcaaagcaagtacgagaggcaaaaacttgaaaccccattactgtacaacaagacccgcagaggcagggtaagaagaaacgtttaatatgtgaacggaaattgaacggtcgtcatggcaacttgaccatccagcgtcattgactttgaacactgtgttctcctctatactttgcccttctacactcacccaagtccactcttcttgttgttctctttctgtcatggcatcaaataaaccctcgctcccggtgactcaacgtcaacctccaccaccaggagcccctcagcctcgagggccaaacaggtaagatacccttgtccgcctgccttgctgtttgttatgtaaaccgcctcggcttgtttgaactttcggttgctgatcgcttagatattctttccataccctttatatctactgtccatagatctacgaaagcaagtcaaaagctcaaggtgcactaaaccctctttctctctcatggcattctggttgaggacgagaaactaacgacgaattaatggaattggccttactcttggcactggttaaggtcttgccggacgagcctgaaacgctacctcctcaacctacaaaagtcttcaaggccgaaaaacctcctaccggagaggaaggagacgacgacgatgagagtgaaagtgaggatgatgatttggacgaggacgatgatgatggtgttcaggtgagtttgtcctctcttgccgctcatgtatatgcctatctgtttgtgaagagtaagtcgatagattcaatgaactgactctcttgaggattatctcgtgctcgattgatcatccttacaggtctataaacaactggctcaaatcccggctggttcagctagaagggatgcaatgaggcttacccggaaagagaaagctcggttacccagggtcacagcttactgtgttgcgacgtaagtgttttatcctgtcatatcgcttggatctatgatcgagtggtcttgttcgagacctaccgagctttatgagtctcagcttcctaaactgtcccttctgtgtccatctggaatttcaatcctatcaagatcatatcggttaccggctgtgtttgagcatctgaaatcccgtagggccacacatgacaccaaccctgttcaatttgacgaagcgatctacacatcctacaccgttcctgctcctccttcttcgtctccttcaaacgcctctacaagaggagggtccaatctgaatcccgcaaatcaccatcatggctcaagctcgaacactggtaggttgatcgacatcgaagaggaaacctcatcggccaatggcgaaaactctcagaccgatggtcctcccggtgaaacctccagtaaagaagagaccgatcagaggaagaagaaaaggaaatcacgatttgcagtcgatagtgaatatagtggagacgaacaggcaccgaacaaacagttcggtcaggatggccagggcagagtgaccaaagcagacgtgtttgtgttcgagtacggaactggtaggtcgaagattttgcctcctcaggtctgatagacgctttcataacagctgactgaaagaagtttttttttcctcttcatgaatagtcgtcatctggggtatgactcaagagcaggagaagcggttcatctcttcgttgtaagtcattccgcgacgtctgctccgagaattcctttccatgtatcctcgcgcaaaaaaactctgggagactgacatgtattctctctgtcagaaaacgatatgaggtcgaacgactttctccagatgatatcgagatggaagacctcaacttttactatgccaactattccaggtacgtaccactcaagaaaggtttttttctttgtctctatcgacgtctactaatctactccttatgcttgtgtacacagaatatataacgacgttattgctctcagaaaagggtcttcatatatgtaagcaagagaagtcaggttctatctaccttgcgtatatcctgtcctactgattacatacatttcttcgaaccgattaggacaaagctttcgctctctcatgctctcgctcagtccgtcaaactatctttcttcgaaggagcagtatccaacacaatcgaagagacgaaggatattcctcaaaacatttccgaaacaggaaagattaaagtatgtgctccgagtgaccatttgttgtgtatactgatatcacaacatctatcaattcctgacttcttctctgatttgtgtctgtatatgtagatgcctcgaaaggagatcatgaagcagatcggtcgacttttccttctaagagtcaacatcagtcttgtcggttcctcttttgttgattcgcccgagttgttctggacgttcccagatttagaaccattatactcgttagcatttatattcgcctcccttttttgtctgaggaacaaggatgttgatattgattctgttccgtgacgatatatttgtagcgctggagtattctacctggaagtcccccaacggctaaaagtcattaatggtcgagttgatgttctgcaagatatgctcagacttctcaaggtttgtcttttgtcttgaaactttcttaccatgaaatatggatggcctgctcaacttgaaattgccacaattttgaatataggaatcggtaaacagcgctcacggcgaaggtttagaacgaattgtcatctggctcatcgtcgtcagtcttcttctttctgagattttcttctgtctgtttatcttcgtctaacgctcttcaccttctctctctttcctgttgttgctggtatgattgatcgctgatggtttacagctcgagatcatcttgggattgacgacgattatggtcgacttgtttgtctaaaacgggtccgatccctcttagcttcaaggtttatgtatccccgataaatgttgtttttttatcgtcgctctgttttctcgttcatctcgatgtaagtgagtaacgaagagaactaggctagcattactcagtttgatatgattacatagtggacgggatacatgttgagagaagtgagtacacggtcgagtttagattactcggaactgtggtcgattggcgtggtgttatgagaaagcgagaataagtttctgatgtctcgctcgatagagaaacccggtctggagtcctctgtaggtagaccagagagagagggcaatcggaaacgaaagaacgaaccatgttgttcttcacatgtgtcttcaacccggtccaagccccatcctccgtactcaacgtcgactgtccaccatccctatccaacaacttttgcatcatctctgcgtctctctccgctatcgttcgttttccctttccttgtgctccttcctctgtctgagagtcttttgacgtttgggtgatcccaggtggtgctggcggctgtagtgatgacgggagagatgtggcatgtgaggtgaggggctggttggtagatgtcttgtcgatcggagtaggtccttcagaagtttctttcatcgacttggtcgtaggagatccttctatccctgtttgtactggagcagaatcagaagatgagaacgatttgaaccggccggaagggagagtgaatcgtaagtgtgcaaaaggaggagcgaggccaagggatggtctgattcggaaggattgcttcaaggctcgtgtgagctgcataactacaagtctcttttgacgggtggaagatcactaccgatcccaagaggtttgttattctttcgtccgtcttcttgttattatcacttaattctcaaccgatatgtctggagagaatcggctgttttaacaagcaagaaagaagatgagaagtggggtgtctaggtcaagtttgagtagactttccgaagatggagaacctagacggctcgtatgacgtcagtcaagacagctcttttgatgtatctcctttttgggatttcttggttctatttctcctcttctgatgtcgattgatcgctctgaagagatcaagatactctggcacccattcgcaaacggtcgaaggcctttttaacatgaaaacagtgtttcaaaggaagactccgaagagaagaaaggggaattgtagtagaaagaagaaaagaagaaacgccaatcacggcaagggaacatgtcgtagatgaaacagtgatgatgaagggccagaaaggaagggcacggtgcaaatgtaaggaagcgacaaatataaaaacaagattggagcagacgaaaccaaagagaaatacatcgaagtgaagctagaagaagaaaagcaaaacagaagaaggaacaaacaaccttaagagatagaaaaaggagaagaagaaaagagagggagggaaacccaaatactcaaaaggagaaagggaggataacttatgttcttggttctggtgtttcctcttcattctctggctcaaagccgtcttcggactcttcatcaagagtattcagactaggcggtcgggtgatggcgtcttcgaagacatcgtgaacaactcgatggacggccaccagtccacccatcactataacaacgacagcagaagcatagtacagattagtagaatgacacctaaagcgtgtatattcagagagagtaggaacagtaggcgcacaaagagcagggccaacaaggtgttccattagccgtctggctagggagagtcggcctcgatcggtatcagcagctgtatagtttgagaggtgaaagcgccatggaaaggaagagagatacaaaagaaagacatgtcccaaaacatgagcccgacatacacaccggtcgactagtagtcaaagaaaggacaggggtacgaacgaatcgaggtgaacagtggtgtgatgacaacaaggacgagggtcaagagaagaacaatggtgtagttgagctgtgcaggtgcataggaatgcggctcccgattgaccagttggaagatgagggcaaactggaagagaaagagaagatggtaagaaggaggctcggcttatagcaagggacgcacagagtcaaggtacgtacgaggattgttgggatggtgacaactttcaatagccaactggagtacggacaggatattatcaaacgttggatgagtatcgatggtatgtgtcaagaaatatcaggcatatgaactctgagaagaagacggaaaggactgggcttctgtaatacgtacaacttgggttcatgctggtaaggctcttgaaggatggaagacacgatgctgaaagtgttgattccgaacagaacgatcgtcaagactggtccaatgagagtgagagtaagattgataagtcatcactcgttcgctggcttcactgtttataaaccggcgggagggtgtaaggtgaaaggatacacaaaaatagcttgcaaacgtacatatcaggtatcctcttgcccaggtgtcccattcatacttttgtttcttgtactgaacaccatcgagcaggtatgtcagctcggttctcctttcggcatctagtaccttgagtgaccgtctgcttcggaacatgacgatcgcccaagaggccaggagaaccacaatgatagcagtgagggtgagaaaagaggaaacgaatccggtcggaggaggcgggtgtggaagattcatgacgactgcttgggctgctattcacttaatgtccagcgagagggaaaaactgttgatcgaatcgaggtcttttgccagtgaacagccagatcttcgtggtcgcgctcgactttgtctaccgggtaagtatccctggcaagaaaggcagacgatgcacgaccgtttgatcttcttcaggtggaagttgaaagtcaagaaggaggaaagttgacgagtcgcgtggacggcaaagtttttgctgcgcccacgtggaaaggctgcatcttcagcgttcaatgcatcggacgcagtctaacagatgcctctagatacacctatgatgatgtagtcgttgtaggttcacttgagggtgtctgatctgatgggagggagggacgaaatcattgagaagacaggcaggcggcgctatgatatcagctaacgattgagaattcgtacgagagcagggatttggtgcagactatgaatgaggcatagggtgagtcgttggctcggtcgtcgcatctatctcttgaccttgattcagagatacctccaagaacagatccatcggacatcaaacagttgtatagcaactgtttcttccttccaacatccagtgcaaagttccatatatgttgttctggtatgagcgtatgctttatccgactctttcctctccccacgcgcgcatgcagactgtcttccaacattcgtacgacaacggaccaaggcaagtcatgctttgccaagagcatctactgagttgcgctcctatgctcctcccaccttctctcctttcttcctgagtcgtgcgcgtatgtctgtgatgtcttgatcggtcgaggccatcctatccaagccacagtcgggtttgccctctggctgttagggttacgaccgcagtcaggcttcattatagccggcgctttacaacaacttctttaccccaatcgtcttcactgccatcgaccatcagacgttggtgttggactcttggactctatcactagctcacacacccacacaatatgcctccaaggaggacatcgttcacatctaccgtcaactctagaaacggattcgctccctcggcggatgtggcttcctacaaggatctcttgctgtttgaggaacgactcaaacagaacgcagctctgcttcgtagcagaaaacggaagtatgaaagtgagtgccaatattcagaaacaagcaggacatgtgcagagcagagcgctaggtgatggctggttatgtgtaagtgtttgcgcgaaggctgattgtgcttgctctcggttcgttcactctgtgcgtctgttcccgtcgtgctctggatcatagtcttcctcgctattcttgtggtctccattctagtgcttgtccacaaatctttcttgcagccttcacctgtaagtcgcttgctaccgatgtgactctctgtcagtctgcgtttgggagttcgtggaattgatctgtcctttcggaatactccttcaccatcttagacaccctcactgcactatctacatctctcgttactaccggtagcagtagtgacactcctgttgttctttgcgagcgggatgtacgccgaacgaataggatacgccaaccggtttgtgcttgactttcggtctgactcctcagttgtatcgatcacctcataccaaatcgattgtctcccgcttctaaacagttacgttccccatgctaacagagcacttcgatcgctaaacatgcaccttaatatgcgtgtctcccccaagccgctgatcccatatattcccttcccgctctctcttcttgtgccttcctctttgtcttcttctgccacatcgcccagtccgagatctccgtcgatatcacccacgacgctaccgagctcgagcaagtctcagaagcctgccagcggaccgaacccgaagccaatcccggcgatcccaccaacaaagaatcccagaggagagctcatcttctctagtagagtcgatcgggtctttagggatggatacgagcgatacagagcgctgtttgaaaagaaacgagaggaacgatacagagagctccgagctaggaagaagggcctcaccgggatttggtggaagtaggtgttggtttcagttcaacgtcctctagtttgcccggctggtatacaatctgttgatacttccctactcttcattgcggactgttgtcaatcgtaggctactcggctaccggtcgactcaacctaaaccgatggcttccggctcaccatcttcgcattcgcctgcgccttccaaaacgtcttcccaaccgacgacaccccctctgtctcgcattcattcgaccttgcatcttgtccctaactcctcaattccaaccaaccgttctcgatcccggactccgtccccatcggtgtctacccgggcgatgacggaaaagagtcggtcgacaaagctctcgtcctcaccgacaagatccgaggggttcgaacccatcccagagatagtctctgtcgaccaatcatcagggagggaaggaagaccgatgaagataggacggctaccggaagaaaaagagaaccccgggctgacaggacggagtcgggccgagagcttcagttttttgttggaaacaggacggcaggttggctcggcctcatgagcgatgtcatctttgttgttctttatgatatgtgtatttgaaaatcatccggtaatagaactactattccttccagttatgactccagcggtgttgtcatctccatggccgtggctccaaagctgtttcatggccatagcttgaaaatgatttcctctatctctaagcggtcagcgcttcgaaagtagtcttggctccctgagacttcccggccattaatcaacaaagtttgtccatccggcgaattcagccggatatttcttctttaatctacaacttctacatacgccagacatctcttccatctcttccgtctaccgtttccgtctccgtttccgttcttggtccaagagagcttcatataaacatctctttcactggagtttgagcgtctctttgttccttctcaggtcgcaatacacacacacacacacacatacacaagattttttattctcaaaaaatggaccagatcatcccagagcttaacggacgattggatacgctcaccgcgttcctcatcaacatagctggtgtcaaagatcgagtgaccgatctcagagtatccgaccttgataactcggtaagtgattcgttgctgtttctttatccggttggtcataggtttgatcagcagttgtactgatccgctgagccgaatactgcctcgtacagggtcttgagctgtcctaccaaccactcacagccgaacctggcgctcagccaaaactagctcaggtaacgagattttctttccaattctctttcgatttagctgaaatcggagctgacgtccatgtgtcatcgccataccgaaaacgttgttcagattccattcaatccgcctgtgaagacagctgatgaagcacggacccggttgtcgaaacttcgggaagagtccttccgagccctaggcgtcgtatgttcatgaggtcttattccacttctcaagccggacaaacgaccggttgattctaatcattaccttccgtttggatattggttaggtccctggtagttcgctagcaccgttcgagcgacctccagttctctcagagtggggactcgttctggccctcctagggactcaggcaatgtttctgactgctactcctacatcgttcgttcttctttccctggtttattcatttcgttaactcttccgctcgaagctgtttgataaggtatcctaacacgaccacgagggggcccgatagattcctacctgtgatgcaagagatctcgaggatcagagacacaaagcttccaggaggaataagctttgttaaatggtcctacgcgcttctcttcgttgcacactctctggagatcgtttggttcaccggaagtttccttaggaagaaaaaccttgtcaggagggaagacctggtaagtttttaactcctcatcttttctcttcgtgttctccgttttttttttctttcagttcgcgcgcactgtgcaaacacaagatgttgactgccttctcttcgtccaacgatgcaaacagacaaaatggagttggtggactctcttctttggtctagctactacgtgagtcatttttcctctcgtgtgatacccagagtgagacgaatgctgaaaccagaccttctcgttcatctgtcgggaattactgtaccgtatacggatactcaagttggccgcactacaaacgaggttcgtttctctagtctatctctccttcgttttctcttcaagtcatcgttttaaacctttcgtctcttccggtatcctgatcgttcgtcctctgtcttgttgtgttgatggcgcaaaaaatcaccttagaggttcaaagaacccatgttgagacaatgtactctaagcggtcataggaatccattcaacctcactcctccacacggaacaatcgccatctgaaattacctctattctgtccctcctcctctctagtgttgtctcgccgtttttattagattaaagcaacttacaatggctcatgtgccggtagatagaactatcccttcagatttatcgaatagtctttctttggatttacacaaaaataacatgacacatatattataggaaaagttcataaatccattcgaaacaacatatacatgtgcaaaaacaaagaacattgaacgagaaaagattggtttaagaccgggtcagtatcgtgaggtggttgctttcgttttctttgattagtgttagcgactggaaatcaacagtcttccctttccagtggtcagtatgggacctacccccaaggattcacgcaggtaggccaaacatgtagcgggggacgaacgaacacacgaaacgagaagcggcactaaagggccaaaagaatacaaaacgaaaacgaaaagagggaaagaaaaaagccaccgtccccgcctctaccgacgaaggactacctcaagattttatcatgcaaaaaagggtacatcaaagaacagataggtacgccaacattttttccaagaaaataaataaattagacaacggtccagactcggacgacctgatgagcacgaaaagtaagaaggagcgtaagtgaatggaacggcaacaggaaatgaagtgtggaaagaacccacgttatcggtgaaaccagcgaaaagagtctgtccgtcggcggaccagttgagggaggtgcactcgaccttcttgtcggcaccctcagcggtgagctcatcaacgatggacttggactcgaggtcgaagatcttgatgccagaggcggtggcagcgcagagccagtatcggttgggggagaagacaagggcgttgacgatgtcaccggcctcgagggagtagaggtgcttgccctcgttaagatcccaaagcatggtgattccgtcctttccaccggaggcggcaagggaaccatcaggggagacagagacggtgttgatgtaaccggtatgtccgtggtggttggtcttgagcttgcactgggaaagctcccaaacctacagttgaagaaacaaagggtaaagcacatgtcagtaaaaggtttttcaaaagattctcgggtcagggatgcagagatttgtgatggtggaagaaatcagcgatcttggtgattaattgttctcatagactagatgggtctctgaagtagcaaatataggttgatcatcactttaaaggtgggagaggtggttgtgggggtggcagttgaaattgtactatctggatagagacaggactgatccacgaaagcagcagaaggaatgataaagcaaacacgtaccttgacaaccttgtcccatccggcggagacgatgacggggttgagggggttgggggagaatcggacgcaggagacccactcggagtgaccctcgtccttgatgtcgaacttgcactctccaagagtgttccagagcttgatggttcggtctcgggatccggagacgatctgtcggttatcggcagagaaggagacggagaggacatcggcggtgtgtccaacgaatcgctgggtggtcaaaccagtgttcaagtcccaaagtcggagggtgtgatcccaggacgaggagagggcgtactgtccatcagaggacataacgactgggtagagaaaccaaggaaaaagaagacatgagcgtcttgaaggtttgacacgaaagcagcaaaaacaaggaaaactcaccgtcagagacgaagtgggagtgaccgtgaaggatcttcttggggtaaccgtaagaagtatcatctcgggtgagctgccagacaatgatgttcttgtctcgggaagaggtcaagatgatatcggggttctcgctggaggtggcgatggcggtaacctaaaggaatggtggaagaaaagagaaagaaaagacaagctatcaattctcatgctcctctttgaccaacgaattcaaaatctcaatcaaacccggagaaaaatgaacttacccatccaccgtgaccctcgagggtacccttaaagacaagagactcagacatatttgctactggttgttgtttgggttcgaaggaagctttcggaaaagaagcaagagtcgacgacgggaggagaaaagagaaaaagaggaggagaaaaaattgtgggtgtgtaggttttcgcaggaccgtaaccacgaacagggctacgagtcgagtcacgtgtgttcggcagtcggaggtaaattcagcacggcttcggttttccacgtggaagttctcgccacaaagcgaggtgtggctacacttacgccgctggctgactaatctcgatcgctttaatcgcttagtcatctctaccatggttacaaaccctccatcttgggttcctggttccttgttcctgttgcgccctctcggtcaaatcccacttctcgcccaacacgatctctcttcttcttctttcgcattcatctgatcgaccatggtacgtgttctattctggttgacctcagccgtcgaacgaaacgaaggctcacatgtctgtgtggttttgtgtgtgtgtccttggtcctcgggaaactctgctttggttgcttctttcttcttgctcccatcgtcactcttggttccacatttcgaaatatagtccaagcatcatcccggtacgtgcttattcattctgttctaatatcatctgagccactcatcatcgatctgatctgacttgatattcacctggctacatttgcagatctcatcatgtgccgtaggcaacctggtatcggtaagtcacttcttttcctcttgaccgacgtggccttttcattctatcgggccttgcttgatgacgatgcgtttgcacgaatcaatttcttccttactttatgaatagctatcggtcgtctgtgcgagaaatgcgatggaaagtgtcctgtgtgtgattcgtaagtcatcttttgctttgaactatctgatatctgtgtgattaatcatgacccattcctacaggtacgtccgaccggctactttggttcggacgtgtgacgattgcaactttggaacgtacggtggaaggtgcatcatctgtggatctccaggtgcgctgatacttccttcttatcttcctgctcccgttttcttgctgatttgaacactcatctctctttcacacttcgctttctcacaggtatctcggacgcgtattattgcacagagtgtacgcgcttagaaaaagaccgggacggctgcccaaagatcgtaaatctaggagcgagcagaacaggttcgtgatctgtcacttaatttctcacttatctgtaccctgatcttgtaccgtgatgttgacattcactttttgaaccgttttacctgaactatacttagatctattctacgaacgaaagtcagttgttaaatgctttctcgcgccaatccagataataattgtttctcgaccttttttcgctaactgcttccactttacttctttgttcttgtcgtgatccctcactagaaagcttgggtatgtcttcagctctcatttcattgacccgggaacatattctgatcagccatggctttcataattacattctcactctatatcttataggtttaaaaagggttgaccgtttccgatctatagtcttcaagaaagatgcacatgaattgtacactatactgaatatccgacatacacaccaggtcgtccaagaatagaatcaaatgtcagacgatttctgttcagaaggaaagtccacttttccacatacacgtcaatctattgagggctttagacacagagcgttcgtctctgtcttcatggtcattcaggacaaagatgggggtatcatgaacagaacggacgaagaaaaaccaccttcggcaatgtccggttttgctgctaggggtatccaaagtttgtgaatatcgacctcaggacgaatgctgggcaaacaagacagacagagaatcttgattaccctctaatgacgatgaaacagagtgacgttctgtacgaagctttcgagcaagacgacaaacgatagaaagtaagaacgcgtagctcagcgagtcgcctgataaaccatttgacgtctacctgttcgttgtgtttctgtacttgttcaaattctttgctatccatgtatggaaactgctactctatcatcccctcttcatacgaaattcacaacatcagcaaagaacaacaacaacaacatttctcatctattctcgatttatgtagtagtctctctaaaatggaccgatccccctttgaatctcacagtaccagttatccttctcccactcttccttaacgagtctaacccaattctgaccttgtctaatttcctttccttctctcgcatcttctccttctacgagagaatttacaaaatgtatctgatcaagctcgcaagcttgcttgacaagggaagagagctcggaagatttgaagagatgatagtacctctggaacacctgcggagggcttgccggtcgagcgggaggagtgatctcttctacaggcgtcggttctgagactgcaggaacagctgttggaccatctgtttcatctgtgagttggtcaggctgagcacgagaaggcttcttttttgaacccggttgtttcttctgtttcgtaggtttcccagccccgggtttgagcgcatccttgacagtttttggggcttctttcgagaggacccaaggaacgaacacgtcctgagctttgtcatccaccgcaggttctggtatcgctgccttgctagccactggcatactcgaatacgaggttgatggtgaaacagggacagaggaagacgaaggagtagggttggtcttggcggacggaacaactcgacgagcgccttcaccttgctcaagagcccagacgtatatcattccccgaccatgatcaggtacgaggcatcggatgaacgttcgcattgcctccaaacgcctttctggagtagataggtgatgcaaggtggcgatcgagatggcgaagtcctattaaacaagaaagagatagagaagaaaaaatagccagcaccatgagccaacgttgaaaatctaaattgcttgaaacacgatcttcgagagaaaaaaacaggaagacataccatcgagcctggtcgaactcctccacaatcaagaacatccccaatcatgacctctcttctcctttcatcgtctgcctcctcttccgtatcctgcgcgtccgaccgtttctctttgacatatccaaccctctgcgcgagtgacagaagtctatcactccgatcaagcccaatcatcatagacgatccattagatccatcccaagccggaaggtatttgccgttcccacaaccggcgtctagacctaatgagccagggggaatagtgtgcaagaatgcagctatcgagggccattgcttaggaacgtgatcgagcagagaagggaagagaagaaagagtcaacttctgaaaagagaagcatagaacgaaagaaagatgagcacttgcaaggatagacacataccttgtatctggtagccgagaaatgagtagcaatcatctatgaagtagaaacaatctatgtgttttcttaagcaaggcaggaacttgagcatatcaagaatagttagacgtacgttgtagacctcgtgaacattcttttgctcatagtccgatggaagatccgggctgggcgctacggtcaatggtggtggtcccataatcaatgttactgatgttgatgatgttgctatagaagaagacgaagaagacgaagatgacgatgatgacgacgatgatggtggttgctgtttgctctgctcgcttggatttatttgggaaatatcaaaattattgaagaaaaaacgatttgaatgaatatctaatctctctcgatcgctcaagcccaagataccttcgattctcatacaccatcacggttcccgacgatggacactcaaacttctcacccggccttggcactctccttgtcagatggatccgagtccgattcgtcatttaccgaggttcagtacgatccggcaaaagatcgagagtggcttgaggacgaagaggaggaagcagttgtggcagctgccgtggcagtgaatatcgacgatgagaatagagaacaggagaaagcaagtgaggttgtaatcgagtcatcgagccaagccgtaacaaaaaaagagaaagagaacggagaacttctaatatgggacaagaatggttgggacgacatggttctccttaaagcattcgatgcagccagagaagaatatcaggttcgcttctctcctgtccttcgaatgatactacaacaagctgacttgaatatgagatcattctaaatgtctaccggccaaaggcgtaccatgcaccgatagcaccatacaagccttttgtagctgatccaatgctggccattcggtcaaaggaaagatcatcaaattcatggaagctgaagttggagctcaaggagcaacttgctcgagaggcaaaggaggccaaaggaatccctccacccggtgtatccaacacgctgaatttgttcgtcatctttcttctttgattttcatcctaagtccgtgtttttttgatgaagaaaccaaaacacctattgaattgagcgcaatcgtcattgttcttacaatctgaaataatcgaaaaatcgaacaatcatacttggtggtctattgacaaaccccagatggtacacccgactcgttccttccgcttccggctcgaagtctaatgcaccgttggcatcatcatcaacaaattcgggccagcccaaatccagtacgaactcttcaaagggccgttcgaagaggtctgctcagccagacatctctatcaatccatacggttctactccgtctagtttcgtccatcatcttctctttttgttcatcttcgggttttcattcaattgtttaattgccttttcttctttcacaatgtacccaaacagaaaagagacacaagagatcgaaccaaacgacacctccctcgatcatccactctctatctccgacccataatgattacacgccggattcaccaagttatacacctcaatctcccacgttctctatccctggttctccatctccacggtcgatcgatcaagcaccgatagagcctgaggtggaaaaatacgataagcaaggccaagatctaaggagtgatgacggcagaggaattgaagaagaacaatgggaagaaggccgcgaagtcgagtttggtttccttggtgtcggaggtggaggaatgctggattccaaccagtgggacgattctagtctagtagaagattgggaaagacagaaaaagaattggcaggttcgttgatctttttcgggtttctttttcattttaatatctgtcttgggtttccatcttctccttcccgttcgagacagaacattctcacatcttgttcgctaactttgtctttgtctaccaaggctcaacacggaactaccaaatcatggctcgatcttgcgcttgaggcccaagctcgaggcgaatccatttccagcctagacatccagcctgcggttcctctctcttccacatccacatccattcctacttcgtctatctcatccgcttcgtctggaatcgataaagttgccgagagaaatatagctcgattcaaggcggtcgctcaagccggaatacaaccgaccaaaggcactggtttggaagacaacacgtcgggcgaattgtgttatgattaaaagcaatgcatgaagataaacacaactggcttcacctgcccagtccttccttccctatatgtttatcgatactcaattaagagcgtcaatgagagaaagaataaggaacgagaaatgatacatggatatacaagaatggcagtttcgcctgctctatgtagaatgagtgaaggggaggataaggaaagatcctactaaaatcctattttctacacccgtcttttatcgtcctcaaggccagtctagaagtatagtgaagcagcaaatacaatgtctcgcttgatcaacgcctgcgcgtcctccatctttttgaacaactcagcgtctccgataactcttgccgcgtcccggacttcatgacaagtttggtcgagccgagtaatcactcggacgatcgttccttctgctacatccgtgagttcagtaatttgttcgaagggctgaaaatcaaagaggaacagagcgatcatcgataagaacaagttccagaagcaaaagaagaaacggagaaacaatagatgaaacgaaccatgcccttggcccactcatacacggcctcaactagaccaaacttcagcgtagtcgcataatcatcatgcgggaccttgttcctatcctgcacttgaccaatcttctcggccagttctaagataacctttttaccctgtgaaatcaacccaaaagatcagatcggtctttgatgctggaaaatgaaagaaaggctccagttgcttacttcttctagacgagggggaatgctcggttccgaatcagacttttcttggaacacgaaacaagacagaagagccacgatttcttccggttcaaaggtggcactgattttatacaaatcaaacaaatacggtcaattttgatagcgtatataagattccatcatcaaaatcagtacgtacaggatgttctccagaatgagctctgtgagaatgagctcatttgctgagttaatcttttatcgagcaaaaaaaaaaaaccacggttcagaaaatatgaacaaaggggatactgcatcccactgtgacacctcaatcgagtgaaatcaacatacctcacaagccactcggcctttgagcaagacagtagcgttatggtcaatgaaccgaagttccttcaagacctcgatcctagactcatagtccggtaacaactcaagattctgatcagaaattgccgccttgagttcggctatcttgttctgaagtatcttctcctcatgcatagaatcgtactggaaaaagaacggttatatgcggaaggtcagtatcagttcatcaacccatttcttgcaagaaaagaagtcaaacaaaaacccacgtatttctcgatatctccatcgagcttggactccagcttttgctgtcgtcttaacatcgactgtcgagccttcagcgcgtcttggatctcgatcgctctaagtttggaccagtcgatttctgggatctcgcctgatttgataaatctgtccgttgtttgagccaacccctcagccgtctcttgaagagctgaaatttcaaatttggtggataccgctcggaatctctcggcgtccatctgcaaacaagtgaagaggcgaagagggttaggttgagaagacaacccagtcaaactaccttttacgagaggagtcaagaacaaaccttgtagatcttcgaagtgaccaggtttatacttgatgcaggaaccaccaccatctcgtatttgggctcagcaggtcgttgcaacatcgacaccgatggcggccacctaggaggaggcataggtccgtctgtccatgtttgaaaggcggtggtataagataattaaccaacttgccccacaaactagttaaggatgattaggcaccagcgctaacaaaccttcagtgatgttctttgtaacctcgtcaaccaggaccaacacagcgtacgacttagaagttgccgctgtcgggcttgacatatttgttaccgggcgaagaatgataccaacattcaaagaaaatcgctagaattaaaataagatcatagaagacaagagaattagccgaaacacaacaacgatcagatgtcatcaatgacgaggcttgaagagagatcttacgctatctctaaggagaacgacacgtccagaagcgaagatcttgggaccttgtgttgaaagcgcagcattgtcaatgatccaactgttaaggtaaaccagctcggtcgaggcatcgtagaaagggctcagttccggactacagtcaagttttgttagttgactcaacgccctttcaatcttctcggtttcaagacaaacaccagagaagtagcaaaagaaaaagtgtcaagatagtaagcagccttgagggtataaaaaaactgagcgctgaaagaaacagaacatacctcggcaaccttctcttgttggtcgggaagaagactctgcgatgcgttctcagagaaacttcgtttgatcatctcttcaaccttgagcgcttccactctgagcaagttgagaagcatcgagaacgtaagtcggaattgagatgccagcttgtttggtgtaccgagcatcatctggtgaagtgcttgcgcctgataatagaagatatgtaaataggaacatagatgaacaaaagagatccaagccaactcgaaagctccaggccaagaaatgggaacaaacctcgggaatctcatctttagggataatgataaccactccagttgcgtcgagacctcgtcgaccggctcgcccggacatttgagtatattctccaggtagtaggtctcggaagttcgttccatcgtgtttccgggtaccggagaaaacaacagatcgagcaggcatgttgactcccttgagaatcacatataccataaatcttcagctttgcttgatagtgagaagcaattcatagacctaggaatatcacgtaccatcgcgaacgtttcagtagcaaacaagactttgacataaccggaagcgaataaaatctcaacaacctctgataagggtgttttccagggaaaaaaatataaaaaggaagagtttcagcggccagtttcttagaaaatagcgacataaacaacgtcacggcgagacgatacgtacctttgacgatcggaaggagaccaccgtgatggattccaatacctcttttaagtagctccttcattcgttgaatttgcggcaaccgttgatcagattctgaatcaatttgtatacacatttgcatttttgttagtgaagcagaggaaaaacattacattgatgtcaatgaagaagtgacaaataaagaggacttaccactcagtcgcttcattgcgttctcgatgatcacatgcaccttgctcttctccactgctgtgcacaagttcacgttacttaatcctccagcatattcctcacatcgcttcttcgagaacacgaaacaaacgactggcagcagattatttttctgaaggtagttgaccaggttcgaccaaaggttcttgtcctgaccctgcggtcggaag

SEQ ID NO: 245 - DNA, 33766 bp, Xanthophyllomyces dendrorhous
tcttccgccgccgttagttggttgtcctccccgaccgccccgagaaggcggtccaccccgaggaggtcctcctcgacctcctcgcgcaggaggcaatcctcgcccgcccgtccgttgaagtgggggtaagccagccgcttctcgctctttaacctgtttccgtacaacggcgtcagacgcgctcttcaatctaataaaataaaccatttagtcatattctattgtcagacctcgtcttccttgctcaaatgatcgaaagagtccttattgagaataacaaatgaaggaagaaagagcaaacggacccgtcgttaaggaattcgccgttcgagttgacaatcttgtgtagctccttgccagcccacaagaaatgttcaagaggtactggtcgttttggcgtcgaaataacgtaaacgtcctttttcttcgttcgactaccgatgttctccaccaaacgcggactgatcagcaacagttgagatatcaattatgaaacaaacaagtcagatatgcatacccgacccatcctgcaaactccttggtattgggcactgtggcactgagtagaatgatgttgacatgttccgggagaaggatgatgacttcctcccaaacgactccccgctaatccaaacaacccaaagaccggttagcaaatacacaaaaagacataacgcgacagcagagcagaatgatggataggaaaggacaaacctcggcatcattgacatagtggacttcgtcgaagataacgaactcgacatctcgaatcaagtctgctcccttgtagagcatacttcgaaggatttctgtcgtcatctacggttagaacgcgagaaagatatcagagtctgaaaccataatcgacatcatgaagggaacgacaaccaacgatcaaacagcttccttctgggttgatctgaacatctcccgtcaaaataccaatcgtgctgggatcaaaactctgtttgaagtctctgaacttttggtttgacagcgccttgatgggcgatgtatagatagctctatataccagaaacgttcattgagtgcagaaagaggtaagacatactgatttcgacaatatacgacagaaagagaagcaagaaacagttggttgacgaaccttgtcatatgtttcgccgcaagagcaattgcatactcagccacaactgtctttcctgcacttgtatgcgctgccacaaacacagagtcacccatttcgagatgatagattgcttctttttggaaagtatccagattgaacgggtactatttattaaagagataatgatgacgttcacaataagacatgtatgttgagaggacggtatagagatttggtagtcaggaacttacctggtacgccatatcaggaacgagctcatcaaactatgtgaattgagaggaacatgaggtgcattagttggagtgtaccctacgcaagacgacttgagaacaactgacgttaacaagctcttggttcacatctaccacatgagcccactccctcttctcaatcttctttactcgtttgggtttggtaactgcgccggaggtggacgcgccgaacgactagggagaaagaaagaagaaagacaccaagatgaggctttgagaatcaaaaagtccgcttctaaagcgatatttagcttacagaaggggacaaaagatcgtctattccagatatatcttcgttgagaacaacagatttgggatttaagagtgactcagctgcgagtttcgcctgtggtcgtgcgtcctgtgagtccaattcacacacaaaaatcgacaactcagtcagcatcttgaattattttgtgtactgcaagaaaactcacgatgtttgcatcgtcgccatccccaaccttggctttccgaatgccctcgcctggaccacgacctaagaaagcttcgatgacccaatcgtccgtttcttctgctccttctgctgtgaacattttttcaagattcaagcctctagcaaaaccaggaggtttgactctccatcccccctgagactcttcttcctcttcgacgaggacgttctgctcggcatcgagcgcttcctgttcggccgttcggagactgagctgagaggagattgcaactggctcaagaccacccggaaggaagggaagattgcctgaattcccacggacaaaagaagttgctccagctggtgcgcgggtgtatgataaagaggtcaaggatgatggcggagggggaggggctttcgtctagagtttgggagatataaatggtaagtaccagggtggacttcgaagcacacaagggtaaaggttgaaaactgacctcaatccagcctgcgacatctccagaaagtccttttcgaagaaaacttgttgtatgcgtgggcggagctggcagcaagggtaatttgggaaggggagtcttcatctcccattgactatgtggaacggagtttaagacgatcggccatttgccccgtcatcaaaaagaacaatacgacataatcaagaatgttccaatttttgtttcacaaaaggcaaaaggaagaacagaaagagagaaaaagagtttggaagactcacactgtaaagtccttgagccagtcctcctgaaggacgttccgaggagtgaggaacttggtctcgatctgttgatggacgtcatcttgtgtgggaaggccaccaaggttgagctgagcgagcagttcgtctgctggcctcgtaggaacagcgatggccatgtagatgcggatgtgtgtgggtgtatgtgggtgtaggtgtaggtgtctgtgtgtaagtactagggcttgatctatgggtttcaggaacacagggcggtcaggacagatagagaaaaagaagggactgcaggaacggatcgagcgagaatcacgattagtctgacgtcggtttgcgaatcaaagggagaattggatgtgaggaacgtggttgccatggcgacgacggaaacagggcgatcgtcaggcacaccgaatgcgatggtcgttttcagggcaagacgacatgccgaaccttcatttcgttcctgagtttcatcggttcctgaatctgcttgccctgagtccatctcaccgctcacagcatgcctcgatcttgcgctggatcacctcttactgccacgacttcccgacgtccaccgggagagaacgagcctttggaggtcgagatcatcgacctggcgaacgaggattctgatagggaagaactcgtcccagcaacaatgaaccaggcagaacaacgggagcgagaacaagaaggtgacgatgaagacgagatatcctttcaagggtcaaccgggccaaggattagacggtttggtcgaacgctcgagagaatcctcgggggtaagtgagtctgtgtgtgtgcattcttatcatattcgtctttcaaagaaagctgactgacctaaccgatccctggcatttaccttagagatcgataggcctctacagaatccagaagagcactcaaacaccacttcttctcactttaacacatatcctcaacagtcctttatctctccagaggaatatgatggctttgacgatgtcttcgtttacgacactcccctatcacctcccaaagccgtccagaggattcccaccaggaagggattctctcgaagttttgagctcgagctaggagggtttatcgactctgacgatgatgaggacaaaatcaaactggaaggtgaagagaaagtcgaggctcctcaaagcatacaaaggaagaaacggaagctgtccaaggtccaccaaggtctaacgttcgcctgctcgggatgtgagaggccactattactgaacgccgaatcgtctgggaggaaagtatatgcactcgcttgcggacatcgtgagtctctaaattctctctttatttcctgtttctctgctcggcatgtcggtttccgtttgacagaagatgtctcatctgtcgtctgatcctttgctgccttcttttgccagtgatcgatgggtattgcttatcctttctctcgacaccctcacacttaccacctgatgcatctaaacacgcacccaaaccgtctcttccaagaacctcttctgtatttcctagatctcactctttgtcactcccggcgcgaaacgcaaaacgagctctcaagagggctcaaacacatcggtatgtctgcccggtccagggctgtgggaagacgtactacagtgatctggttgaacaaccggagattcttagaccggatatagacctctcaaaagatcaagagatgctctggaaggtcagattcggatctgatggggtgatacctgtctatgtatgacacatgtagttgatagagtagattgagaacaaagaaaattattagttgttcatctgcgctgcttgtttataagctcgtcagaacagagacgggtgctgatgatggcgcaaaaacttatggagtaatatatcaatgatcaggtgaatagatcgcatataattcatgacatatattgtacaggatatgtccggatagacaggtcaggaggaagcaaaaagggagagaaggatgatttcaagcgtactaagaaaacaagcaatatgatgtgcgatcaacatcagtcctggaagtttttcgaatgaaaagaacgaatgatagaaggaagggttttttctagacttactctagtgaacgttcctctggtaataaagttgtcttcttcctttcctttcttacccgcatacagacttttgactgcatcgctcattcctcccgcctttctcttctcctcagcagccttcaattcatcggccactgctttcgcaattaacccaactctacctccattcccgttcatctctgtcttcgccttggccttcttgtgagttgtcttctcagcaccagcactgtctccatcatcaccagccgccactgctccagacttgcgtttcttgttcttcttcgcagccttctcctccgcacgagcagcattgatcaggatcaaaagatcctcctgaaggccgaacgaggagttcaagtagatgatatctccattcaataactcggcagcctggtctttgtcggtcgaacggatgaatgtcggtctgaatgaggtggaacacgttgggcaggcgtacatccttgacttctcatccgacggagaaggagaagtatcagcagtcatcgttgagggtgatttcggctgaacaacggatgaagtcgtcagagtggctttcaaacctgcctcggagaaaacatctccgcaaggacgaagggcgacaaaaggagtcgtgccgttcgcctcccgttgagttaacggacacgagaatgggaatttaggagctgtcacgtcggacgtctcgtcggcggaaggagagtagaaattcgggttcggggtcagttggatcgttaacaagtcctatatcgggaaagaaagcgaacatacagcatacaaccgtcaattagcacaaaacaataaaatcataacaaaaggatggtatgaaagaaacaaactttgaatcctcggatgtgtccgcagatcgattcgccatccccgtacgaggatctatctaggagaaactcgagcatcgcgtccttgttgtacattcttcctaacgcgtccagcacgataggtgatcgaagagagcgctgatcatcaagattttgagtcaattgtcagaagacgtcgagagaaaagaggataaggacgacaaagattacgtacctttgagagagcgcatgaactccattgggctcgacggaggttctctccatcggtctgctgtgctttcggcttattcttgacaagatcccttcgatcctataggcagtattccaggcaaacaattaaactcagtcgacaaaaccttttgagaagaaaggaagaacgaaacacagcaggagaatgtatcttacagggattgatcctccatcggctctaagagaaggattaaacgccggtataacagaaagttgccggtttcaagtcagtatcaagactttattgtacgccaaagaaatagatactaaccccatgctaagataaaactaatatagaataaaggaagagagagggtgatagagacggttgagagagtgtgtgtggatgttcggataatcttcgacgttaacagactttggtggcaacgataaccgagtgagcctcgacgtcagcctggcattcgtcacatgctggaaattacctgttcaaatgagttgctctcaaacagtctcattctcctcatcatcctttcttttacagatagacataaacatggtcaagacggagacgacaatcgattcggacggctttagcaccgtatctcgtataaagtatagagctcctttggcttctactttaggcaaaggaaagaagaatcgaaagggtaggcagacattgctgcagggagccaacgcgcatgacaaggagtgtgggcaggaagaggaaacggtagaacatcaagtcaagaatttgaatgaaactctcaacagccggaaaagggagatcatgggccatggaggatgggcggctgcttgggaaggtttgtcctatctttcttctcctttgggtttaaaaccttcataaagagcatggtccttccatgcttatgtctctggtgtatcttcgactatgcttgcatatcaaatactcgtcttgtcatgaagaactggtggtgtctctcaagacggattcgaccttcccgaatccatcaaggatgacatgtttcggactaggtcctgtatcaacgtcccgaatagctcaatgccagttactccttatgctcgaccttgctcagaaattgcaaatcaatgtgctagaagcttatgaccctgtgttctcaacattggataagtccctattgagcacatatgggattgatatcatctcagagaatactgtatgtgcttcctatcttttctcgtgtactttgggtcttttcaaagcaactgacatgatcatggcgctcttcgaacgacagcacggtcattatcctttatctatttctgctggcaattctcaaacaagcatccatccttctaccgagcctgcctccgatgaccagctgccagcttgcccttcagattctgtcctctcatcctctcctgtgcctccgttccctccggtatctcttcatccaacatcgactgaaccagacacacggacggctcacttgttctacatgccccattgcccacgaacgttgtatcaaaacttcttggcgtccaattggtcaaaatcgcagctgggaagcattgcgctcctcgcaaatgagtttgaaggttatttgacgaggtgagaatgagcaacactctcggagcagttgaatattttggtctttccgcttcattttgggcagtcatctgacaggccgatgcattgctgtttgttcgtagggaaccgttgaaaagacttcaaaaggaagttccttgtttacccctcataggtaactaccctcaattcatattcctcgatggtcgtgagggatctcttaaatgctcaccgttgcttgatccttttccttctgtcctcgaacatagcccctcacttgaccacgaaatctctacccctaaatttcatttctaacgatgtgatcaacgatctagccttccaatgggtctcagccgagtcacttgctaagatagacttctcgaccaaggcgcctgtagggaacatagatcctaccaaagatgaaattttgtagaaccaatctgtgtggaagctcattataccattttggtgctggtccccaaactatctgtcaaacccatgacttttcttgtcgtctatacctttgtttgaacatcattgatgcttcggaaggattccactacgatgaaacagcttgcttgagtctagacgtgtcatttgtttatatagagatacttgtagcttgaagggtgcttcattcaaaagataattgagaactgatatatagaggaagaatattcattccatcgaatctcgtctctaatggttcaaatcatcacacgtacgagagacaagaaaggaacacagagagaagtcagtctcaagaactaggaatttgaagaacgatatgtaggtaggaaggcaaagaaatcacggacctctcgctgtcttggttcgtcgtcttcactttcatctccgtctcgctctcgctttctgttctcctccaacactgtgtcaaaataaattggtctcagtcagtatacggggaagatacactgcatgcatggagaacagcaagaccagcaggaaagacatactctgatcggctccttctccctgaggcacctgtcctccaccaagacccgttccacccacaccagcataaacctcatactgcatagcccctcgggctcgatcctgggcttccttctcagcgagcgctcgctgatgaccccatccacctcgaccagcgtcatattcctgccggaactcgtctcgaacctgtaagaatcattttgagatgtgaatcaacagccattcttctctttacatacaagaaacccaaagattctttcgataatatatacctgtccaccgttctttcctcgaccaaactgtcgaccttctatgtatcctgggtcgagatcacatcgaatcactcgctcgtccaaccgagtgcccgagatatatctcatcgaagccagagcttcttcgtgggtatagtactcgacaaaacagaacccacaaggtgtcctttgagaagttgatccattcaggagggaaagtaagatagttatgagattgcgcgtttgagatatgagggataagtaaaccagagatagaagtacggcttacttgttcctttagagaatagtcgataattatcgaacaccgttaataaggagctgaatgacagtacaagaagactgtagagacatacattctgtcaagacccataatgattcgcttaagtccaccgccttccagtggatctgtacatctcgagaagactaatgttgaacaagagaggatgtattgaagatgctcagccaagtcatgaatattaaggtctcaaacatcctgcccaactggacataagcaagagaccaagagacaagaggacccgttacatacgctcataaatctgttgttcagttgtgaagaaggacaagtttccgacgtaaagtgtggtagactcatcaaggagagatttagccctttgtcgatccagcttaacgatcatcaagtttgaatggtgagaagagcaagagtgtatttacgatcagcctcatcgaactctttcaaaagcaaaaaccataacggtacctacatgagactgggagtctctataagtagacggcttgtccaacggttgaacgacgtgagccatgattaaacctgtatgtatgctggatgatggatgctctgatgctggtaggagaatcctccgtagtgggcaggacaattataggcgtaaagtcacgtgatctcttgcgccagatcgctttgcaattgccttgtgctgcacggcttgattctccctcaacctacacctatccactgaccgtctctccctttcttgtccttccacacatcctcatacccacacacccacatccagctaaagaagatgcttcgccaggcagccagaaaggctatccagaagagttcaccaaatgtgccttacgcttgtagggtcgccgttctgccagctgctcgaaagtactctgtcgaatcagtccagatcgatcagaaggatggagccaaggagactgtgctctcgccttcgcctggtatgccttcccgcaaagcttatgtatgacgacagatataacccaaaacatttctgatcctttccaacgttgtttatactctatgtttctgtcaaatcggtcaatttttcctcctctctctctgatggacttttggcggttgatttttttggtgggaattatatattgtggtggaatcgtctggttggattttgaatcaatcgaactagactcgttcggcttccaagtcgacctcaagaacaagagcgatcttgcagagagacctatctacttggatatgcaggtaagctttcttgttcattgatgttgatgaagtccgatatcctcggcaaactgcttctgctgcgagcagagctagtacatatgatgatcatcattaaatcttgatattaacaggcaaccaccccgatcgatcctcgagtgcttgacaagatgcttccttactttaccaaccagtacggaaaccctcactcccgaactcacgcttacggatgggaagccgaaaaggcggtggaggaggctcgatcggtcagtgtgctcatccggatgcagttctcgcgtcgtccgccctgtcaagatatttattctcattcgttcaatttttttctctctttctcaatattcggatgaaatctgatcaaatagaatgtggcttccatcattggagctgatgcgaaggatatcatcttcacctctggagctactgagagtaacaacatgattgtcaagggaatcgctcggttctggtctggctccaagaaacacatcatcactactcaaactgtatgttttaattttctcgtttacttcttgttctcaagtgtctctttcatgtctgacttgaattgttttgatcatcaaaacgactttctttgatgacttataggagcataaatgtgttcttgactcttgtcgatacttgagcgagcaagggtttgagatcacctacctccctgtcaaacccaacggactaatcgatctcgaccttcttaaatcctcaattcgcccggacacctgcctggtctctgtcatggccgtcaacaatgaaactggagtgatccaacctttgaaggaaattggtgagattgtcaagaagcaccgaaactgtttcttccacactgatgcagctcaggctgtcggtaagatctcaatcaacgtcgacgagatgaaaatcgacttgttgagtataagtggacacaagatctacggacccaaaggaatcggcgctgcctatgtgagaaggcggccgagagtcagactcgagccgttgatccatggaggtggccaagaaagaggactcaggagtggaactgtccccgcttcgcttgtggtagggctaggagaggcttgcagaatcgccgagaaagagatgaaggttagttcatgcgacgcatctatcgtcattcttttgaattctacaatatcagaatgtgcacgtctgtctacaacagacggaaagcgttgtagagttggaaggaggttttcatgacgaattctgccacgctacagatcttctacggaaatctgaaggtctagcagagatggagtgtgttgaccttttcgaagatcgttctgatcaccagatgggaaactcactccagtctcttgcaatgggctgcacctatgcaggggcactgataacctcttttttcgtgctcttttaattctgagcgaatgttgttcatgcgtcatgattctatccggttatcatgaactgactcaatctacgctgcattttttattctcgtgtcttgttctacgatgtctctgggacgtatatagtatgaccatgctcgagtatccgccttggccgagcgattgatcagtggaatcacttctcagatcgaaagtgtggataggaacggagacccgaatggataccccggatgtgtgaacttgagttttgcttgcgtggaaggtgaatccttgttgatggctttaaatgatgtcgcactgtcttctggttcggcctgcacgtcggcttcgctcgagccatcgtacgttctccgagcgcttggctcgtccgaggatatggcgcactcatcgcttcgattcggaatcggtcgattcactaccgaggaggagattgatttggtagtcaacaagattgtggagattgtgaaccggttgcgagacatgaggttcgtatggctttgtgctatttttgtgttccttcactccaaaacttaagtttgttgaaatgatggaatcctaaacgcccgtcctttcttgccctctgggttttcattagtcccttgtgggagttggtccaggaaggagtcgatctctcgactatcaactggggagatggtggagggcaccactaagccctttttccttcgcattcccatattttccccgttcagatttctgcccccttccgcattcgtctccctgattaaaaaaagaaacataaaacagtgtttttctttccgcgcttttgtttcttttcaagtacatctgcctgttatttcctttttctggggttccgtccgcaattggttctatactagtgtacatatgctcttctttctccttcatgatgaggttccattcattgcccaccttacttctacatgagtctatatcgttgtaattaagtaattgtgctctgtgaaagaaaccaaaattaatgcaaacagctccggtgggcggtgtggtgtgtatatgaacgagtgccgggtccgcagtcgggcttggtagattgacccacatcgctttcaacatcatctttcttctcttgatctctcttcctctttcatctttatctccccactttcgctctattctcgtttctgattcatccacactacagttttctctctcagtccaccttcgctgtattaggttgaatatcgatctcgagaaaagcttgttgaaatccgcccgagatgagtaatgccatccagagcttgtacgcgttcctttctttctttcattcatcgaattctctataggccaagccatccttttttgttcgattcctgcgtcaatatctctcgccgtacgatatggagtcgtgttatggtcagatatcctatctaaagactcaagttactgaaccggactgtttgtttgtctctattcttgccggatggcgtttggttgattgaaaacggatcattggtcaccatcgtagcggtaaaggagcgttaagagtagcaaaagtaaggaaacccatgctcttaaaacgaaccatgctgtcagtttccgggtgccttttatttctaaactttcccttttctttttgatcgatggtgttatcgtaacctgtagaactacaccaaaggatattctgacactcaggtcagtgtcctttggatcgagcgagcttcccctctcttccacaatcagtcatttcagtccagatattttctggtatggtacgatttctgacatgatgaaacctttgatgaatggctttcgatccacaatcttatagatgaaagtccgagaggcaacctcgaatgatgcttggggaccttcgggaactcaaatgaacgatgttgctcagctaacattcaaccagtacgttcatacctcatcacctcttcatgtgatcaaccgacatgattatctgcttgataagtatgttgacatgacgaagcgtttatccttcagaaacgactttgtggaggtgatggaaatgctcgataagaggttgaacgataaaggcaagaattggcgacacgtcttcaaggtctgttattttctcgttgtttctcttcgctcatcgtattgatcatagcttccaatcttttcaggctcttactgtcttagattacatccttcattccggctcggaaaacgtggtgatctatttcaaggacaacctctacatcatcaagtacgcgtcttgtttgacggatgattttgtgagaacgagcttactgatcacacgattctcttaaataacgtgtagaaccctgaaggaattcgtatatgttgacgaagatggaaaagatgtaggcgcgaacgtcagacaaaagtgagcttttcttgtgagaaagaggtggctaggctgcctcgaaaaaatctctaacatgtctcgtgtcattgaaatatctgtaatttaaacaacctgctttgtctttctttactcaatgactacactcaaaactcaactagagcaaaagacatcaccaatttattaatggacgatagtcggctgaaggatgaacggcgttcgagaggagcaatgcaggatcgtatgacgggctcttcttatcgaagaaactctgccgaagaaaatgagaactttaggaggtaagtcaggttcatgagacagatcacgacgaagaagagaggccttgccagcggtcggaaagacaatagctgatgtgtcttttcttcgttgttgacaagtagacgcgaagatcaacgtcgtccgtctaaacggcctggtggaacagaggatgatgatctacagagagcgattcgggctagtctggtaagcgatgatgatggtgagcggaagagacgggcgaacgagtaagtagtctacgtcaaatgtatgtcgacggatggataaaagcgagactgacaatgcgcgtaccaacgatctacttttgtgtgtgcgtcgccagggaggacgagttggcaaaggtgcttgcgctgtcggagagagaagaggctcagcgaaagagggatgaagatgagcgaatccgaaaactagacgagcagacatcacgagcgttgttcgatgacagcctccaattgtatgtggtcttagcttaatttttgagttgagcaaatggggcccatcaggtcgtaagttgacatagcgaatgcatactgaccccttgtctctcttgcttcgtctgatagggatggaccgaacgcgtatcaacagcaaccgcaagttgatctgtttgcccaacaaactgggttccaacaaccccagcagactggttggaattctcaatttaatgtacgtttgactaccgtgtaggactcgagtgtataaagacttatttcgaattatcattccccttcctcgtaacatttacagccattctatcagcaacaaatgatggaacaacagcaacgggaagctcaggctcaacagcaatatatgcagatgcaggtgagctatatacatatacgtatctcgaagattgattttagaagctgatatgtgcactttattttatgtgcgcttatctgatctcatagtaccaagctcagcaagagcaattggctcgagaacaggctgctgctcaacaagccttcctcttccagcaacagcagcagcaacaacagctgttccctcaaccaacaggctatggatctaacaaccccttcgcggctggcttcaccggccaacagcaagcaccaccacctatgccgacgatgtcttcgttcaacagtaacaataatttccctgtcgatacctcgtcactctccgccaccgctacttctttcacgccatcatctccggcgaatgtggccaagccagtgaaaaacgatggagaaaattcgagattggcaatgcttttggccaacggaaggtgcgaactgatcctttgaatttcctgatgacatctacaagggtgtgtttgttgaactccttttgctctccttctaatcttacatgagatagggatggcggtctggacacattcggaaacgttggaaatcttagaatgccggcacactatggcggtagagaaggtcttgttagtcaacagacgggagcaaataatccgtttggagtggctcggtttcaacagcaacaacagcagcaaagacagccaccaactagtggaaatttagttgacttttgagatctcttaggtctttgctttctttcccctctctgtttttaccatattgcttctggtttttcatatatatcgaacttcaccactatgtgtcatgcttccgtcattcacgccgttctactgtctacctcatattcgattaaattgcggattgacttccatttgcttgcgcccatgacatgttgaactgatcttcacagacagtgaagtgtaggagaacaaaggaaacgagaaagatgcttgctttgtataaggaaatcgcgcgctatacttttcgaatgctgtgctgatgagatggttggatcgttatacaaacttggccaagctggaagcgattcatccgtgctggaaaccacactcttgtcagtacgtaccctaggctggaggatgttcatctgagctgtcggaaccgatgctaactggtttttagaagatatacgattttagtttcaatcaaggttctcattcttgtttcattcattcatggttgatcaaagtaagatctgttctacattctttgattaggttattctcaaccgagtcagggatatattctacgtaacagtatcattctgatcttggactttctcttaatcctctttgctctatatcgaaggctcgctcgtcggttctactcaatatgcacctgcagcttcgataccgttgataaaatcgccatcgctctacctccctaaacctgttcgtgtgcactcgctgttcttgaatctcgatctacaacacgtttgaccatctttctcatttgtcctttcgtcttactttgattccgtttccagatcgaactccctccagatatccatccgttacctgaagatattcaggcttatgtgtgtgaccagcttcttcttcttggtcccacataccgctgctctacttatcttgcactgaatatccatcattattcgtctatacccgacgttcaaatcagtttgtctacccattcactcttgaatctcatatactagcccatggaccagctcatagacagcaacttcaggcgagacaaaacgctcatgtcgcttacttgtttcaacgggaggaggacaagaaggcgagaaagcgggcagagatgaacagggttgctccgggatggagtccaggtggatcagcactggtgccggacagaccgaaatcaaaattgcaaaattcacaggatgaggcaaaattgacagcaacgacaatgattacaaaagaggcggaaggagggattggacagagtctttcagaggatcttgcgtcgttgaatttcgggggctgaggcaggaacggtctttgtacatcgtttctctctctttccactcttttcggtctcgctcttctagttcttctccctgcttcttggcatctgcctctttggacgttgatgtactgtattactcgtattcactcgactatcaaatatatgttttgaacaagacgatgtatggcgatatcggttcgatgcgcctagtccgcagacgatccgatgacgttgccggcctcgcgggcgagccaaacccgattcttcatcttctattctttcttcctattcacccgttcacccactcattctccaatcgacccacaagggaaatagaaacatacacacaagtcgctgtcatgagaaaagcaccctacgtccttgcgtaagccttgtcgttgactcataggtcttggccaccaagatttaaaggctctatctgatgatctctgttctccgctgttcgatggaattcagtctaccggtgttggtcgtcaccatcgtcgctggattcgctgccctgtttagacctgattggtaagtatatgcgacgataacgacaaccacctcattcattttgactctatagaggctgaaaatcgatagattctggatctcatggctgattcacctgtatcaaccttgccacttttcgaccccttttcgaccccttgctggtgattctcttcaggattgtatcgacaacctcgccagcaggatctcctctccttgtccgaacagaatatgggctctggaggaaatgtaccaaagctactataaagcgtaaccaacctaacactttttctcctcatatgtgggagggagcgtcttggacgctggacgcacttgacgtaccaccaccgtccaacgagacatatatagttggagaatggaaatgtgtacctttccgtaagatcaccttctcctcttttcccagcttctttttccacactttttgggtaggcgagtatcgagaactcattcatcgtcgacatttcgaatgcttcgtcggaaatgaatagcgtgagtttctttctcttgtagtatcggaagaagtcagaagtggcgagatgtgactgacatctgttggatctgtgtctatgctggaatttttagcactcgatctgaatgcgagcagaaaggaactggaaagttctgcgtactttggtcgacggcaggatatctgtgagtgacgcttttgaatcactatgacgcctctaactcgccctctctgacttgtggtcgtttgttcttctaaaaaatcagaaccattctgtcgcttcttccgctgttggcatcgtgtgtggccttgttagttatcgccgtcggagctggagagagacaagttcgaaagagtaggcgaaagaaagggtgcgctctggttttgctgctttacttgtgtcgtttctgtgagatactaatcggttgttgaggtataaaaaattaatataaaaaaaaagatggaagggagttgccggatgctgtttgtttagcggtacgtctcctgtaggcatataccaagtgggtcgtttatggctgatatatgcatcctttggtcttacatacaaacagcgatcttacagatcatagcgtttgccatggccgcccatgtattccgaacggattctcctcgattcttgattcacgccagactatgtagggctcgttttctttcctgctgatattgatagcgtcagacaaactttctcacctgtgcgccggatggatgttgcatttgtgcgcagacacatcgttctggctgatcgtcggagcctcaactctatcgcttgctctgtttggagcactaaccttcactggattggctgcccgtgagttttctcatataacagattagacagggcttggctgaccaaaccttctgattgtttttaccatacctgttctcttcccattacaggtgccggaaagaggtgggctggaggtcggtctgcgggaaagaagcggggtcgacacggacgaaacccctcaacgggctcggcaaggcaagctggggcaacggccgacgagaacgcgcctttgctgaatgcctagggaatctgtgcactcttttcactccattttcttctgcttcttctgcatcttcttctttttcacctcgacatcttgtgatcattctttctttattctgtctctgtacatatcgaatgatccttccactcaccgtctatccaccgttgtatcgatatcagggtgagaatgaggatgagatgaaaacagcttacgtaagcgagccaagaccgcctaggtcgcagttctcttcttcctctcctcttccgctcgacttcagatgtttgccaagcttcctttacgtgttgtcttagccttcgtgctgagaacgcaagcaagatgagttccttgtggctttacgcactcacctactcactcgctagtctaactacgaagagcaaagttctgtcgataaagtatcaagagaccaaactgacattattcggatcatccggtgatacttctcccaagacatccttgggaacggagcaagtgaagaggaaccggtagcctccaaatttacagttttctttccgtcgactcactcgtctatcttggacgattctctgaggataaagatcgtctctttcttggtctcgtcctttccaaacaccagcagcccttctctttctcgcacacgtctattgtcaataccaccattaccaggacttctaacgctttgctcaagagtttatcttctggatatcatcgatcatgcacacccgacggatagatggccctgatagaacatcactcctggttgtcctcgcccttctctcaaacatatcacatgctagaccgatcttagctttagacaggcctatcgaaggtatgggttcttgttcgtctgtctggccttcttctctatactctccctgcctagcctccttcccttttttttcaattggatgagatcacgatagccatcgagtcaaatgtctcactaacactggtgcacgggatcatgtttgacggtttgggacctcttttgttatcaggtctatggtcgaaacctatcatcgagcacctcattccccgaaacgaatccatgccctttgattctatctctgacactggcgaagtcgaagctcccaagtaagctgtcctattttactttattttatatctctttgtctctttattctctgtcccacagagaataagagtaaatgggtaccaaagaaagtttcagggctatagacttggttcgagcatttcgaaacatcttttgctcgaaggagaaccggatgagaccgaggtcttggcgctgctaaaattaaaaaagaagagaaggctaacccggtcttgtttccaatccgttctgtttatttccatacaacaatcacgtctttttgtttgtctgtaccggtgactttatatgaaaatccatccgatccgtagacaaaatatcacaccgcttgtcactggccttaccgccggtttgctcgtcttcttcctatcagtcatcctcggatggatgtactatcgacatgtcgtccggaaggctaggcgaagagcccaacaggaagaagaagaagaagagcgaaaggcggagaagaatgaacgagaaacgaaagtccggcaaggtgggacgaggggagataggtcaaggacgaaacagactatgagtccatcaggttcgaaacccaaacgtccagaacgaacccgagaacgagctcagagaccgacaagtcgaccgcgcgcagagctcgagagggagagtgaggggaatgagcctttgtcgatatcgaacgccttgtccatccttccttctaacatgtcatctacaactctgtcatctataaagacctcgatggaccgaatggattggaactcggcagctgagccaacggaattgacacagacgggccctcccacgcctaaccaggctttcttggaatcctcttcccgttcaggatcggtctcttcagcttcaggatctacgaattcatcagattcagaacgtacacgatttgaggtcaaccggtccgataagtttgttcatgatgtgaaaggtacctgagcttggtgttgcatctgttgtacaatctggttgcttctttatctattcactccctcgagcaactgcctatatcactttctgtttctcagcgccttcttctttcatgctatacgttctttcctctatccatagactaataatagttgtataatactctatcttcaaactccctaatatacatatgtatgcctctgcttttacccatctagccctctagaagatcacaaagtacttcgtatctatacatctgcgaaaactttatgaccccttcttaggctgccgccacttctaccgccttggtctcggcctcagttgcgggttcggctctggcttcgaccgcaagtcgaaatgcctttgcctttttctgttgtctccgctcatactttcgagcggcttttgaccttcgggcagcttgttgttccactgacagtaacaacaatgaccgtttatctagatgcctattcttaagtttgctcctgatgggttcagagacaggaactgatgctgatgaggatggagaagacgacgatagcgcgcggagacgagctcgttcggagagagctcggaggatggtgactagttgagaagcaggccggaaacgaagtcggggtggtctttcatccagatgaggaggtcggtccttgtctgtcagggttgacgttggcgttgatgccgatgtcgatgttaaaatctctgatgaagaggcggattctagattgagagtcgaacgtcagctcttctgatcatctttgaaacctgatcaaaaagaaagtaacaattgacggagaaaacgaaccagtctcaggtgggtcttctttgttcaagtcgttgtctaacccattcctctccgcctctaccgtagctgccgtcgatcttccttcttctgccgccttgactttttcccatctggcggcaaacacatcctgcatctcttgttttgtcatgtgagggggtaggaccacagacgatccaagctcttcttgatctttcctcatcatctttgccatcagaatcaagttcgcatcataagttggagatgatcgctcgatctttgtcaagactttccctgtttgtccgagaagaggcaagggtaataatcttcagcatgcacaattgtggggacgattgaagacaaataagagagttaaagacagacatgacagagctccttcaggccccaaatcaacgccggactcgactggtttatcctgcaccgtactgaaaaagctgagtttgagtcccacgatttgggtatttgagaccacgccggatggatctaccggtttgacaacggtcatcatgctgtttggttcatgtaaatcttttgcgctgagcgtgagatgtagcgtcttgtcaaaccatagaagattagcaaaaaaaattgggcaggagagagagagaagaagcaaggaaacaatcgaacctgcttgggaaactgttcggtggcttgtttcaacagtctcgagaacgcttttacacacatcgagtacgcctgatcgcccatcctggtggacccaaagaggtacttgtcgagctgagaaagggggaaatattcaagcccttgtatattagccgtattatggtaggcaacaaacatgcccgacattccacctattcgaccttggaagctacaagagagatcggcctgagtcaaatagatgaagctatatatatcagagacgagaagagagagaaaagactaacttgtacttcaagaaagcggaacgcatcatatcgtaccgctcccgctcgaagctttcaaaaagaccaacatcagaattgatttcgtagtgctttcctccctatcaaaatcgaaaattgtatctgatgagtctcgtatatggttgaagtattgaaagcgacgaaaaaacaaaacaaacctcaatgttctcgatatcatgccttatactggccgtcgctcttgtctttatatcaaagattccggttccaggtaatcgagggtcataaccatccaactgggaacgcatgacgatatctggtccctgtccacccagagataacaaagagataagactctgactcgaagcgagagcttgactggcataccgaaacccatgacgaaccttgctataatgataggtttcccgtctgtctctctcttctgtagagatagcgtcttccgatgcgtcctttctgtatcgcctcacgtcctccaccgttgttgtcaacatcttttccatgacgtgaccctatgagaaaagcgaaacaaacaaagtggcgaacttgagaggttgttcaaggaagatctgaggccgatctagaatgtgaacttacaagatccattagatgagttggctgaccaacatgttccatagtcttgtcgccatcgattccgtatgttccagttttctcgttgtatctcaaaaatattgagcacggcacggtggccgaatagcttgttgttatcggctagagagagagcaggatgtggatgaaaacaatcgagatcagagatagatccggagaatgatagagaatggaagacaaaagtaaattaccaagccaaaaaagtgatagctcagagaagacgtgtcgaccggccgattgtttgagagcgcgaaaaatatttgagaaagtgaagccgttattgaggaggtggagccgaagaatgtgcattcattgtcggaagctaactttgctagcgactataattcacaatgaagaattgaggtaagatacaacattgagtgcgtgatctagagcggagcgatctcctcataaacgaacattataggaaagctagaaaaggacgcacgagatcttttgaagccgtaacgtatttggatattcgagccaaatcaaactcatccggatgagcaattgcctgggctcgcttgtcaaagttgtagttgttcgtctttgggtcttggtagaagtgaactcccggccttgaggaaccagaagaggagagaaacgagcacccaaagaacaaagataatcagacactgccaaactaagaccggaatccagagatgaacagattacaaataagaggaaagaataatagaagaaaacatacttgaagagcgctttgtcgaactcatgttctaagccagggactggtgcttggccactttgcggcggtaaaactgtgtgaagaccaggtgcatctgatttagagtacgactctgatgctgatcgtgccttaaacatactttttttcaaaactaccgtgagggaagagatttactaacgggttacatcctgcacggccttctcgccatcccacgtctcctcccataaagcctcccatccaaacactttgcgtggattgacctttttgggtttgacaaagaacttatctggatccatgataccttctttagcttaatcataagttatattcacagagaaatttagtagaaggtcgattcatctcgaggtaatatatattttggagaaaggggaggaggatacgcactagctgcccgcttttttgctttggtccagagtggttttaagcctctgtttttagccttgaccatcgtgtcgagctttttctttggccagcgatctgtctttctctgatttgggagcgctttggttaaggtagccgttcgcgaattggtcacatatccttgacgttgagtggaaggtcctgctgattttcgtaagaaggcgtcttggaggaaggcccaatcctctgatgtagtcttgaatctcgatcttgatgtgttctttttgggattgggaccgagtgagcgctgaccactcatcaaacatctaggagctttggatgaggaaggtgttgagttctctgcattgaccgcttttgcggaaaactgatgatgtttttgcaaggtctttaacgatttgcgcagtgcggtgttcttttcgtcagaactcgcgcttggcatgctaacgatcgactggactacttcaatcgtctggctagtcgtcttgatcactggcgcatctgttggaccatctatcgtggtggagggagaagtaagaagtggtgtcgaggtaaaagtatcggtagtggtgggagtgggagtagggattgaggtagaaaccgcgtcatttgttttctgcgatccgttacattcttcattttgagcacggtggtactctttggttggtttaattctaaccagctcacttgatgatgaggttggtgaaaaaccgtcgatcgaggaaagtttggactcttggctcggaggatgatcaggttgagctgggaggaagaagaaatgaacagagtatgttcgtacacaatcagctcgtcattcaaggcgaacacaccatgatgatagcatagcagagacatggttaccattgatcccactctctgcattctcctgagccttactagatagagaagatgtggcctgaacggagggtatcgatatcgaggctggccgtgcgagcgggaagattatgggtgatctgttgatgacccagtaaggacgggcgaaacatggacggagcagcatggtccttctggaacctcttcctttcggatcccttctttccttccaggagctgaagatgacgagatggagagagaaggagaatcctttcctttcgttgctactctttgggatcggacgaggtgggaatggaaaaggtaccaggaaccgataatttcagaaatcaggaacacgccgatgcggggatatagatcacgtgatatttggtgaggtattacgtaatcatacacctctcagcgtacagcgataaatcgtcatctccttcccgtttagtcgcatcctcagtttgttgcatgttctctcaaagcagcaacctttcaaccagcacaacattcactcgataataatgtcagactcaatgtatcctcctcctactcatccctcaacattgttgacgtttcctcaggctaccctttcccatcatctcgggacacacgttttcccgttatcctccggttcgtgctccctggttgagatcatatcggaggatgaggacaaggatggaaagaccggtggggcacctaagaagcttcttgcgctctccatgcagccaaataccaccgttcttcttggaaaggagaatctggtgagaaagaccgaccagaatgaggtagggaatcttcgatatactctccttcacttctcgtcgcgcactacaccactcactctctttgatacatacacacatgtatacaaatctttttagtcgcacgcctcgtattcttttaacttttctccctctccaaaaaatgttccttcgagctcttctgccggtggcatgctcccgacatcaaaccaagagattggaggctaccttaagctaaagctaccccagcctaagaacaacgacgaagtatgtatcttgcttctcccttctttctcttcccttgacccctcacttcaagctgattcccttctactacctatgaaccgcaaaaatagtatgaagacacgacggcgcttgctcgaaagtttgaatcgtaccttctcgaatatcaactgctcgacaccagactcgacgccgacatttccgaggatgacgacgaaaatatcgggtccgtcctttccggctgggtttttggctccatcgcaggcatcaagcagacagcgggcagcgtgtttagaggtgcaaaagagttggtatttgaggacaatgcgaatggaaaggataaaggaaaagcaagagaaccgttcgttactccttgttttgtcctgtcttttctatcttttcgttctgtcagtagactgattttaaaaaaaatccctcgtgatctatctcggtttctagtgctcagaaggataatgaggccgtttgacctctttcgactctccttcttccagtgcatacgtccttgtcttggatctttctgtttctctttctctgttttatatctccttctctctcgatctgtaatccttcgcttttttctccatatttctccctcttttcaacgaattctccattccttgatggctattccttgtctctggcttccgcccatattcttccttgtcgaaaccatgttttctactcaaaggttttccctccaagagctgaagagatttgagagatatattggttgttttatcataatcgcctctgagcgatcactctcgtttcctcaaacacacacgctccgccctcacccaccgtctcatcttgcccagtacttctactcctgactctgctcctgctcctgctcttttcggttctgatcctgaagattagcccactttgagtttgatagggaagcaggcaacttgaattcaggtggcgtggaaggctcatttgcgaacacctcgtgataactcagtggttccaggtcgtctgctggttcttctgcgaatctgtttgtcgagatcaaagcgagagaaaagagaaagaatctaggtcggttaatcttgaaaaatatagaggagaagtgtggaagagagacggaccgttgcatgaaagcaaacacttcggggttcggttgtaaactattcaaattggcaggacgataagtcaggcccaagactccaaagaaaagatacgaaaggagaaaaaaaaggaaaaacgtacatagaagccagtggattgaatcctctcagctcgatacttgagagggaggtcgctcgagagagagcgacgtatctatttttcagatagaatatcaagagaacacaaaagcattggttttgaataaaggaagcagatagacacaaagtggacgggaaaacgtgaggaactagacgaacgcttggcctcgctcgaatgtgtttctcaggtcaatctaggaagaatagataaaacataggacgggattagaccgaacgacaaggagaggagatagacagtacggaagaccaaccttaacacgctgtaaagtctgaccctgggatttatgaattgtgatagccgccgccaagaccaaaggatactgattcctcctaatcatcaccattcctctcgagtctctaacctctccggcgtatcgtgggatcctaatggtcgtaccatcaatgaaactgacaactggatcgcccgattcatgaaacgagactactttgccttgtaaaccgttggataatcgccagatatcttccttgtcttgagtaggggctgacccaagagatttgatgcttcctgttgatttgatgtccatgttcttgacaaccatcacggaaacgccaaccttcagcttcaacgtcttggccaactttgtgtccctgatcgaaatggagaataagaagagattcaaagggtaagaacgaattagaatatagaagtctctgtttactccaaccaaagtgaaaatcacactaactgctcgagtttactcgtcagcatgtgcagatctccgaacgaagccttcttgctaacaatgtttttacgaatccctgagatatcgtcaaccgcctcaaatgaacgttcctcagcctttatcgaagctagatgttcttggttccttctctccacatcttccaccaatgagaacctgacgttttgttccaggagtgagggatacgatcagaatgattgtcgaagaacatgaataaaagacaaagagagcgaaaggaaaaggcgacttgcaggctgataggctcgatcccgtcttcatagacaatctctctatccaatgatttcagagtctccacgtcctgcattgacacctttcctagacgtaaccggttaagtagaccaacgaagaccggatcggcctgccgatgaacttttctaaggaagaaattgttggatttcttgatgaccgcttgccaattgtgcgcggtaaaagcaaacccgcgggccgcgtcggtttcgatatctttctcaactggggggagctgagtgttggacaagagtgaaacacgtgtatcatgataagcttcggaatgagaggaagaactggaaagagcgagacagaataaactcacctggtagaaatcaccggcaacaacgatctagatggtccaatcatccgagtagaggttaaggagatggaaaaggaggatgtgcgtccgtcagcttgtaatcacaaggagaaatctaatctgcagacacattgaaatgaatttacctgaagaccaccaaatggaaggctgttatttctaatatcttttccgagcgcatccaatctatcgaataactccgcgctcagcattgacactgattcatattcgtaaacgagaagacgtcgacttgatgagcaacagtttgatctgtagaaacaagcatgctagcaagtggaaagaaaaaggaagcccaaccttcgtcgatgatcaacacatgagtacccaaccacctctgaatggcaaaatctgttggggttgaaggtctcggtttcctgagagcggccgtttccttcgttgattttcccttcactgaacgcatgtaatcacgaagggcatccactcggtcgatgcattttgcagaactgcttcggaccgagactctgagagattaatcgaaggtcaagggtaaatatccattgatgacggaagggggaacaagggaaaaggacacaagatttacccagcccaagagtgtaaagtggaggccattgaaattcctaagttctgcgcagcaattcccgttgtagcggtcacgcctactacctttccgtcctccttgagtgccctgacgatcgctctcatcaagacagattttcctgttccggccgcgccggtgaagaaaacgttgtgacctctacggacggtatcgaggatctgagactgttcgtccgtcaacatcggctcgttcggcggtcggctcttgtcctgaaaaggtggcagttcgatctcacgtcggatgaggggcgtggatcgtgtatgcgcaaagtcacatagtgaaaggagtggagcgaggctagaagtagaggagagaggagcaaagagtggggtggacgacggtggggtactaaagtcttggggaaacagcgctttgacgtgaactatcaacacgaaggaggaagcatgtatgtgagaggacggtcagccagtagggacgagcggtctatggatagtatcctttgacttgatcggaactcagacggggggaacgtacggtcatcggcaaactcctcttcggtaggagtaatctctctattgctataatctggatagaataccggttcaggagctagcggatatggccggaaaggtttgttgcaagaccatacagagaaggagaaagaaggaaattctcgtcagtcatgatgaagaaatccaaattcaagaatcgacgatggaccaggcttccgaccgaggtgttggatgggccttcttaccatttggctcttcaaccgtggcgggtttgatgggcgccggactttctgccggcgtgtactccatctggtggatgtctggatctgttaggatgaatggaatgatgagaacgtttttagacaactcactgcgcactttcttccttaggtatgatgtttcatcaccagaaacagacgactgaaactaagacctactgtatggctctatcggtatggccaggtcgaacgtcgagacccgagtgggtgtagggcgtatggtggatgatctacgagcaaacggaataagggactgtcgtgatgcagttcccgctctaactagagcgcatgctggggagaacgaccttctgagcatgtcctgttgaagtcgacagttggtgtggatcgaatgaggttattgcggtgtgagtgtgtgttctctcttctatatgtaaaggtgaaaatccaaaaataattagaaaaaaagttgtggtaattatgcgggaggtcaaggttatgcttttgtagatcacgtgcagagtaacaagatgcccgtggttacgcttgcatgcatggtcgactgtgcaccgggccgccgtaccttgcaaaggttccttgtttcggattccgtgcctggtttcggattctgtacgtgttcctgattctgtacctgtacttgttcctatccctgttcctgttcctgattcttcgaccatccaccccttcatcccttcgtgtttcccttcttcttcctctttgtcgtcctctagccaatccttctagtcgtatacactctggacaccctccgctctctctcaggatggatacctcacggacaccgacatcaccgacgggctcatcctatgatttgttcatttcatcattccactcgtcaaattattcctccccatcagcatcagcatcagcatcatcatcagcatcgtcctctgaagacggatctcctcgggcttgccagtcaattccatcaacagacaaagacaactggcttatcagaggggagctcgtgctcgagccagaagacaatggaacggagctatggagtgatcccgaaactcgagagctagaagaaaccgagtttctttcctcagaattcgaatctgacggtggacaagaagacgacagtttcatcccctcgcgtcgtcgttaccaacctcatcaatatccccaacgtcatcatcgccatcaaagacaatcgtccagatcgctcaagcattcttactctctaggctcgtccagcacgccaccaacaggcaacctaaccttattttggacgacgctcaaccttcttaacacgtcattttcgcccaccatcctctcactcccttacgcagtctggcttctgtctcccgagttgttcataccaatgctcgttgggatctcgctcataagtggtgccagccatgtggtcattctctatctggccagatatttgggaatcaagacactggacgatcttggtcaggctgtaggcggagggaagaccgttaggttaggaatgagggttcttactgtaggtgcaggggtaggtgtgttgatgctgtacctccgaagtaagttgcttctgtccagactacagaaacacatgctatctgaggaacaagctaacgcaagtatgtgggttatgatcattagtgactgcggacctgatacgtccgatttttgtctatagtacacctctctcgtcagtcctacagtcatcggctctttgggcattcttggctagcgttctggttggttcttagttcttcacatttatcttttaccttccgagttgagtttaacaattcttgtctcaatttgggctcgctcagatcgctccgatcctcctcgcctcccaacttcactccaaaacgattatccgaacgtctcttctgtcaagcgccttcccaattgtgcttttcataatcactctcgtcaagatagtcgcttactcaaagaaccagacagaccctcccgttcctgttgaagcctcaaggattcagttcggggagcttgtaggtgggaatggaataggtagagggtctacctggggtggaatcggttagactcttctttgcccgatggctgcttatgtgtatctgaccaggaatcgtttaagcctaacctatgtctttttttcttcttcctcttctcttcttttcttagccctaatcacgtttacacagatgtctcaactgacaacactacctaactacgcgactcttctccagccctctcagcgaacgttcttgctctctcctctgcttctttctgtactctccatcgccttgaccctcccgctctctctagtaccatactttctcctctctacaccaccgcctcctaacatcctcgatatccttccttctgccgattcatggatcatcgtcgctcgcttatcgggtgctggaatggctctctctgggattcccatgctattcttgcccacaagagatgttgcggtccgagctttcaggtcggctggtcttaagactgtaggtgggagcggattcgatggacagggcaagaagcggagagcgttctggacggtcactgccatcggatggggaggtgtcactgtgctgtcggtagcgggagattggatcagcaaaaagggagtgctcagtggggtattcttggggttcttacttagcttcttcatcccaggtgtgtgattctgtctcactctccttttcttaagtgttccactatgattcaccgtttctcctcaactcttggaacagccattctattcgtcgttctcttccaccttcgccggcctttctctatcattttccctccctctaccaacttttcttctcaatcgacatctacatccagttcttctcccaccgcgtatcttacttctggaccacaggaggctagcttgttgacggacgttctgttggctcaaaaggaaaagcagcttcagaagagaaggtctggtagaagaatctggcaggatgctgtggtgttttttgggatcttgccggttggtggggttgtctgttgttggtcggcaggtcggctttttggaggatggtaaaggggcttcaatcccttcagacacgttcctttcttttcttcttggacaccttactctgtgttatcttgggacgccttctgcacctcttgcttgctcccgttgttaattcaaccagtcgacttccatttcttgttcttggccccacttcgattttttctccttatcttcgtttcgattatgcataccctctacacatatcattatctctttctgctatccgtccttccggcgcttatacttttggctctgtgaactttgcctgtcttcgttttctctactatctaattctttgcggtccttcatctatagtcgtaatgtagacatatacgtgttctcgtgatatcttatcgttcccatcagtgattaggtaatcggccgcgctcatgattcttctccattagtggccgttcgctaatcgatccggcgaacgacgacttggaaaccaaagaaatgaatcgtctcgtctgtcaatcgacccaacgaactcaagctatacgtcccggtttctctagacggacgtttaacattctcgctcttgagagcagcgcggacgacacatgtgcgtctgtggtagatgactcgagaaggatcctgtcgaacgtcgtttggaagcaacatgagattcatcaggcatataaagggatccaccctatgtacgctcaacatgcacatgtgagagctatggtgagttcagccaatataaacaatttgaacaggatcttttaacatattctaatta

SEQ ID NO: 246 - DNA, 17111 bp, Xanthophyllomyces dendrorhous
attctaattatgtcgaacgggtggattctgctggtttgtttcgcgatggaaacctgggggtatggacgagaagccaggagttatcaagcaagcactgaaagaagcaaacctgagagttcatgacatcgacgcctacgcgtgagtccagcttccttccttttctgcttttagagcagagaacttcgttaaaacaagacaagaagcaaaactgaaagagagttgagtttttctctcctgctttgttcaatgaaacccccctgtaggttcacacaaggaccagggatgtttaattgtctgtcggtttcgtgtagctctgcgtctgcgatggctgctcttatgaacaaaccgttgatcggagtgaaccacatggtaaacctctctgttctgctcttctctttgtcttgaaaaatatcctgataccttgcttctgttgttctacttctgcttttgttttcgacgaaattcttgtatagcaaggtcatgcgctaacaccattcataacggaagcgaaaccaccagaatttccgttcttgacatgtcttatgtccggaggtcacactcagcttgttctcgccacttcgttcgatgagtttgagatcttggtcgatactggctcattggctattgggtttgtctgcttttttttttggtcccctcttttcttctcttccttcttcttttcccttctggacttaccgattttctactttgggcatacatgcgaacaaaaaagtcagtgtttcgaccgtttaggcgctgctctggatcttccagccccccaaggttacggacccgcactcgaatcacttgctctttccctcccttcatcggaccctgacattcctcatttcgcacctctccctcttcctccactctcctcacccctattcgaattcagtggtattctcttatcgctccttgagacgctccataagatctctcctggttcggatccaaaagcaaaacattctgtcgacccaacaggaatcaaacaggccatacaggtaggcgctgccagagaatttcagaggtcggttggagaagcttttgtcagaaggatacagagttgtttggaaaagctaaaagaggatagaggagtggtcatcaagggattggtcgctagtggtggagtggctagtaataagtatcttaaacaacggttcgtccgagcacactctttccccttctctttttgttttctttccttctttgttctttctcgtcatagtttggacgtgagtcggttaaaaatgtggtctttgatttcgcgtgcttacgtatgtatatttgatgaatatgtcgagcgtagattccaaagcttggaaaaatcgtgtggtttgagagtgatgttccctcctatctcattatgcactgataatgctggtctgttcctctcccttcctttttcttctctcttctcgttctcgtgttaagctgatggggctttcgtgttctcctcggcattcctttattgacgatgaaatcaatacaaaacagcgatgatagcaaacgcggcgatccatagatacaaagctcagtcgttcaccgatttatctgacacattacctcggaggaagtggtcgatcgaggaactaagtcgaccagcaggtccgtcgggcgatccggctgttgaggctgagaatagagatgcgggtgggagctgaagaaagtgaagaggtataatgatacatgcatcgggtatagagattgaaagagcgaattagacgagagagatgagtgaaccaatatgaagatgtaagggagtggataagcgaaagggcaaatgcacgggtatatggggtatacgaacaataatatgaagcagagcacatcaagatggaggagaatagatacaaaaaggcagtagagaggctgtcttggtataatgaatatgaaaaaatacgtccatttttcgttctattgttctaatgcaaactcgttttttaagcagaatacatttgccaatcgaataagaccggagaagacccccaaaagccagccggacaggatcgagtgacggtcgatccaccgagcggaaggatggttgatggactatcgaattgcttccagttggtgtatgcacctctgtgttattttccgagaggttcaggagaggaatgaaaaaggaagttcgagggattagtcgttctacctcctattaggagggatgtaacttaatcaagtagaatgagaaaaggtgagacggacccgttaggcgtactgtcccggacaaagctaccccaccgggagacgacctctgcatttgacccggatgaacctgtcccaaacacgactttaatgtcgtcctcgtggcagaccaagccggtacagtatgggatctgttggttatcatcgtatctatatagggaaaccgtgtaagcatcatggacgtgtccgaaagaggatagagaggactaacggcgatccggcctcaaactccccgacatagaccgcccctccttttgatttccaaagtgatgcggcgtactgaacagcgcacgtccacaaaccttccgttccaacctggtcgagacgtagcatcaaagaattcacccccatagatacatcaggtcagctgcaggacgaaagaaaacaaaataaggcaggacgaacatcaagaagagcagtccgggtagcatcgccgtcggttcctaacgggtactccagggaattaaggatggctgccgatttgtcagattctctaaagacgacgctaagctcaggtgcatagtacgcgcttggcaccggttcagggttcagagggcctttaaatgcgacaaaatacgatacgatcattagcttatgacaagactgacgcgcccggctgaacaacggaaggaaataggacgcttaccgagactggagccgaattcatccttgacggtggttaacaacagaggcacactcagcgtcccactgggaagactaccggcctgtagagctttgaagaaatccatcggaagggtagcatccgagctggaagccgtcggtcggatggattctgcaaggggtacagaattatccagagtgtaagcgtagctgaggaattgggtctgagcagccacaaggtcggcggcagacatctgagcagtgctatttgtgagtgtggagtagaaggcgttggtcaggatggaggtcgtcgtaggggtcgacattccgtatgtctagatgaaaaagataaactggttgagaaagcgcgcgcagatgatttgaaaaggtaaccaaatcgaaagatgtcgaccaaccataggatcactttggaggatagccgaatggaacaggcctgaaaaatatttgcagttacaatacacgcatacacacaaaggggcagagttgagcactttgctggaatattcgccacatcctttcgaaagcatatactaacctttagcttgagggctggacagcaaagccctgatcatgtgcgctcctgagctctgaccagcgatggtgatcttgttcttgtttcctccatacgaactagcgacagagcgcacatatttcagagagtttatgacgtcacgaacggcaaggtttgggctggaggatgcgttcgcaggaggaagcaaaccgagaacactatgagtgtatgcgcgcgcacataatgaatgattgaaattcggccgggtatatgaatgagtgtgttttcttctgtccgtttacttccgggtagagatacaggataaagatatacttaccctagtcgatactgagtagaacaacagtatgtatggagagaggggttgttcaagacagagacaaaaagataaaccgtcaactttgtacaaacaaacaaggtggaacaaggccctcaccaacctgaatgaccacgacgatcacatcgttcttaagagcgaacttggagccgtccaagccaggcgccgaggcggaacctgtgacgaaagaacctccgtgaatccagagcatgatgggaagatcctttgcgctcggaggcgcgtaaataactaaggagagacagtcttcagaggaggacgaggtggaggcgacgtttgatgcttgagggcaagtcggagggagcgacgttccatcttgcctgaagaaccagacgtatgatgctctgcatagagaaggaaagagtgtatatgcataagagagagctgagaaaggagcaagaaggaaagctgacctacacgttatcccaatatgtagttatctgggagtctttccacctattggcctttgcatacttgacggtatatctcgtgacatcaccggacaccgagccttgaacccaacccagcgaggtgaacacggactttgtgtttgagctattggctaaagcagcgacggacgagaccgactggatgaacagtatcagcgggaacaagagaccggataagaacagcatggtcgagtggatttagggtatacgtataaggaagaaagaagaaaagaaagggaagaggcatagctcagacgctatcctttttgtagtttgaatgcagagaaggttaggaggaagaaaaaaaggtgaaaggtgaatttatttctcgttcctattgatcggaaggaacgtgggaaggatgaaaagatgggcaacgccgtgaatagacggatgggacctgatcgagttagtcgacttcaggaaccaaagtggtcaatcaggcactcagacacagatgaccgacagggcggtcagtcgacagggcggtcaaagtgcagtcaggcggtgcatatcacatgcatcagtccgctagcggcccgagcccagggacccatgcatctatgaggtcagctcaatcgattgaacagagtgttcggtcgaagttcactcgacagggtgaaaacgaacgggaactccatcaaagggagctgaaactttgtgagtcagtcaccgaacaaaagattataggaggaatgaaaggagcaggacggagaggtgagcattaaggcgcgggttacagtataatcgggtaactactatagttcattcacacttgataatcaatcacattacaacggcatacaactaaactattctattgttctattgtccttccccgccctctacctctgcccctacctctaccacgagtagatttctctctcaacggttgctcatcggaaccactatcgctagagagatcactgctccccttcaccgcgtccttctttaccatctcgtcctgtccagcgtttccagactccatcttggcgatgctctccctgaagcgctggaggacggactgcatacgcttgctcggatacgcgtttctcaccctgggcgcgaatacctcatgccgaccgccggaagcatcgaagaatccatcgagcgtgccctgtcggttcgtacccgccaacacgccctggcctcgtcgagcgatccgttgaataatcggcaggagctcgtcgtcaaccttagagaccgaccaagataactcttccgctagatagactcggagttgatcaaggtttggaaatccccaagcaaaaggctcggtcgaagaatctaccgtcggactcagataggctggtctctgaagaggagcagttggatttattcgagtagggtcagcgcgtaagaagggcatagctagacgcatggatacgcagtacacagcagataagaacgcaccacttgtcgattaggaaactctgccaccgtcagatgtaaaccagccttgtgtttctttttctacgatgattttagagaaagagataggcaatgagcatcattcggaacatcaataaactcttcaaaaacaaacactcacaaatgactttttccacttcgtgttcgtgtcggccgcggtgtccatcccagtctgaaccttcatccaccaattcctgaagtcgaccaagccgtcatctccgttccctggaaattctgccaggacctccattgcgctcacataacccactcctgggataccgggtgtatagtccgagccgagaagaaaggcgagcgagatcaaccgatctctatcaagggatagctctcgagagatatccccagacacgtagcattccacatacttgtgatcgttaaataagttcttgaagcaagtctttgccccaaacagaaatacgtccgagtcatcggtgatcactccgtcgactagacctagactcgctagttctgcacattgcgcctcggcctccatcggcgccgtcacgtaaggaatgccatacaaccgaagcaacacctggatctgtgacgtcatttgtacacttacattctcgtccccttcgctcgtcagcttcctcctctgcgcgttcaacacattaatctctcggtcaagctcggcttgaacctcggccaggtctttacctttgacttgagaaaggaatcgtgcatatccgtcttcctctgcatccatgtctataggttcatcttctgcatcggagggtggggcagagaacgaccgatcgaacgacttgtctggtgagtcgccaaatgactgatcttcctcggcgattgcgtggatattcatcggagagcttgagcccatcgagctatcgctctcatcttttccccctccagacggaaactgaacagattcaggtcgggagatacgaggcggaagatcggaaagcaatggttctctcccttcttgcgttggtgttacgtcaagtgtagctgtagagtctttctctgtggtgatggtgggagcgatgacatgggcaggactagaagataaatcgggttgtatttcttcggagggatgcacagtcggctgaaagcccggactcgaaccgatcgtcggacttttatgtcgatccgtaggcggtgatggaaagggttcttgaacgtcgggtgacgtcaacggtatactctgagtagaaattgtcgttggaaaatgaacactccgaccacccagagatccacccggagtctccttcgttcgcttgaccgccggagagagatcaagcttttgtgagttacctatagaatctagaactttgaactcgtccttgagctcgaacgagtcgtccagctcaaacacctcttcttccggcttacttctcttgcgaggagacatgatcggtttagacggcgtggtggtagagatcccgataggaaacgtctggtaggagggtgaatgagagatttttggggttggggtcgtgaacgtgtctgttccagatgttcgacttgtcagaggtgtcgcccggttaaacatcgtcgagtgggacgacctccgggcggataggctacccgaggatcgttctctctgttcgctctccacctcctccgctccaccgtccctcttttgagaagaccaaccaggccgaggcgtcatcaacgggtcggagatcttcctcgagcttccaaatgaatagctcttcggaagtgacgatggaaccgctcccccaatggacgaaccggatatgcttcgcttcggtcctcccggtgttcgaggcgacgcgctcggaataggctgaatgcctgaaaacttccgggcgatcgacaggggagagagaggtctgataggttcttctggtggtggtggagtaggagaataagtggttgaagaagatgaggcttcgatagaaagaatgccttctggaaagagaccgtccgatagaggctcaaacacgtcttgtggatctggctcagagctcagaatgattggatccgattgttgaggatgtgaggtcggatgaggccgatgttctgatggagcgaccatctctaaagcaacctcttccatgtcctcgtcatcgtcttcttcagatccgaggacaaccggtacgtcctcctccgccttcactctggctatcttccgtgtgttgtcttgcctggagagactcaaagctcttcgtaaatcctcatcctcgtcctcagctagtcgaatagcttctaccacatctttatcttcttcctcttcttccatctcatcatcttctgaacctggagcaaacagaggagcagaagtcatcggcctagtcgttcctaggactcgagcagttctggggattggcttctgggtcttgagaggggaatatctgttcgctaaagcctccatggcggcttgtcgacggtttcttcggaaatcattatcttctaaagaaacccttctcctgttcatttgggggttttgtaatgctttgatttagtattttttgttcttgtttataacaataagaaatgaactccaaaaggcgcaagagaaaatgaactagttttgagacagacctttgatccatctctaaggcttcatcctcttcccctggactttcatcttgatcaactaagagcattccatccttaatcaactttcgcctctttctcctttcctctccttttctaatctttcgatcccgctcgatccgaacatttagatcctcctcttcttcgagatcaatcggcttttcttttgtgccctcttctctaataccgagcacccatccaccgccttgttcgttcttcatcagcacatattccctgtttttttcattcgccatccgtactttgacatctaacgaagcagcctggctctcgatccctgccagtccccacatctgttgagtgagtacgttcctcgcctgtagattctttatctgtgcttttgagaaatccagaggagtcttggaagaagtcaacatcgactgaagtctcagatgggaagacgaccgagaccggagacgaagatcgttgatgatctcgtactgaacttccgcaggaaggagtttgaagtctgaggaagcggtatcgatgtcatcgaatttcatctcgtcgataaactctcggagctctgcctcggttgcaatccgggggtcttgtcgatcggaatgcatcgatcgaccgggtaggtcaggaagttgatatgggtctcggacgacatacttctttttagcggattctgtcgtcgtcttttcttctgtgaccgggcttgggtttacaactggatcaacagactcatcggatgaagaggacaaggatgaacgtcggcgacggcgcggagtgagtcgtgaacgggaagaagaggcttcggatggtgggggtccctggtgatagtcacgttgagggggtcggtcatagtcatccagaaagacggcattcttaggaatgatcgctccggtgtcctgctcgtcattcttgtctggttcttggtctttatctcgtagttgatcgttttctaactcccattctgcctcatcctctgggtcggatatcggcgcgctcacggcacttaatgaacgctttagggctcgcttcctagaaaacgccaacggccgataaggattgaagaagaaccaaaggccagatcatatacatcagacagaagttccttggtcagattcaaagacgatgaaaacatactcttgagcttgtctgattgcctctctcctgagttgagcgttgaatattttttctgctacttttacgtgactagcggcgacgcctgctttccgttgttttctctcggccttttgatacacaaaccaaacaaccaagaatatcagaggctctatccatcaccagccagaacttgacaagttatgaatggaaaaaaggaggaagaatttgaaacgagattgatagaatgaaaataaaacaacacacacgattgtcgatcgttttaaagcgggtgcggcaccatcaaagacaaacactggtttaattccgtggaagagtagcttgttgatccttcggatgaatcccaagatatgagcgttgacgagcgttcgaccttgtttatccttcattgtggcttggaactggtcgatccgggatggtacacgtgatcaagttatatgtttgaacggttctgaaagcggatgaaacggagaggagacctacctgatacatccaaatactgcgttaaatgagaacatacagacgaggcccagtgatcagtcagcaagtcgacggagagaagagaatgatgggaataacttacgacgaatcaatcgctagcttctttccctctaaagtttcgattctgattcatccattcagatagggtatcaaacacaaggaaataaacgatcgttgctatcaatcatctgagcctgaaagtctttctagccgtgtgtgagagcgaagaagaatcctttgcatacttgatgggccgtgctactggctgaagcagctgccagagtcctttgactcccattatgtgacgttcacaacaagatgatgctgttctctgtttgcttggatggattaggtgatgtagtcgtaggaaatgcaatgttggtctgatagaaattgtgtacaagatgggaacgtcatcgatcgaagggctgatcgttcttatggttacatcattagggttacaacatcattacagtttctgggcactcgctctatcagccaacggcgagacggcgtgggatggcaaaaagtccaaagatggatcgtcgacagcatggtcagcagcgtggtcaatagcatgaaccgtgcagacgggtattgagtgcagtcggataagatcaccatgaagaaagaggttgtgtgttatgcccattttatttacccgcgaacggactccgactaccatccctcttctcgactggagccgatcgatactgctctctatgtttttccgaaagatactccattcggagcttatccaaagccttgtcggtcattctgaaaaggttcatcataggtttgaagagaaggtagaacacaggggggagagaaaacgaaggtaaaacgcgtcgggtgcttagcataatcggggacgtgatgtaaacggagagagtgtatgtgttgtcaacccgggacgacgtacaatggactcatgcattcgttcatggctctctgttgaggtctgcatgcccaagcgattgatactagtctaggagcagcgcaagcggcgaaagctggtgggtggaatgtcgtccaggtcgcagaaacgtcaagttcaaggcaagaatgtcagcctatttcaatcctttcacaactcattcaggcctctcggaagttgatatgtaccacgagcagatgccagcaaagaatgacggacaggggatctgaaaggatagaaagagaaagagaaagaagacggtagaagaaagactcaccggcaacatactctctacaggcatcccttgcactggcctttgcgtctttgaacagagcttcctcctctcttctagacaaagccgacataccggcaacctctggtggctgatactcctgtctccatgtgaactttttgtgtgtatctgatgattcgggctgggacatgatgtatgtgtggatgtatatgcgagtaagtgaaagctagcgtatatatgtatatgatctcggcctaaccgtcggcggggaagtgttcgttagggttaatccaggtgtgaaagaaacgtctcagtcacaaagaaagttttctcttcttgttttttgttcccttccaacaaccatcccgaagcaagtctttgtactgctcctgctactctccttcgttccagaacaaagtcctcttttccttatccatctttacatgcccgacgacgaacctggttgtagtggttattctcaatttatgaaagccagttcctactcgtgaggttttttctccatctgttttcttttcttctttccttatctttcattttcactttcacttcttctcttgattccgttccttctcttgggtaacaccaccacattatcattcgttgttcgtccttgcttaccgtgctttctgaatgcatccgtctttttcaacacaatcgtcatcatctctgcagtactgcacgaacccttaaccgatcttcttctctcgttcaagacctgctctcttccggtgaaaagccaccctaaggaccgccactcgtcatccaaacaagcctaacctttggtcatacacatcgacctcacgtagatgggttaaggctcttttcttctacctgaatatcccccgaaagttcctgtttttcaaagaacctgatagatacacactaaacgaacaaagctccacaaatatctaacaacaaaaaatacgacgcatcctattggatcttaccttccctcccgcctccccttctcttgactccagccctcgtccttgttgatcgttcctacactttctccacttctcctaaacgattccaaatacttctttcactccaacatggtctttaaagctccgttccctctttcgaccttcaagccgctctcccggacctcttctcccgctccgacaaacagtcgagcctctcccgaactccctcctagtcctcctcggggacgcccctcgttggatggtccggagaacaacgagaagcgctctcggtccgttacgagacccagacacattctttccctttctcgttcggcaacccctatctccactcctagtccatccccgcagatgtcgtcgacgcctcttccggcaggatctgctccgttggtcaacggctcgaccgagtccgtctgccatatcgagaccgtgggtgaaagactgagcgaggccgtcactaaagccttggccggcagtctgacggccggagagttcaaaggccgaagaggtttggcccgaggaagcggtcgggacgtagccacgatggtgatcaagtaagccgttctccgttcctgattgacgtcatagggctagacaccacactcacacaacttcttccccatctattcgtacacagagagtttccagctcctccggtggacgtctactatttgcgagccatcgtccgcgtgtctgtcaagcacttgtctgtgctgtaagccaactctcatcaattcctggttttcaagcttcctgtgactgatgacgtctgactgttggataaacatacccagtgcttcccgaattgagacacttctcttgcccgccattgtcgaccccacgttcgctcacccgatcctgtccacccctttgcctcctccttctatccggctgaactcggtctcgcctatcttggcctcgccattcaatgcctgccagacttactgcctctcattggcgcatgcagcgttcgaagttagggataccctatcgagctttcttcatgccgaaccgggcgagaacaagcctcggtttgtcggtgacagcttgaagcctatcttagaaaagttagactttattatgggcaaggtcatgcaacctttgctcgcccggctcaagaaggaattggctgacaccgttcagggcctgaagactgtctcgatctgtgcatcgggtaaaccaacaaaggcagccgctccagcggaaccgccaattccctcgagcctgactccttttgcgtcaaaggtcgagcacgcccaccggtgtctcgccaagatttctgccaactgtggagacatcggggaaggctgggtagtcggcgtagtcgcctcgactgtctggagagggatggttggtatcgttgagcggccttgcccacctggagaaaagtctagcccgaagggaacgaatcaaaggatgtcgccagtatcgaccccatcggccctcggctcgactatggctcagccaaagcccaagccgaccaattctgtcaagtcgtccacaattgtcgcaacgctgctccgaccacctggctcccgaccaccctcgcccagccggccagttgtgacagatccgagcacgatcttggtaagctcgttcgaggtgttggtccgaaagcttgtcgacggtttggtgccctatgtccttcctgcatcttccgaccctggtcatctcgctcgggaagctctggccgaggcccttgaggcactccaatcgctcaagattgttttggccgcgcttggaaagccaggcggtctagactttttgctgaccgggctggaagtcctcaagacgtcctctcagacggcagccggacaggtcgagcaagatgacagctttcttgacgccttggatgatgtcccgccggtgttgttgtttcacctttggggagctcggctgagttctttgtctggagcagaggagcagcagcatcgaccgatgttggttggatctccccataccttgtttggctggtcgagggaccaatacgatcgaaccgtcctcgccggatttggctcggccgaagagtgggaacgaaaagtcggtgcggcagtcaaggctgaggtggccggggtgttggcaaagcagtcaggatcaatgaccgaagaagagagaaagtacctgagggcgatgtcgctcacggtggatgtcatttgatgggcgaaaagccaacgactttatgaagattgttcttttttttcttttcttttcctttctctctctctcctctcttgtgtctgtccttcccttctttcttctctgaatatctctcggcgctgcctctacttctgctctcctcgctctcctccgtctctgcgtatgagacacaacttttgtaaacgagagttcatctttctatctatctcttttctcttctctctgtttgtatggcagtatacactctcttgcctggtaattattgcactcgtatgagatttctgttgccctcttgttggtaaagttgaaacaaccgaaaagacaaagcccggccgagaaatcatttgggccgacgaggccgataatatgaatttcctattcttccgctcttccgcatgaccgccgccggatttttttcgaaggtgagcgaacaccttcaacgttttccctttcctttccttcctcctcttgtccttctccttcgttgtctctatcgttcgtgctcttcgttctatagactacgtcctagtatacacatataggatacaagcacatccaagaaaggaaacacgtccaaaacacacaactgctgctgctgcttccgctttcgacctctttgtagcgcccagtacgtgttttcctatctgatttatcttccctcttttgttaggatcatgatagccggatcatggttccatgttatctgcacacggcatgggttctctcactctctctgcttcctaaccgaactcacccgatttgacgaagcaaaagcttcatagaagacaaagtttacatccaacatccaacagccaacagctgacctctcttttgcctgttcttcccctttatctatctctccctgctttcggcgccggcttacgtcaataacacttcactcgctatcactccactcgactccatccagcaggtcgattcgatggacccaagcctgtcgaacactatcgaacccgaaccaactcagacaaacctcccgtcttttccaccggcgctcatcaacgaactatgctctactatcttctccctttcactctcggtctctccccagctgtcgagcatcgatcctcggccgtcgccaaacgatgaacagctcacccggaatactcttctcgcgctagcccttgtgtccaaagagttctactatacctcccgaccttggctctggaggacacttcgaatttgtaggccgagaggttgggtcggcattgttgacaagattagcgggagcgatcaggttgacatgtttacaggcgcagatggcaacttttcaacaggtcccaaccaagaggcactttctaggtcttccacatcaagctctctgactcgtgggaagcaaccgatgattagagcctcagacgaccaggccgaatcagacagacaagaccaagagccatccccttcatcctctgggttctccgtcttttccgccccgcccctcccagggatatcagacagacctcacctatcactagagagacggagccactcgattgaacgtactcagatttatattgacgctcaggcgagcgctttaaagaaatccgtctcgcttcggtcgacctcgaggtcttaccatcagacgagccggtctcctctgtcgtcaaactcaaactccccggagcgaggcccaaggtcctccagtgctagacgacctcgtcgaccagaagcctcgacgtcaacctcattctctgtgttcctgcctcatgacagagttgtctcagagtcatcctcgtccatttgttctggcatgccggaatccaattcgtactcctccattgccaccacctcgacttcggcgacatcggtagcgacggaagacaccgaacctgcagatcaactcactatccagcaaacgggtagctggcgagggcaaagtccggagagagtgggtagaagccggttcaagcttaacattgcatcgtccagcttgagagcgagtagtctcgatcatcatctggccgagactatcgttgaggaccaatgtacgttggagtcacctcgctctggttgtatactcgtgtattctactatatgctaaatatctgatatcttcttcctctcttcctctcgctgcatacagactatcctattcctgtgccacatcctactccgcttgttccagtatcaatctgttacccgacatcccctgtgccgtcgatctcgtcggatgagaacccatggggccgacctgaacatctggatttggccgtagatgatcctcttgctgaaggacatcatccgtgggaggctgaagaggaagaacctcacaccgaggccgagtttcaacatgtcctcaacgaggccggacttccagtcaggttgatctcattcgccagcttcagaactactgtcagtcagccttctcctttcccttgattgcctacctggtcgtttctttagtgctgattctttcgtgtctggctcttgacgtttcattctcttttccttagggcttgaggaggtcattggaagatggtatcaccggcaaatatgtcaccccagatagattaggcttggtgttgagagggtttggaaacttggaatcattcggcgcttccgaatagtatgtcgttctattgtcttttctagcgcatatacccatgaaactaactttgacttctttttctctttcttctgactccctctcgaagtatggactcggctctcacccttccgaatctgatctccctcctcttcaggggcgctaacccattgccgcctgtcctcgctcaagaccctgaatggaggcatctcactttgttcaggccgttggttgcgttagatctaacaggtgtcaatagtagagtcttcgagaccgctcttagaaactttgttgccacctttctgacgcaggaagtcgaagaagttgatccctcggacttggaccctgaacatgttcgtaggagctttcttatgttgttttcatttcctacccttctttgatcggatgcggagctgatctgatcgtttcctctctctctctctctctct

SEQ ID NO: 247 - DNA, 7058 bp, Xanthophyllomyces dendrorhous
ctctctctctcacacacacaacaccatagcctgtcgaggctattcggaacgaggctaccatcccgttcctcgagcgactttccctccattcttgcaaattcatctcgtcccatgatctattgctcttccttccatctttggtcaacttgacccatctcgatctgagttacacgcggataaccagtctgaaggagattgaaggtctcaagcttaaagcgatcagtttgagtagatgtacgaagctagatggagaccaattgctacagtgagtatcatctagtgaatggcttcgtccttgatcgtcttatcttctaatcggggttttttcttcctacctaatatcagattcttgttgcacccggctcgagctgagttggaggacctgaacttgtatggttcgatgtctttcccttctccgctgagcgcgttacagctactcgaagtccttcaggaatcacctgcgttccattcaaagaaactccgatacttagacatttcgtcttccaagctgacgaccgatcacttggctgtcttccccgagcagccctcgcttgtctcccttggactctctcatatgccgacgttgcctctccgtgatatcaccgccttccttaaattgaaagcgttcaacgttgaggttctcacgttgacgaacacatcgcccgagatcactcgaccgccgaacgtagcggcctcgatggtcgctgttcacgcgcttctcatcaacccactaaccgcccctccgttctcgttctcgttgccctcgccggatgaccctcctccaccggcaccgggcaaactccgcgtgatcgagttgaccacaaatttgcttcgatcgctttctcatgcaaaaggtgctgcttggagggttatccgttcgaacggttcaagaggctggtattgtgatatatccgccggctgggtgtcagattctgttctccccccgacagctttcccggctttcccgacggagagtgaggcaccgagatttcaacgaaacatcaagcccgaacatccttggcgaaagtggttggcgatgttggcggagagtaacggcaaggttgatagcgccatcggtttccattcgagaaagatcgaagtcttgaaaggagagggcttattgggaagagaagacgggctgtatggaggatttgctttcgtgagtccttcttctctttttttttcactttaggcttattccttttctttctcactcattttggtttgtgtggctgatccattctttctctcttatattttcttgggggggaataatgtcggcgatttaatagggattcgatggctaaagaaccaaccggatacatccctcttctcttctgtactcttcattcctttcatctctgcatccacacaaacatctttgcacataatcgcacactacacaaaacagaatagacttttttcccctttgctttttgtcttaatcttcgccattcacatacatctcacatgcacaagtccttagctcaattcctagaacgcagaagagaagaatgactggttcgtttctgacaggaatcttgtggtcgatttatttaatgattatgattgttcgttggcggatctacacgaatacacatcctggacgaagattaactctctctcttttcttttctgtgatcggcttacttcttgcatctcggctgaaaggtatgggaagaagttctatcgatttttagagatgaaacgaaaagggattttttttacaaccacgcaactgtactgctacaaaggaatgaacaaacgaacgagaaaagaaagaaagaaacgagaggatttaatccttgaaccctcgctccttgacaccgccgacatccttcttttgcgacacgtccactcccaattccttcgctcgctcctctgcccaatccttagctttggcattgtacttctcctcatactgagcgactgaaaggggtcgttctccatgaggagtgaccctgacgccgtgtctcctggcagggaaaaagtcaaagagagccgagtggttgacgagcctgttatcccagaacacgactgttccctcctcccaggacgctcggacctggtggtcggcgctggagacaaaagtgtcgtagagaagacccaagatcgcgtcgctttccgatttgggaacaccgacgatccgtctggtgaaccctgggttgacaaagattgacttctggccagtcacagggtgtactctgacaataggatggatggtctcaaccggatcccgtcggacatggttaccggccgcttccgatcccttggcttgggcgactccagaatggacggcaaagagggtctcgaggtacgcttggaagcctttggagaaggacgagtacgcggcgagaccactcgagaagatggtatcccctccaacctcgggctgggcgactaatcggagggacgtcaaaccaggtggctgaagttcgtacgtaacgtccgaatgataaagctcgacctttttgaaaacggtgttgtccggtcgcgagttcttgtcggcgtacaccaagtgaatctcgtcgaggtcgccagatttgggaaccgcggtggtagcgtgcttatgaagtcttccaaagtatcgaccgaagtttagctgttggtcaaccgtcaaatccttctgacctcgaacgacaactactccaacctgagcggcgagtagagcgctgttttagaagttggttttattattaccattcaattttgaatacacaacaaatcaaagtcagatttctccgtgatctcaattagcgaaaagaggatagatagagggcagatccttacaaatcgttcttttcctcatcagtcaagctcggaagatctaaacctctgagctcgattcccaacgcaggagtcaagaacttgtgtcccgaggctttctttaagattaggttctccttctttgattttcccagactaggcgcgctcaatccaacgtcgacgtggtcaaactcttcgagaggaggccagttgaccttggggaaagatggcttgaggtggttgaactcatattccgaatcatctgttgaagaaagatgaagagttgccagtagagatagtccgttagaatgatagtatagtcaaaggtgagaaagactagagaaaagaaaagatgggaccgaccttgaccggcgagctcatctccattgtgggtagagaccaaggcgagcgacccatctgtagggtaaaaggcaaggtgatacccatttgagtgaaagaaggaaagaaaagtagacaagaacggatggaacgtacaggcagcagcctcggatgcgatctttgccttcctaggctcttcaaccgtggtacttgatttactgttgaaagggtttacgtaagacattcttaattgattgattgaaagatatggatgtaggaatgtagatgcgaatctagtcgggaatgtgtgtgtgtatggcaagagagaagagagaagacaaaacgagaaccaaagaggaggtttatgtactgggctaagccatacgttcgtgcgatttcgtgctttcaatcatgctctcatctgaatccaccggaggacagcgaagactcggagggaataaacacagatgaggtgaggtagggagattctaactcggtgtttctctactgtcggttggaggtgcgaatgctcataggcacacaaagagaaagaaaaagaagcgtgatgaatcactacaagtctcgtcatcgcctcggtcagccccttctgccggttaaatctccatccagtcagcacgatttgccgacaggtcagtttagatctagtcagttgtgatgcatagtgagcgagacggatggagtgtacacacacacacacaaaaggagaggaagagaaaagaacgaaaagtcgccatttggttgagggaagcacgaattcaggcgggatcggtggattgtctccggcttgcgtctctttctcgctcatctccgacagccttccatctatttgttgctaagtgtccatcttctataccatgatgagtaagatatccttcgtcggatcggcaagcacgaatcatgtgcaaagccttcttagtgtggtcgaggagagtataaacatatgtatactcgtcagataagcaaaacagagagagaaacaaggaaaacgccgcggatgcatgtcgttttctattgcctgtgtatatttctccctctgtataatattcttctttcttctcttttgcttgcaacgatgacacccttagaggtcttaagaatcaaaataccattcaagatatcgtagtgaagagaaccatctcctccgtctttgataacacatcgagtaccattatccgtggaggggacaataagaacacactggacgaaccgacgaacgtcgttcctaaaacgagttgttcgattattaaaccacaaaggaaagtgatgataagcatttgaaagaggcatctaagacgagaaaggaataagccaggtcaaaccttcttcgagtccgaccctgttgcagcacacaaacacaacttccttctgtaagacctcacgctcatctcgctcgctcgtctcttcgagaaagatcccaggcggtggcggcggaggatcgtgtaatggcattagtctgtgggcccaatagtttagggtcgagaacgaaggtccgtccggagaatccttctcatcttcttcttccttatcctctagctccgagcctgtaggtggaggatcagtcggtgccggtggatctagccaatctaatggagagagcggtcgagcgtgcattgttttactaaattttagtcggagtgttccaaaaccatatgacaaaacctgcatatagagatgcacgtactagcagtgaggacaagagtgtcgaccgagtctatcgagagagagcgcaaatcataaagagagttctttgtattaaaaagaaagctatcggcccgcaggatgatcccgatataatcaggctcagatcacttacgtttttgggcgtaccgagagagttcgtatgcatcccacggagagagaaaatctttcgggttgatatctgaagaggaaagagaacatgtcagtggggagacggacaaggatatgaaaaaggccatacatacccatacatatggccaaacaaagtcttcctataggttggggcagatctacaaacgagaatccatcgcctgttcgccatggttataaaaataaaaataaagattagccattatatactctttgaatgcaacccaacataaagctaccagaccgaccaaccttcctgggcccaaaatttgtcggtatcgaacaggaagctcttccgatagttatgtacgatgtcgcccgaagggctgaacactgtggccgagttccagccatttgtgcctgggacagatgaacgttcggggtatcctgcaatcacatacgccctgtttagcatgtgtaaagattcgaatccggtcgtcagccagcaagaacaagatttgggacgattcagaactaaagaagacgtacccgatccttttggcgagtgaccggcagaacagcgctgtaggcccaatccgtggttcctctaagaacggctcgatcgattctgggctagtaaacatatatccggtgaaggcctggagaaaggagagaagaggaagaaacgggtgagtcagaggatcctatgagatgacttgaccgaacagaatgtacgatgtttatctgaccatctcaggaaataccaccaggtctacttgaccaggcttcagacttgagttttgacgataatagagaccagaacgtaggtaagcgtgtgtcggcctgaaacaggttctgatgacgggagaagaaaggagcttacggatcggtcatctctgaggctttgttgaggtttccttgaacgtctctcagctttgggtcatattggacacatgcaactcttaacgggtgctctctgtacgttggagctgatgaggacgccatggcgatgtacactatgaacttctaaaagggtatatctaagtcgagtcaagtccaatctggttgaccaagctaaatgcggatattaaggaagattaagataggtgagtgtatagcctgacgcacgacacgtgtttgtggcggaacccgccggttggttcgagtactattcacctttggtcgtccatttgacacgactcaaactcaagataattcagagatcacgtacgaaccaccgagaggatgaatgatcagatgaacgtgtgtgttttcgtttttaatttctttcttcttctttggacaagaaatgaaagcataaagatatcgcatataatctctgagatctaggctagagagagatgtgatacgtttaaaagatgtattctatacatcctttctggtcagactcggacacgagcgagagagaacgacgctgtaagaaagaacgatggaagcccaggcggaacgatctttaacagtccctccaatatgtctctttatgctctatttctttgccgtctgtcgttatcctcttgtcttgtcatcgttcttgttatccttgttctttccctctcgtgctcgtcttctaccggaacctgttttctcatatcagagattcaccacgttagggttaacgctcgatatcattaagaaatggtcgatcgccgcccgaaaacatgatgagcctagattcggtgatgtcatgaatgatacctttactgcgcacatcaccctgactgcgtaccttgagaatgtttctttcctctttctctctcaaacgcgcctcgcttcagccaaacacgcgattgatgacgtacatgtgtttgagagagaacgcgacggaaagtgcacgcgcacagaggcaccagccagaagaaaagagccctcctgcgacgtcatcgggcggcgggacaaggaacaaagtcagggaccggtcgagtgggcgtgcgtctgatcgtgggcgtgagattggaagattgagtgagagagtacaaaaagttggacgttgaagtcgtctcttcttcttttccttcttcttcctttctctcatacacacatcacatacatatcccacttctctatctcttctttatatattttatagttttatactttatcttctgttttgatagcctgtagcc

SEQ ID NO: 248 - DNA, 24182 bp, Xanthophyllomyces dendrorhous
gcctgtagccctaacaaagaaaacacaacgcacacaaacacttgatctctaatcaccacatcctttcatcataatgaccgttccccaagccacccagcagatcaccaacaaccccagtcactacgccgtcacctcgcccaccgtcaagaaggatcaggaggctgatgtcgagcgaaagatgaagctctacggagtacgtgtttcgtctttccatctttctactgtcttcatcttcctccgttcgcgcgctcatatttctcttccctttcttccaggtcattcaagcgttccgagatggatcgttcccgtccaactcccagatcgacgctgctttgctcgccacagaaaaggctactccggtcgacatccgaaatctctcgcccagcggaaagaagctcatcaacgacgtccgagacatcattgagaccgcccgacttatgattcttacaaagaactctgacgagcttttccaaaacttcatctaccacacaaagtgagccttgtattcttctactttgtgtccgttctcttcttctattcttcaaccgttgcttatcttttatctgatgctctcaggaaaactgatacgaccaaaggcgcccaggacaaatctgttctccccacctccaagggcgaggttaagaacgaggctgtcgaggccgcctcccaccttcgaacccttctcacccttgtgttaacaaactctgagatgcgaaaggtcatctctgatttgggccttgtcggtcgggatctcttcgcgtccgccgccgttcgaactgctgagaaggtccgaccggatgaggaggagttgaaccaggttgacaaggaggctccttccggacagtgggagggacctggtggcaagaaggttggtcaagaagtctctctgtcttatcctttttggctctattttgactgaccctcttcacgttctcaattcatcagtacggaaccaacgagactcctgtcctcgaggctaacattgctgggcacaaggtcacccacgaccccaaggcccccgtcgctgaaggaacagtccacaccgatcctaacggtaacaagaccaacgccggagaggccgttcagcaggccaagcaggccaagaacgaggcccaggctcagaaggaggacgccaagggccaggccggaggcttgaaggagcaggccaagcaggtcggatctcagaagttcgaggagggtaagcaggcctaccgagaggacggtgtcgagggcgtcaagcagcacggacgaaacatgaagagtgacgctgatgaccgatccaacgatgtatgtcttctttccttcctctcttcctttcggtatcagttggccttctcgcttatcgcaaccctttccactttctccaggacgatgctcaaaaggccaagggaaagtttgccgccttcaaggacaagcttagccctggagatagctcccgagataaggccaaccaacagaaggagaaggttactgacttccttgatgaggaattccctcaggagcgacgagatcaattcatctaccgaatgaagaaggtggttgtcgagtgccagaagcacaacgactacgatgagggtttgtcctgatctatgtgaataagctgcatctactttgattactctgctgacagatctctcctccacatcttaatcagccatctccttcttccttgacaaggctgagacttacaagggacacaccaagagccttaccgagactggtgccgactcaaccggagccgtcgcctctgacccttctttccagcaggcctacggagagatgaagaccttgcttgagcgattcgccgacggagagagcatggaccgaattgtcgacgccgtcaacaacctctacgttgatgcccagaacgatcgggagctcagcgcctggttccgaaagctcgactcttacgtccgaaagtgcctcctcgagcccggatacattctcgaggacgagtccacgcgggagggacagtctctccgagagactggcaaggccttcttcgaccacaaatacaaggcccacaaggacgctttcttcgatgaggtcggaaactggttctccgccatgggtaaagatcctgtcaacgttaggttcggagaggactggaagcgactggtggccgacgtcttgtttgacgaaaacggtcagctcaccttcaagcccgagctctggaacgacattcgacgggagatcctcccttcgttgatcaaccaggtcggatacattcccattccccgaattgagtacaccgataagcaggtcgacttggttattgagaacctcgtcctccagggatcgaacttgttccccaacattgttgagctctcggccaacaactacttcaagttctctccttaccgaggaattcctgacaagagctaccacaagttttccctccacttcagtcaggttcaggctgacatgcgagaggtcggcttctacttcaagaagaagactggtttccctaagctcaaggactcagggttggccgatgtcttgttgagtggtgacggtttgacggtcgatgtcgagcttgagagcgccggctctcgaacagaccacgttttcctcatcaagcacgtcaacgctactgtcgacaccctcaagttctctatccgagattccaagcatgatcttctgtacaagatcatggctcctctcgcccagggtttgatcaagaagacggtcggattggccgtcgagcaggccatcaagactggtttggagtacgtcgacgagcagctcgtcgaggttcgaaaccgaatggatgccgccaaggactctgacagcctgtcccgaaccgatgccctcaaggagatgttccagcgaaagaaggagaaggccgaggtccgaaaggagaaggccaaggagaaggctgacgagaggggttcccagtttgccattgtcacctcccgggacgcctcggtgattcccaacagcaaccctccccactcgaagggtgagaagatctttgagaaggacaagctcgcaaaggccggagagacctggcactcgcctgctttctccatcgctggagagtccgatttgagcggattgcgatcgtcgacctctggttctcacaacaccgcctcacatggaaccaccggttcccacactaccgctgctccttacggaaccactagcagcagtaccgccggcttcaccgctgctccttacggaaccgcggccactggtgcgaccaccaacctgtcttcccagcttggttcttcgaccacccacacgtaccctgtgactcaggctgctcccacccagggtggataccccatcagcggtcagcagcagaagtactaagggcttaccatcgtcctggtcttctctcttctccctcctttctttcttgtctagactgtctgctcgggctgtatcaagatatcccaacgggagagcgaactactttgttgttctcttttctatcgtagtctctcaaacatctgtttctttatatctctgtctggcttgtgttgaattgtctttatcttaatagtccttatttttcctgattgtaatgacgaaaccgttttctgtattgccttcgcttcttataactaaaagtttcttttcttgacctacattttcaattgattcatactcaagcagccaaagcaagaaacatttattgggcaagataagcgaaaaacctgatccagctagagccatcgcgagatttttatctaaatctgttctagccctagtccagcagaaaactcatattagccgagcaaacagcaaaacgtttctgtcgtttaccctctcttgccctatccttgtggtcgtcttcatgctcgttcgagcttagcttacgtacacatgtgatcactgaatttactcgattctttctcttctcagttcaagtctatgaatcgtctgttggtgtatttgttcgtgcacaggtgaatctatctgtccatctatttaccaagctagttagctggctgacttgattagatagagaagtccctggctagattgaaatggagcaggggatgataccaacccatctgtttatgcgtgtttcgcatcaagagattctttcctctttgtcctcgacgatacttctgattctttctactttgttctctatggatttcgttactgtcagacgagttcacttttgtgggtatcgaccatcttgcaggtcgtctaaaagagaattgacggttgtcacaagaaagaagcaagataacaatatagagggggtttcttttatccattaaatacaccaactagaacgttttctattccattctttctctggaaaccggggagaaaaaaaagagggaaaacgcttagtagacgtagccgaggagctttcctccgacgtgctttcgtcgagcctcctcgtggtccatgataccggcagaggtggtgaggatgatcaaaccgaaggatcgagcgggcaaaagctgaagaagaggaagcgacaaattagatgagcccaagacacacacacacacaatgaaagaagaatggagagttaagtctagaagaaccggatgaaaggaaaacataccaagttgacccaggactcgatctcatcaacctgaacgttgaatcggggagagataactccggtcttgttcaatcggccgttaagctcgatgacaatttttccagctcggtgatcatcgacaatctcgaaagcgccgatgtatcctgtaaatacgagaccagcggaagtagatgtcagtatacatggtgacgtgagaaagggcgcaagagaataagaacaagacaagagaaacaaatgaagaaaagaaccagaatggagaaagaaatgtcccaactccaagccaaatgcttgcgagactgaaactttaaaaccaaaaggtatcaagccgccaggcaagcatagacggcaaggggatgtggtgtatggtatgttttgtcgaaaccttaaagaaaggagccagtagggcagatggctagttccaaacagttatggcttcgagtatgtgtaggtgtggctgcccatataaattaggtggaaagaaagaaagagaaaagctccagcacaagaaagaaaggtctcaccgtgctgctgcataacagacaagaatcggacgacaaccttggaggagggtcggatgagcacctatggtatcacagaagatgagtgcgtcagcatagatcgtgtcttctctttggagaacttgagatatcaaacgcgttacgaacctgcctctttcctcgtcgctcggcgttgacgatgttgttcaagcagtcgttaaggacggaaattcggaccatttttgctagtctttaaaggataggggggcggagagaagagaagtttgagcgtccagatgggtgcgccttgctgatagtttttattgtagggaaggacagacgttgggtcaattttggaagcacagtccagataaatcaagtttttcacagtcgaatatagttttttcaacagttcgtttaatgggaggggtttttgattgaaggtgtttgatcacgaccaagaaaccagaacgatcgggaacgtgacaccaaaagcaaaggatcaagaatccgttgggcaaggataagagagcagaagaccgagggggttaataggggttttgatcgataaatttgtcgatggtgcgatttcgaaagataaaatttcagagaggaagagtcaaaccgaaaaaagaaaaaaaaagaaagaaacacatgttctatcagcatacaccctcttctacggacagcatgtctaacataagaggaattcagcataccgagacggccaaaaagaggctgttaaaggtaaaaagggtgagggaagactgagggagatccttggtagttcaaaggaggagaagaaagagaaaaaacttttgcccgggcaggcggccagtgcgggcgacccccgatggggcatcccaaactggggatatcgcttgggggttcatatggggtctaatgacatcctggctgaccccttgtagccatggcaaccgagctgacagttagtatctggtcgaattttcaacagcccctttggcaggctgcgcgagggatggctctgaccaggcgcctaaagctgtgctaaccaagcaaaaaaattcgaatgtggcgtcaatgccctgactgagaggaggctcgtgcggtctcgctttggccaggtcccccccgatacgacaagactcgcttcctcccgtcaaggcaaaccttcagaatcctctcaagtcattcaacatggtgcgttcagaggagcccgtatagagagctcaatagtcgtttctttccaaggccatatccattcccatgctctattcgttccctttctggtatgctcgacatcactacaactgttcatcgctatccgttgctggcaaccgtttgacaagaaaagttgtccaagcgagagaaaaaagagcaattgtcctaatggattgaaggagggagaaaagaggaagagagaatgaagaccgacggcatcacgtagggatggatattagcatgaaatcagggtgtgggtgttattatcatcaggagcaggcagctggagaggatacagaatggggagcatgcttgaatggaaaaggccttgaaaaaaaaagagtctgtcgaccttcagtctttttctgaacttagaaggctaacctatcaatccgggcgcattctcttctgttgtcttctttcgatgggttttgcaacgtttctttcaaacttgtagggacgagtccgcaccaaaaccgtcaagcgagcttcgcgagtgatgatcgagaagttctaccctcgactcactcttgatttccagttcgttcttgttctctttcataagctcgtaactaagggtttggagctgatcacgatcattcgcaaccaccttctatgaatcaacttgtcgctcttcgtacatctgtgaacgtattttcctcgccttcaaccgataaaatcttcaaaccgactacatcaaaaaacctactttgttcactttctcgaaaaaaactaaaaatccaacctacacaacttgcctcctgcagcaccaacaagcgaatcgccgacgaggttgccatcatcccctccaagcgacttcgaaacaagatcgctgggttcactacccacttgatgaagcgaatccagaagggacccgttcgaggtatctccttcaagcttcaggaggaggagcgagagaggaaggatcagtacgttcctgaggtctccgcccttgccgcccctgagctgggtttggaggttgaccccgacaccaaggttcgttaacaagattggaccgtggcattgatgtggtgtatgaactccacaaatcacttgaaatcgtttactgatgcttgtttgtgtcattatttctcttcttcgccatcttgcaggatcttctccgatcccttggcatggactccatcaacgtccaggtctccgctcctatctcttcctacgctgcccccgaggttcgtatttttgtctaccatatcgctccgttttagcttcttgacacgttctcattatatttccgtttcgtctcatcgttctccttatacagcgaggtccccgaggtgccggacgaggtggacgagtcgtccccggagctggccgaaactaagtgttttcttcaaccagggatatttgatgattcgctaggcttgatattacaaccaaaacaccagaagatcgcgaaaccagacagttcagatgacgaaacagaaatagagcagagcatctgttaggttcgattgacacagattgcacagctgatcgagacatgccagtattgtctgcaatagtaacgggaaatggcatgcagtggtaatagaccgatgaacatgggtctaaacgatttaaaacggtacagcgaatgaatggatggggaaacagagagagctatctccatcgtcatgcgacgcttgtgggacgtggacgcttgtctatacagtatagcaagagtccaggtgtctagaacgattataaagagagaaagagagagtgcacgaagggaagagagcccgaatgagaaaagttggggtgagcacgttcgctatggatgatgacgatcagagttcattagggaaaatcatccagttgaaatattgaccatctctcgttactcccgtcctttttcctttcctcttcaaatcgtctctgtttcttctcttatcttgactcacattttcttctatagatcatagagcccttcccgaacctacacccaaatctaaactagatggctctcccagcctctccagccaagcagccctctaagggtgcttcctccgactcggctctcaccggggctgcttccaacaagcccagccctgcatccgagagaaagcctggggataaacctatcgtgttgggaatctgctcaatggatatcaaagcccggtcgaaggcgatgagagagatcttgactagactagtagaaatcgaaggaccaggtctggatatcaagatctttggtgataaagtcattttggatgacggtttgtccggccgtttcttcctctttccttgtcgttcccaacgagtcgactgatttctctctgatctatgatcaaaacatttctgatgattatattccgttggttctcttctctcctgatctttttgaagacatccatcactggcctcagaccgatatccttatttcgttcttctcaaccgactttcctcttcccaaggccattgcctacacccagctttcgacccaaccccctccgatcgtgatcaatgatctaccgatgcaatccgttctttgggaccgtcggctcgtcctcgctattcttgatcacattggggttcctacacccagacgaatggaagtttccagagatggagggcccaaaccggagagagtcgtcaaagagaaagtcaagagggagctcggactcgagttcacagcttgggaagataaggagcagactaagaaggccgacgtgacaaaaggcgaagttgtcagaggaacggatgtctcgctcagagaggatggtgacgcaatcattgtgaatgggcaggtgatggagaaaccattcgtcgagaaggtgagaagcgttcattcgacggacgaacaaactaatctgtgcattatcttgaaaatgcacggttgtgtggggatcctcttggccttgatttaggtctgactgaaaactgagatatgttcctcccctgtccctctcctcttaccagcctgtcaacggagaagatcacaacgtgtacatttattacaaagggggaggaggtcgacgactcttccgaaaggtatatctcttctctcccctctctttcctaattgcgccaatgtggctatcttgactcattgtaatgtcatctgtcgcccatgttgtaggttggcaacaagtcaagtgaatccgatcccacgctcatggcacctcgaacggagggcagttacatctatgaagagttcatcaacgtcgaaaatggtcggtctagatcagcgatctatcggttttgtccgaagaaaggaatctaccgcccctcctgactttccatgctctgttttgtttcgtcttgcctttcatcagcggaggatattaagatctacactgtcggacctcatttctctcatgcagagacccggaagtcgcctgtcgtcgacggtctcgtccgtcgaaacaccgacggaaaggagattcggtttatcacaaagctatcggacgatgagaagtcatatgccagtcgaatctgtgatgcttttggacagatggtttgtggattcgatctgctccggtgcgaagatgaaggcggaaggagtttggtaatcgacgtaaatggatggagttttgttaaaggaaaccaggtgcgcgatcatcgtttctacaattaggattcattctccaaagacaagaaggatattaacgatgttggcgcgttcggggactcctcctggattaggcctattatgatcgagctgccgagattttatctcacgtttgcgaacgggctagaaagcgacgagctgcgctcgccaacttggccttggccgtccctaagtacagaggcttgattcctaacaagacgaatgagccgactggatcgtctagctcgacttcgactcttaaagctagtgtaactggtatgttttgttcctcacagttgaatcttgtcaggaaaaattctggatgtgtgcatgagaacaagtcttgcgaagcaggttctgaacgatatttgaaaactggtttttgctgggtttgtatagtgttccgacactctgacagaacacccaagatgaaatctaaattcaacttcaccgtaggtgaaccttgggccgccccgttcgtctctctcctccgaggctacagggaggagattgttctccgagaatccaagcagcttgatttgatcctcgctgctgctgccgagtcgattgagataggttgtccggaggatgtgatggagaaattggtcaagcttcaggacgttctgcagagaaagaaggagcttgtacgtctttccatcttcctgttctactgcgctgagtctttatgttattacatgattgacaccccgatttacctccttcttttgtcgctgatgcatacgaaatagcctggaaccaaagctcaactgaagcctactttccctaaggacaagtctgcccccaaggtcaaggagaaggatgaccacgacgacgacggttcaacgaccgaaaccgaagatcgaattcgtaaatggatcgctactggagagatgcgtaccaaccaatccgaaggtgatagtgaggtcgagaggttggaatccgttgaggaagaaccttccaacagcggtggttctggccctgggtcagtttcggacaaggcgacggctggaacagccgattccgcagatcaaagctcggtaggcttgacaagaactgtttcgagacagggatccaggagacacaaccctagcttccccgctcctcatggactggagaaagttcagctgggtacgtgctatatttcgtatgctacttgttctcgtcctgtttgctaatagattgtgaatctcatgtggttttattttcctctggctgcatagttgtcaagtggggtggtgaagtatgcatctaccttcgttgttcgcatgtgcgagtataggaactaaccagctcttctttgtctagtctactcatgcagctcgataccaatccaaggatctaggagaaaatatgaagaaggtcagatagctttctatgtgtaggcggactcattttcaagcaactaactcatctgcttctctatcacttcatgatgacaataggatatcaaaatcatgaacagcagtattttgaagaatgtcaaggtttgtgataatatttccgtcaccgaaatcgattcggcagtgttatcactaatgctgttggtaagcgggcgtttatactcatcttatagatatacacaagttccgaacggagagttatcaacaccgccgatatctttgctcgagctcttcttgacaaagaaaacatccctcccgagtcgagtcgattcttggagcggccgcctctggtggatcacttgattcagcgacgagatttgctcgatgattcgaatgcggccaagagcttaatggatggtatgtaattcacctcattcgatgtgaatccgactaaggattgagtggcttatttgatatgaattaaccatggggacacggtcaggtgtcaagaagaaattgaaaattcttcttcgaccaggagagagcgaccgaagacccggtctgtactggcccaaagagctcaagaaagagcctgttcaagtcgttagagtgagtcgctacctatcatgcgacagctagctctctcgacgtttcactgaatatataatccacgcataccatgtttacaggaagttgtagagatgatgaccgacttgagagccacattgttggccaatttccagaatcaagatgtggataaaattcaatctagatggtctgtcttctcattgagcttcataactaacttaggcgtcggaaatggactcattggaaattactctccttcggtcatgctctatatgtaatgtggggcctggcaggtgctcaggagatagccctagcctcttcaaggagcgatgggagaagctattcgaggactgggtggtaagtaatggggtttttctttcgtctttcgtctttcgtctttcgtctaaaattgattgttgctactggctgacaacgtaaacatctatgctgtcatatagggagtcaagcaggaaaaggttcgtacgcaggtttagagtagtagaagggtttgtatgctgatataagtctcttgtttctaaaaccaaataacagtttgatccttcaagggtaaggcatcttctttggtagatgtcatcgtctgtatcggagcccccaagctaaacaacgctcttgtcttctccaggtctccgagctttatgactctctcaaggtgcgcacaggaatgtctgtctgattggattcacagacgttaacatagaacacatcgctcttcacagtacgactctcttcacaaccgagtcttcctcttcgcaatctttgatcctcagtgcggtaaagacctcaatgcccctcaggatcgaaaactgcacgagctcgtagatcgggcgaagctcctatttgatctggttgctcctcaggaatatggtgtatgttcctactatttcagaggtctctatagttaacacggtctgaaattgacgccattacacttttgtgtacatctaactcagattgaacctgaggagaaagaagagatcggaatcttgacttccttacctttgcttaagaaagtcatccaggtgtgtgcatcacagttcttgactaccaagcgacttagtcatgcgatactaattgccttcgcttctgtgatataggatctggaacacgccaaagcgagtgacgagtcacatgcttctttctacttcactaaggagagccatatctatacattctgcaaccttgtccttgctgctggtcttcccatggacaagaagaaaaagattccagaactcgactatggtaagatgccaaagtccgcccctcgtgcatcaatattagcgctgatctaagctctactatctgtccacattacgaagcttcgcacatcacgtttgagctttacgagcgatcttatcccgaggagcagcgaaaggacttttcgctcagtatcgcaatctctgagggtgctcattcacctgcagtgttggactcttcggtcgacgcgagacactccctgaatgttcaagctcgaaagaagcttacttcgtaagtgatcatcttgctgtttccatcccagtcgtttttaagttataagtatcactaaataaccatcgtatgatccttctctgtctctttcatttaattatataaagtcacatcccttacgagcaggctatgactgctttgaagcgatacgagggcaaagccatccaccagaacttgagcttctcgaccacccctcttgaggtttgttctttacagtctactttgtgtttgaagaagatgaatactcaacttggtgactctcttgtgatctggttagggtgaggccatctactttgatagagatgtgaaggatgaactcgttctccctctttcctcttctagatatggagaggtcccgtcgagtgcttctagcgatagggctagtgatacatggtgatagacatagtatttatgagcatatagacctactctttggtggctcttgtcttccccagtttttctatctgtggcattatgtcccgtcttgtcaagaaattttctttccctcttttggtatcctgttactatgttcttctgaaatttcaatacatagatcaaatgtgtttatttccttcttattgtcctgatactcatattactgtatcgggctgtgaatgattgatagagcgcccacaacccttggacaaacaatcttgggaacgcttgtcatgtatcaacatttccgatcactttctcaagccatccctcttccaaaaggaaaccacttcgagtcgttcaagtacttctctacttctacccgatccccccatttaccttccatttcgcggacgaacgcgcagttcagatcatccgattcttcagccgttttgggtaaaggcatcagcccgttttggtctcttgttcgaccgggaccgatctcaccccgatcatgtttctctctgtagtccgtttgggtcttcaatttgatatcgagtccggcctcccagatgttattcatccctccatgggtatgaattctggcttggggggcagggacattcttgatcatccatgtctgtaagaagaaaagagtgttccgtgagtaagataagtcagtgctcaatagttcgattcaacaagtggcgagccaaggcaaagggggagagtcgggttaacaactcgaaaagaggtgtatggtaatcgactgacagaaaaagtctgcatgtcgttcgcttgactttcaagatcaagagttggcccgtttgccgtctaatcataaccaagggaagtagcacgcaagacatcaaatagatgatgaagagaaggaaggtaaatcaggacaattcattctggacagagatcgataataacagggaaaaaactgacgaagcttgctctaatcttcgctaattcagcctgcttaaatttctccatctctgctgctgccgccctgggaaaacaaaggcataaaagatgatatatatagatgagcctcctatttctcttctttcaaccagacaagtcaaattggtacatactttctttcaacggtctccttctccagaatgtgacttgttattgatgcggtcgttgcctgcaaagagatacaaacactattatcagttatgagaatggagacaacgtcaattcaccgctttgacttaagtataaaggaccaaccttctcgaccgctggttttaggagcgatgaatagaaactagcatccaatacaccgggttccttcttcgtcattccccctccacctgtcttttttcctgtcggacctcctttcgagcccgtcggcccacttggtcgtcctcctgcaggcgaagatcccgatgtcccggctacaggcgaggacactgccgagtttgatgatgaacctccgatcctttttaggttggttacgcgatctttctttgacgagcttgacgcaggttgagaggttgaggttgacgagccaagtttcttagttgccgttgttgaagaggaagaagacgcagagccttcaacctgtgttgatggatgcgcggatttcaatttcttgctcggcctgtctactgtgtctacacctttgtctgtacttgggtttgttgagttgctgggatcatccttgtcgtgggtcgtcgttttgagcggcaccgaagagatttcgccggataaagtcgaagttgcatgctcaatcttgtcttcggcggcccttttgctcttttttgttgattttctcctcgagccatagtcatcatcgtcggtaccgtcctcatgatcattatgggtgtcgtcgtggttctggttcaagctattttcatttccgtcgtcgtcgtcgtcgtcgtcgtcgtcgtcgtcgtccgaagagaagtgagtcgttcttgacctgatatgcttcttcctgttcttcaattcagctacttcatcttcttccatctgatctttctctcttctcctcttcttcttctcttcagactcctttgatagttctgatacagatgcatctggttttggcgtcgaggctttcggttgaagtttagtcggtttaatgttgaatggcgatcgtccgttttgagcagaatgaggttgatgaaggatggtgacatgcgttttcgtggctgaagatttcttctcaagtgatgcggatgagactaaaagttctttggaagagggatcttgatgaaaggggttgttaaagaggggaaatcgataacatcatcttgagccaatgaccaagagaaagggagaattcttagaacaagaaacatatctacaaacctcgtgtcgagcctctagagttttcgccgtttcttccgacatgcctcttcttctccttctcttcgaggagatttccttttttcgtcaagctttggctatgaggggactttgttggtgaagcagccgatccggcagaactcagaggagaagaactgcccgtgtatgcatgtttcgcttgaggtgtatatcgagaccttgatgaatgagctgctgattcaggttcagtcgaaggctttcagaacaatcgaatcatgacgtatttcatagtgtcagctacacgtttcgatacaataatcactgatggacacatatgattgagaaagaagagaaagagactgggccgagtcgaagtcttgggaataagaagggagaagaatagaaaaaggccctcaccaaatccgttagctccatccataaggatccgtcctcttctgttcctgactgaattcttaatggtgtatccttgactctttctcctctggagtccacctcgaaccattcggattgtccgctctgagtgttccgaacggagatagcatcgacactgggatggtttctaaacgacaaggtggttactttgatctgactcggcctagggtgttttccagtagtggtggccgagaaggacgacgatgatgcttgtcgtttaggtgatgaatcagcttttgaacgttccggacgagatctaacactggcagtacgagccgaagaacgagagccggccaggtgagagctcattctgtgtgtgttgagtatgttatgttttgacgatgttgtagaatgaatgtgaggaagaacggtagaaaggaatttgtcttacgtaagggtggcctcttcggacatctccgcggtaacggcatcgaacgttgttagaaggaagagcagacagaaaagatgagaagaagatcacatacaccgcccataaccacacacagaagtagaactgcagaaagagcattgattggtgtgtatctaaagcagagacgccatatagttgaaatacattctagatacaatttttatagttgaatacaatccgagagacgagaggagattgtgaaggaaccgtcttgagaacacggaaaagaaagaagaacgccggttaagaagaagaaatcaacacacaggggtgagaagcgagagacttgggaagagaaaatgagagaaaagcagggaataggagagaagaacccctaaaacagaaatgggagaataaaaaagatgcacgtgaagaccttccctccttctaaacggatttttttctatcctctaagcgttctggaaaaatggacggaagattgcatccggctctttgaacgcattgtgaacgacgttcacaaggtagtaggtgtccatgatctcaccaagcaatgactttgtcggcgaatcatcatcgtacagacctgcccattgtttgccgatcgagaaggcctcgtccttccacgcgatgaacgagattctgtatgtgttaaaaaaccgtcaagtaagtgaatttacaaacgagaatgcttgtagggtacaaaagatacacatacgcttcaacgatactaagtaattaaaatggtggtagaagaggtcaagttaattattagcccagtgttcaacattggtaccgtgttcagttgaccaaaaactcacgtaggctgaatgatctcttttccagggaacacaccccaggtgacggcgtttggtccctcactgtgggtgttggttcgaagatcaccctggtggtttacctgtttagttaggcaaaagcaagatccaacgaaggatatgaggacaagcgcgcgatacacgggtggatatcctgatacgtacagcgtagtaggtgatatgagggtctcgctcgattcgatgaacaagagcatcaagctgagatggcgagacaaagaactcgaggtaggccttttggtagacgtatccatttgtgggaccccatccgtgagtcttatcgtccgacttggcaccgtccacactatcatgtcaagagcaagaagggcttgaattcagcaaacaaaaacaaacacaatgatgtacagtcactgagacggatagagatactcacgcaggctgactgttaatagtgaggaagccaagctcattcatctttgccaactgtcggttgataatcgacgtctctttggacgcagctgaatctgaccacggaagcgatggctaaagaagagacagcaccatggctgtgagctattgctgatctggctgaataaagatagcatcaatggagtatacttaccaactcgttcatgcaaaacttagcaaacaactcgcaaacatcctgtaccgtctgcggctgaccccatagcttgatagcctcctcccgactaagtttgaactgaggcaacagatatctatggagcagaaacataagtggacggatacccagtttaatacaatgcgaggcgcgaatgttttcaaagaaaagggataatcaaagttccgaaaatacactaacccgtcaaactctccgtaggcaggcgatcgagaatctccccatcggccgttagggaactcgtcccagttctcggctttgaaaagaataggccgaacagcatgtcagtctatgcgtataaaggcaagaaacgcaaccaagaatacgtttgaaggaacgccgacaaaatacctacttcgagaaaggtaagatttttgcctgttggcccagaactaaaagcaggaaaatgacaaatggcgacaatttgagcatctgaatgcatatgagggagctcccttgaacatcaggagtgtaaagagggaacgaacaatcggtcgaatagtttcttgtcgtcgggcaggcgtaagcgactgaaagggccgtgggtaacggcaaatgagaaagtcatgcgttgagtaaatactgagagataaaagggataatataaaaaggcattaccggcgtccaaggcaaagggtttgtgtttgccactctagcaacaaggccaatctcctccaacagcattctcgctccgaccgcgaggttgagggtgtaaatgtggagacctttgattccaacatcggcgtcgaggatatcccggcacatctgagcaacgagcttagtgccgacggctcggactgccgagtcatcgtccttgacaggctcgagggcttcggtaaagtgggcgggcacagaaatattttctcggtagacccactttttgaatgttgcatacgactgaatcggcatgatacctaaggataccgaccaacatatcagtttgatttcaaaagaagcagaagcgggtgcgcacgtgcacgttaagcgaatgaaagaaggaaaaagacatggacacccaccaggcacaatgggcacggtgattccggcctttctgactctgcgcacccaggcgataaacatctcgacgtcgtagaacatctgggtgaagataaagtccgctccagcatcgaccttttctttgagccactcgatctcctgctccttctcctcttcgcttggtccagtctctgggtgagatcctgggaaggcagcaaccgagatacagaacgcatcaccatgttcctgtcggatgtatcgaacaagctcggcagcagtcttgaatccggtaggtacaggttcccaaacctgagatccggcaggagggtctcctctgagcgcaaggatgttttgacagccgaacgccttggcggtctgtttcacgtttggatcgagaacggcgttagccgactatatatgaagagcaatgatgagaacagctgtgcagccttacgttcaaagcttcatcaagcttttctttctcgactgtatgcgtaagataagaaggaaagagagtgaagaagaaagaaaaaactgtcagtcttgggagctcctgatcgagacagtcgggtaaggctagccgaaacgaaccacaagtgatgtgcatgacagtttccattccaatatgactctggcagacctggacgagagacgtcgtcagatctgagcttcttcctccagcgttcctgttgttaagagagtaagggaagaagagagagaagaacaaatgacttttcaatccccgacagttgaccgaagtgaacgtatatgagtgaaactagaccgaccatgtgatatcgaggaattctgggccgagacctttcatgcgctctatccgatcatacaagttctgaagtccctgggctgtccgaggaggaaagaactcgaatgaccacctgttttaaagaagaaaccgaggaaagaggacaagacagaaagaaaaaaagaacaaagaggagaaaacgccgattcgcgtatgaacatctagaaacgatggttcgaactcgacgtggttttggacgcaagcacgagcactcaccatgtcctgttttccttctctgcctgagcgatcttttcggtgacctttgtcattggacgtatagatatatatgtatgtgtgtatgcgagcgggtgttgagtatacaaagaagagcaaacaacggccgaagagatgagtagggaaaaaaagagttaactctcgatcggatcaattccaaattcctccacagctcaaggcgataaggtggtgccatccgagtgagcagagggcatgtggccgcgcgggtatatgtgtacgtaatcaacactgccacaacgtgcacgtgtctgttcgcgtcacgtgtgttggcacgtgacgcttgcaccgcaatcacacttactcgtccccacgtaaccgccacgtaatcgtccgctcttgcttcgcccgccgctttctatcaactcaccttctctatcgacgacaacaccgacaacttgaacaatgcctgtagaaacagagtgtcagttggatatcgtatagtatcaatgcatattcctgccggctactgattatttttgtcaagctccaataaaacagactacgatatcctcgaggtcactcctgaaggtaagcaagatgctcacctctcctaacgcgcgcatttgtttaatctaaattccttccttgcttcattcatttcccgctcttgtccagcgaccgacaccgagctcaagaaagcgtatcgaaagcttgctatcaaggtaggcatcatggatattccctcgaaaaaagctggcttgcttctttctcacctgactcttcgatcaacaatcctcttcccgctagtttcatcctggtatgtttgctcaaaagtatgtcttgggcacagcccgtcggatcgcctaacaccactctgcattcatctcctcgcccttgttcgttcagacaagaactcatcttctgatgccgagacaaagttcaaggaggtcggagaagcctatcagatcctgtctgacccagatcttcgagcaaattatgacaagtacggaaagaagcaactggtgcgttttctctttccttctcatttatctcaatcctgtatatcataattttgataacactatttctcattcttcctctcattttatcaacagggacaaccggacggaggcatgcaggacccatctgagctctttggatctcttttcggaggcgaacgttttatggacctcatcggagagattagcttgatcaaggacttcatgggtcaggccgaagtcatgatgtatgtctagcgtttttttcttatttattatccaacagatggcctcaattaattcgactgaacaatacccttgctccaggtcttcagaagaacgggctcaaatggaagccgagatgtctgggggagcagctcccaagcctgccgcctcgacttctgcggcagataccgctacttcggcggataccacgaccacccatccgtcaaccgagacgactgaaccaacccctaccttcgtgcccacatcgaatccggctgcgccaagcaacaatattccatctcctgccacccagtctcttcaacatcacctttcctccagctctggctctccagctgctccgtcttcgacgtctgcggctgctacaggaaccagcacgcctcccacgggcgattctttcaagaagagcaagaagcccacggtcactcccgagcagcagaagaagctggcagagatggaagaggcaaaggaaaaggccagggtcgagcgagtcgagctattgcaaaagaagttgatcgaccgaattagaccgttcgttaatgctaagaagccgggcgataaagacgatgaagaaacccgaaagtttatagaatccatgagaacagaggccgaagatctcaagttagagagctttggagttgaggtcggtcttcctttttccatattgtctcctcgactacaagggttacacgaccttttggaacagaactctgatagctatttttcctttccattgtatcaaaatggaatgagaacagctccttcatacgataggtaatatctatactaccaaagcaaccactttccttaagtccaaacgattcttcggtggcggattcttttctcggataaaagagaagggcagtctcgtcaaagagggttggggtgtgttgggtagcgcgatggacgtacaggccgcaatggaggagatggagaagcaacaggagaaccagactttgggtgaggaagagctagaggcgcttgcaaaggatgtcacttccaaggtatcgtcttgctttctcttcacatctgtctgcccagcgttctcatcgttgaaatgtgagatttatcggtttgcatcatttttttttcttgccttttccttcccatgaagatcttgttgactacatggcgaggaacgaagttcgaagttattcaggtcctttccgaagtgctcgacggtgtgctcaccaagaaatctggtgtttctgatgagaccctcattattcgggccaaagcaatcatcaccgtcggcgctgtattcaaagccacggaacctgacgagtcggatgaagaacgtcgagagctcgagaggtcagccttctttttctcttctgttcttctcttgttctttcccatcactatgctaatctctagaattccaatcaacttcttgtactctctcttgccttccttaggctagtcgcccaagcagcattgccttccaagaagaggaaagaagctgaaaagaaggaagcccgtctacacgccgagaaggcttgcccttctaaatcgactggtcctgctacctccacctatacaccatcaacatcttccacctccggctttgcctcttctacctacactgcaacggtaacgtcaacggcagaaggatcatcgaccaccacactagacgctcaagttgagcgagagaaggagaagataaaggaagagcgaagacggactggtggtttcggtttctgggggaaaaagtctgcttctcattcagaatcaggagacaaagaggccaagctctaatgttgaaggagaagagcactgctgcttccttctattttcttattctgtatgtctgtggatcatttctttaagaacattttcaagtccgtatataattcttatggctttcattcttaagtcaccaagaggggcaagtgccatgagagtaagactgtagaagaataacgtatgagatacattgagaatgaaagagttatgatgtattaagagggaggtataaccttttttctctttgctttgtcttcttattgatagaatccttatctatcgttaccaacaaagagaacgagaaggaagacatgctcgataaaatgcaagagttcaagaaattatatgaggtgtgtgtaaatggatgatggatggaagaaagtgaaggaaggaagaacaagaagaagaagaagagaaaagagatggggtatcgaaacgaggaagaagaaagggaagcaccagcaatagtgataatgacaacaattaaaaaagagaattggaaacggagccaaaaagaagggaagatgaaccaatcatcttttatattattaaaacaagccatcactcccgaaagcagccttcaagccaaaaggcaggtttgcagaaaaaggactcgattgaacagccgaacaagcgaattggtgtttcgtcctatacaactcgagtacgcccacataatggcaataaatggcgaggacaatgaaccaatgccagatgttgtgactcgcgcctacgaagtcaaatcgctttcaaaagtaaaagagaaattcatcaacagttggttagtattctccaccatccgacccagagaaaagagagggaagaaactcacccctggccatcgaacttccggataatgattcgcatagaaccataggcccgctagataactgccaatcatcggtgtcaatggtttgatgaatttgcctgtttgggcaagtccatggatgagagacatatgtgc

SEQ ID NO: 249 - DNA, 25727 bp, Xanthophyllomyces dendrorhous
gagagacatatgtgctatgggtcctaaagcagagagcgccatggcgaggaagaaagcaatgcggtagccctgatgccccgttgagttcaaatagaaagagagagaaatgaatataagtcaaccaaacagcaaggttgattgtggctacagaagacgcaccttgttcttgcgctcattgaaccattgcataaacggtaatgtagatccagcaatctatgacaaagattcaaagcttgtgagaaaagagatccaagacatggtgaaaaaggaagaagactgctcactccaactccgaaagttacaagtccatagaaaaccatcggtccaggctgacaatagaagccaaagtagacctagaagcgtactttgatcaatatcctttgctcacccaaggagtcggatccgacatgcatgtaataactgaggtactgacgactgtattgacgcttgcagcgatgagccaggctattccgaagtaatcctatcgggttcatcaataccagaaggaatagtttgtaatttcaatctccattcctaagaggttttcatgcataagcaggtaaatacgcacgacacaggcaaaggtaatgaagtatcgtttggttgcacaacctgcgaataagtgccaaattgacgaacagaataagcactgacaaggatgaagagaaatttgtcaattgatatggtagcaccaatagcaaagtaagctctctcaaatcagaggtatgatagatagcgatacgtactttgaaagcggccaggaggaagaagcagagaacggcggtgtccataaaagaggaggatgaggcggactcgatcgccgtgaacggcgaggagacaaagatcacgtagggaatgcagagcagaacaagtaaagaagtggtcaagtgcgaatgaatgttaactagttaattcataaaagagaaaaggggatcagcgcatgcctgaaaaaataaagaggtccacaggaaagggtggctacgtaccagtctcgttatgacatgtaaacaaactcttgaaaagcttcggccattggtctataggaatgaaccgatatcctgtgagaacaaattcgttattctgccagaggataggaaggtcatcgaatccaatgagcccattatgggcctcagccgcccgctggacggccatttctacggtgacttcgataacttccacttttgtgaggatcacctcgtcctcaaaatcgaggtccatatcgtcttcgccgtcatctcttcctttctccgacatggccctttcgctctctgctctcgaaactgactctgtggtccctcgcctagtaagttttcccttggatacaattgcttcaagctctcggtacctgttggacgttcggttagggaatgccgggaagacaagcccggattcatcatcttggtcggtctgggagatatggttgtcgtcgggaaggatagagtcgagcaaagtaagcacttgttgagcgcctatacctaatggggacgttggagaaaaagagagatccggtagccgagaagagaaagagctggaagagggcaacattgggacagatgcgtgaagatagtctagtctggaaggtaagcttgaaagaaaacttgtcagaggctgacggacgtggttggcagtggttgaagacggttgttgcagcggagtcaggtcgcgcaactggagaggagagtaatgctggaggctagggagaagtcggagagcttcttcccgaagaaactttacgtggtgtagtaggacctctgggctaatcatcgaagaagctgatcctgttcgactatgggtcttgaagaagcttggctcgtcttctgggtgatgagcatcgacatcacccataatggtgacataagtgacaagcctgcgctccagttcaccgatgtgggagagtagacttgatcggagagacgagtaggtcaggtgagacggaacggtcggcaggtcgaggtcgagagcctgaatgttaggcaaatggtatcctgtggacaaagttggaaagtatgaaaacaggccggactgaattcaaaagaagtgaaagcaacgataggttagcttaacgacggtcagttctcgttcggttgatccgggttatccccagcatttctatgggtgataaaaagggactggacaagaactcacggctgtatccgaccaagccgccgactctgactgtcctctccttcggcttttcggtctgactggttcctgaaaagtgcttgacggaagattggaggcttcgggaagagttagaggagaaggagacacgcgagaagaggttgcaaaaggagtagaggtagaaaaagaggatgcgaatggatcggactctgattctctctctgtctctaccggtgatttatcttgtgaagataatggtgatggcgatgatgatactgatacagacatgtctgtggaagagtttgaagataccgatgagctcatagaggaggaggaagagctgctagcagataccccaaacagtctagaggttggaggtcgcactgggttttaggttgaagttgatggttgttagttgatggttgttggctcatcattcgtccaaccagagttttcgtttcgtttcgtcatcgaccatcaacaacacccatccgacaacatcataaactcatggagtattcttcactattaaggtccatctggcgagatgttagatcagaggactcccctgcgcttgctctctcattgtcgttcgccatcatcgtggccctctttcgttttcgaaatactcccaacatcgtgctcgccttgagcttactctctcgttcgtactgtctgattactgagtatgttttgtgccaagggtgacgcttacctctgccttctacttcacagtgaccgaagcccttctatgctccaatccttcgttcatagaccttaccgacttcccaactgtcgttccctatctccttccgaaggcacacagagtagcctggcttctcctcttcgtcgccgcgcccgcactggttcagtcggtccttggcctggtaagcgtcgccttttgcctctctgtttcatcccatctcttctctcttcgtttctcttcccaaccgatcgaggcgctcagtcatagatggagcagtattttcatcatgcttgaaactgacaagtgttatttcttattgatcaccgaaattacgactcgaactataaaggcacttctcatccgctcaacttggcgttcgttcggtagtctagctcaggtgagggttcgagccgaacagattcgatcaaataaatcatcctcctcatccacaagatcgacagaccaagatcatgtatcgagaagggagaagaagatgaaggtgaaagagctatgataagtattgaatcaattttcatcaaatatcatgaacaaatctgtccagtcgagatcaccgaccaatacgacttttgaggggttttcttcgtgatttctggaagagaaatacgagccagctctacaaatagtgtagagagaaaagacctaagcaaaacaatgtttccttcgggtagaaaagagagtccatccaaaagaaaaaaagaagaagaaaaaaaaacaaggagagagaaaggagaagcagatgatatgactacaacggagatgtttaaaaagttcaaagatatagaaagaaagaaatcagacactcccgctcgatcactatgcgtgccatccagcgcctgttcgagagggcatcattcccatcatgaaaccactctgtgttccaaaaccttgcccctgcgcttgaccttgcatctgcatctgcatctgcccctgacccatcgttgatgttgactgtccggataacccattgacaaactgaccttgactctggctctgggtttgattcagacctggactctggctcatcatactcgatccattcattccgtttgagagagagtatgagctagtcgatgaagggcctggctgttgctgttgaaaagagaacccggttgatgagttgaacaatccatatgccgactgttgctgtccttgtatttgtgactgttgctgctgttgaagttgaatattcgggtactggccactttccatcccggttggaaacgaaccttggcttccatacgagccaccagttgacaaggagtcatagacagaggatgatgaaggtgtgggctgagactgagcgtactgattcgagaaaaactcagtagggccgttgccagtcgatcggaggtcaaaccaccccccataagattggtaagaagactgaggaggtacagcttgaggctgagactggaacgaaagctgttgttgctgctgcagttggggattctgaggagatggaaatgactgtagacctgggttctgactcccttgttgaggagctgtatactgaaaggatggttgggtgacatattggagaggtggctgtatctggtatgaagactgttgctgctgctgaaaagccgaaggaacagcatactgcagaggctggctagtcaatgaagatgtcgttccttgagttggtgctactctaccacgtctcataggttctaccccacctggatggccaacaccttgtccgtttgctggccggtgttctagcatgcttccaaataccggggcctttgctgagtctttagtcgtcatagagctcgacggcgcttgtgaaggtgttcgaacaggaagtggaggcggtgacagttcatccgcgtcgttttgatgagcgcggctcgatggatgagccgcatagagggatgatgaggaagccacagggacaggagacgattgggccggattatggcgaaaggctgcctgaacgatcgatgactttgatagtgaggtatcgtactttcggcggatatatcttgtgatgtgtatggtagataaagcatgttagcttgcatcatgagcatcactatcggtacacggaattacgtacctctcaagctcgttatccctctctccatgttcgagattggtagggggaggatttcgagaatcatcgttattgatcttcaagtttgacttgatgttgccgatatctcttattgtatcaacttgttctctggtgaacgtgctattcgagggacagggcgattgatgggatgcgttagccacaaaacaaacactctctctcttttttgaaaggcagagatgattgcttactccaatgttaaacttttgactctactgatgtgcgtctgtaagtccacggacaggagaacgatagaagcatattaggacgagcgagcgagcacatttcatctagccagcctcaaaccgtctcagaggaaaagagagtatggtataaacacgactagacttacgcccatctttcggtgcacgctcgcacagctcacacaaagaaagattcctaagttccaagagcaccatctcggagctggagatctacagtctgcacatatgtcgttctgagcatgcgagtaggcagatgagtgtattggtcagaatacatgtggattcaagatgataattattgggcatagtgagatagagggaaacgacggatgtcaagacaaaactcacgccaggcagcttggatagctcgaccaggagtcgttcgtttcttgtttttgaggccgacattgatgagatgagaagacaattggatgccagtggtgctgatgaagatgttgctagctgttgtcgctaccttgttcttcttcctcttcttcgtcgtcgtcgtcgtcggtgatgtaagcaaaagaagggagaaaaacatttggtccttaacactcgaccatcatcaacaacgaaagaccaacgagtccataatcctcgttatcttctcctctcccttctctttctcatacactcacgcacacatacaggaatgaactcgactgggtttcagggtgaagtagtccctccgttgggcctcgagcatgtgttttcctggctcactcttgcctcaacccacctgcaagccgcgttcacttcgtcagtagagtgcccttgttttgcttttccttgatccccttcctctttctctttcctcttttggttcttcatctccttgtcctcttcggccatccgctgattcataaaactgattatacattctgactcggctacagcattccgggctcggcgatcattgtgcgatacgtaaaaaactcccatcagaacgatccgtggaggacgctgctcgaactttgtctatttgcctttgcggtcaggaccgtcctgagttcacgcacccgaacggatcgaagtccaaagaactttgtcgagctcaccgataaggttggccatatcctttttcttcactgaagaatctgtggggtgtattgcgcaaacagctgattctcttctgaacggcaacaatcttaggaaatcgatgaactcgtcgtcgactggactccagaacctttggtggttgagcagcctccgacgtcaccagatgctaatctgctcggtactctgcccgttattctcggcagtgtaggacccagagtcaagctcgcatcaaacccgaacaagagtgtgatcaacatgacgagctacaactttactggcatggcagaaaacgaaaagatgaaggaaaccgcgctgacgacgcttcgcgactatggtgtcggtagttgcggtccccccggtttctggggtaccaacggttcgttctgctttcatcttttcctcctgtctttgggatacaagtgcgttcctagaaaaaggcaaatatgaaccaattactcatcaacctccccttttctcgttttagatgttcataccgctctcgaacaggatctggccgccttccttcaacttccatcggcaattatctacgctcaggctttcacatgcatcacatcggttatcccttcattcgctaaacgaggagacatcatcgtggccgatcgagcttgtaactttgctatccagcgaggacttcaaatctcgagaagcaccatccgattctacgaacacggagatatgagctcacttgaacaggttcttgagagtgtcaccagggaagccgcgaggaaaaagtctaagctgactagacggttcatcgtcacagagggtttgttcgaaaacgatggatttatcagtgatctggagaaattggtgtgtgaagctttcagttatgaacagcacttatatttccttactcatgataacatttctgtccaaatcaggtcgagctcaagaacaagtacaagtttagactgattttggacgagtcgtactcttttggaaccttgggtgacaccggacgtggcttgactgaactttgcggagtccctgtaaggatgattcgctctttttccgcttctctttttgcatttgctgacagaagttctactttcttgattaatctgctttggaaacactcgtactataaaaaggccaaggaggtagacatgctgatcggttcaatggcaaacactttaggagccggtggtggtttttgtgcaggatctaccgtggttaccgggcatcaggtgagacttttcattcattgaatcgatttttttttctttacattaatcgctgttcctccatcctttagcgtatcaattcggctgccttcgtcttctcggcctcgttacctccgatgatcgctacgaccgcttcgaccgcgatccggattcttcaatcaagtcctcaactatttgttacccttcgtcaacacggcaaacttcttcgccttacactcgacaaactagaaggaatccatatcccttctcatgcgctctctccacttgttcatgtccagctgtcaggaccggctccagttgatatggcaggtattgaacgtgaggagattatccttcaggagattgtcgaagaagctcttaatgctagcggaatcttgttgacgaggacgagaagattaagaggtcaggaaactttcgaggcgagaccgagcatcaagatagcattgagtagctcgttgacaaagaaggatatggacaaagccgtgggtggaatcaaggcagccatcgtaaaggttttgggtaagaagcgatgatccttttttccctcctttcccgaatatttcttttctttctttttacgatcttctcttcgatccaacgcatcttgtcagataaagtcttctctctattgtctacttcagatcctccattattcgaaacatacttaatatccttttaatcagcttcatttcacaatctgttgtttctcctcttctaccttcgagcatcttatctcctctttgctcctttttttcttttccttttcaaaacttgaattggtttatgtcaacatcgatattgacgtggtgtgatgggttatttacacctcatacctaggtcagattttgaaagtcggttagttgacagcaagaaaagtaaggagcatatcgaatatatatgtctacagaacagatgaaagcgctactactaagtatcaattgaaaaaggtagaaagggcgagaaagagagggtagaagggtagaagcaaatctatgcaagtctatgagaggatttaatggtttttgagaagtgtacggatgattaataggagtcgtaagatgctgtgctggatatatgacgaccgaaaagctgttagaccaagaaagaaagaaagaaagaaagaaagaaagaaagaaagataggaggaagagatggaatgtaggatgaggtaaaagattgtcaggttcaaatatcgattttgtcaagattaacacttctgccactgttgattatcagagatttaacatatcaaatgattagctctcgcagactcctagctagatgaggaagtaaagaataaagaaagaagggataagggatgaaatggtcaaagagacgtaccatcttgaggttcttcacggccaagcctcgttccttgggatcagaaggccaggttgggtaccaagtactcgtagcgttgtagaactatagacccaattccaatgtatttggtcagatctttgcatacatcagaggagaagaatgcgaaaaacagggaaaactccttacgtcataaggagctgtgagagaggtatcaatccaaggtttgtctccttcactatcagggaaccagccactcgttccaccaacagccacctcgattactaagtagaaagctatgtagaaggtagatagggtgatgaaaaaaggcgaccatcagctcatagtagggaagacaagaacaagttatgaaaccccaacgtacctcgatcgaaaggagcagagttgttgttactcttcgcccaagggttcgtcaccgttacatctgtcgaatcgttcttgaccacactggggtactgagctctatcccagaagctctcactggatagatcgtaatggattgtctgctggacccgagaatcgacgtctgcataaagcgacgcgagcgcggatagagataagatagaaaagcagagcaatgagtggctgaaggaaggatgtagaagagggtccatcgaaagtatggaggaggaactgacaagtcatgatatacttgtcggtccattccaatccgaaagttcggaatcccttgttatagtactttcgtcgttgttgctttgtgtttagaataagaaagaagtagaaggcgtaaagagtcagcgtcatcagatagtgaagataaatgcaagtattataggcaataagaggaacccacgttccaaccccaagtccagtaagttcggtcgagtgcggtccaaactccccagtgcaaagcagagctgatgtagtcgactcctcgggttgggtagctggctccatttcctctaccctgaacgatctatagtgtttgggcgttgagacaaaagttagtcgagaaaggctttctatcggcggagagaaggcctgcgacagcttgaaggaagattaaaaaacgtacatcgatctctccactagcaggccatgagccgtaatagtcctcgacgggagacatccagatactaggccaaatccagtcactgcacagggtaaaacttatcaacccaatagctccgaaagaagaatcacttcgaagcgatgtatagaaagacttacccagtgggcatctttgcttcgaactcgatctttccgtaccggatgtttttactcaactctgtagtaatccttgcgctgcgaacaggagggatgatggttcctgcggtcgagttactagtgatcagacagttcggaccagtcaaattggcagccgtgcaagcgccggtggaacctagatcgagagtgtatccgttctgaatctgggcgtcggagaggacgtcgctagtcaaagtggggacaatgtagagcacgttgtcctcaacaaatgagttttcggtagcgttggtatcccactcaaactcgccatttctgaagagaacaaaagagaggatagaacatagtagccaatactgtcagcataaacagagaagagaaaatcagagtattggacaagaccggagcgcacctgaaaccgccgactcgaaggtcatggtgccatatactggtatccaatgtgtcgaactgatcttctagcacaaggcaaattttccccatctgaggaacaactctgtaaccgtcccagcagactgattgaggaagaaattgtatgtagcagtcatccgggagatgatgaagatcaacggtcagatttgtaagaatcaaacgaaggcgctgactcatgaggaaaccccccggatgaacgatgaaaagactgacggataccaccgagacctaaaccgagagcgatgcaaccaaaaatgatgaatctggcccaaaattgcgctcggtctgggttctctacccaaggcttgtagacatctcctttaagtctggtagatttgaagaccgctcgctgattttgagtttgagtttggccagatcttccagtctgtccggacttggccgagtgcgtgtatgccttgctggctctagacgtagctgtcttggtaagacctgaaccagcggacattccagaaatgtaggactctgcgaatgagggtgcgcggccagcgagagcaacgcctggctgaacggcttgatttgaatctggtgtgtctggctgggaagacgagctctcggtgccagctaaggggtcgattccctcagagtcgatagaggtactgtcctctgtcgttccaggtgataatttcttttcagatccgaaaggatcagtattgaatgaaacgggaccagacatggtcgtggattagttggaatgagttggatatgaaagaaaggagagaaggacgaggagagaaagagggaaaagaaagttggtataggacgctagtttagaaagggcgtgaacgagcctggaataggatccaaacgaggaggggtagagatgaagaaggaaagcgcgctgacccagcagctgacggttgatatagtgtagagtgaatccgagagactgagacttttcggaaggaaagggaaggaaaagaagaagaaggaaagaaaaggaccgttgagaaaggagaaaccaaaacgtcgaaacctccaaaatgtttcgaatgattatcatgttgctctattttaaagaagccgagaccggcggtcacaacacgtgtcgcgcagtgaacttaaccatcttggacgtatgagcagaggaatcaacaaattgatgatcggtcgttatgacgatcaatccaaggaaacacaagagatgcgcagtcggtcgttgttggacgaacaagacaagcgaggaactgttttcctttagtcaagtcaacatagatcatagaacatagaacatacacagagcaatacagagaatactcagagaacacacgcaaacacatacacagcgtatactctaacacacaagccccatttgtccccacacgagagcctttgagcactgtgggattaagccacgagaactttaataagaagaaaacgatcgtcaaggctttgcctctttcttttacgttgtttccaatctaacaaatcgttttctttcaaactgtttctgatagcatggtttaaagcagaagaaaaaggctgtgtttgacgcaagaacagatgaattaggcaagcaaagcaagcattctatctaatctatcttttaacacttgacaatgccgagaaactaccttgattagtcaaacctcacttctcagaccctgcgacaactgattcaccatctgagctgaacctgacatcgagctaagtagatagacaagagatcagttatttggtcaatttctcaactgtcgaataacataaaccgcctacatacctctggattggacgagcgaccaatgaacttggtatgatctatagaatttatccttgcacatcaacttttgttgcattcaagggatgcgagaaggcaggagagaggagagaaggagaacagcactcacgtccaaaagcaacgactcgatttgacgagtctctaagttcaaccttcgtaaaccctagtgaacgacctttcgatagaacagtgctcaaaatcttgatcgtgtctccttccttccctgccgcacgcacaaaggttgcgccgatgtctgtcgagactccactcgagtgaagacctgtactagagagtgcaagagagcccattgtgtctgttgatgttacccataaaccaaacgattaattcatgtcttatatacaactatccatgggaagaagaatgtatcctatcaatggggagtaaaaatgtgatcttacctgttatcgagcaaatcgctcctccatgaagagtttttcctctgttaactaggaccgcgggtcaaatcagattgagatgttcttcaaactgtctgccttgtcgttgcctgttcttcaaactactcagacttactgccttcaggccgaatcgtcaacgatgcctcaacagaccctgggatagccgagattatcttgagctatttgttcgtattcacattacaaatagccaatggtcagtattaacaacttggatgttgctcaaacgttcaggaaaagagaagacatctctttctaccaacgtttgggagaacatgtaggtcgtgactttacaagccaattatcagtccaacaaaaagggcctgtcagccaccggctacaagtcaggcgaagaaggtatcgattcttaccctttctgagcaagatggtctagaaagacctaagacccaagataaggagagatattaaacgattgcagattcagttctatcgactcagggtataatctcgtgaaaagaagttgttttatcaccttgtttacgaatcgtttacacgccgacatacgaacaaatatgtatcagttcagttgctcttatttgccttgttcgtttctgtagaaaaatacaaaaagacgaattttatagtcagagctaaggagaaaccatcctcgtttatgtttgactgtttcgaagcattatcagtcgcaaggtaaaaactgagtttagggtatctcacaatgtatgggtgaaaaaggatgtgggaccggacaaagaaaaagaagtaggaggaaagatgtaactgatttaaacatcatcttttcaaccgatcaatatcatctcatctcatctcatctcgactcgtagcccaccgttcgcctcgatcattcagattgatgaataggctattctctctctcctcccctaggagactcattcccctcacaggaagaaacccctcgatctcatcatcttcgatatctgtccgatcattcttaatctctcgaccggcccaaacggcatttgaatctagctcactcataaaaagccaacctagatcgcttgtctcggtaaactcgctcaccccaacctcgctcacttcgggcccacatgaagagcttcctctaccgtacatcaatgaagggggtttctcttcttccaagccccaaatcgctagagatttgatgtcggtttcaaagtttacggtcgtttttgcaatgtcgatgatcttcttcagcggggtttggttcgttggctacgtgtactatctcgaaaagatcaaactcaacgctccggcatctctgtgggaacttgacaagacaatgtctcaagcagctgagtggggatgggagctcgagaacgatgattggacgggcggagtcgcgggtgggaccagtcccgagctcgggtgggatacaaggcgagcacttctctctgcgtgggcggccatcacttggggtattaaaccccaagctgtccaagacaccgatttcaccggtgaaggagaggaacatgaatccagcgcctttgcaggcgcgttcaaaggaatgatccaagccgagaaggataactttcatcggtcgttcggtcgaatgccggatgagttcaaccagggcgaacatgcggtggcagagatgtacgttctactagcgatcaagcaaagtgaaacgatgccaggagtatggttcccacccccgttggatcactcgattgataacgatcttccgcccgaggtccaaccagtttctataagaagaccaaggcctgaaaatactattggcttggttcttacccttcgacatgcccaggtccttgaacgggcgattgcgcccaaggcgctgagagcagcgaaggagctgtaccgacgggtattacacgtagtcgatggcgttcaaggtgcagagacgctcgaagctcagttagcgaggaaaatcgcagatctaggaaagttgacgggtgttccggaagaggagtctgaaagttggttgcgttggggaattcataggctcgttggcattcatccgacgattgcccctatcgacaagatctccgaagagcttatcgtctctggttctactgccgtccccgccaactcaccatggtggaagcggctgagtattctgtcctcccacaatgcagcttcggttgagcccaccgcttccttgtcaattccaaatccgtcaattgatgaaattctctctctcgcttctcaagcatgcctgcctccatctcgcacgcgcgccctacttgcgcttcttctctccctttcctccctccaatctaacccggccactcttaatcaagcccagtgcactcagacttcagttctctccttcctctcggatactttggcggcgctacctgtgtctgtatctgcaggggcattcgcatacccacctcaacaactttatcatttgaacttgaaactctaccaggcactgttctcgattcatctggccgaagttatgtatgcctctcggtcgactgccgatgaagtaaagaatcgagaggacaagcttgaattgactattcgttggttagatgccgctttccttcaagcgagtagcttggcgttcatcctcacgtctcctcctcgatcgacccttccacccacgctgcctttccttcctccgccaccttccacctcctcgaacacatctgaaaattcgatccttgctgccacactggctggcgtaggtaacaacaccagacagccaggtcttccggaagagccttccttccaattcacggataatcctgttttgcgttcaccctcttcagccctattgatatcgtcccgaaaagcagcagcttctgcagcaaacctccttggagttcttctccttcgtgaaccaggtgatctcacagtctctcgactggagaaagtcaggcgataccttgaagcagccatggcctatgaagggaagccacctccgttggatgaatccgacttggggttaggtgggaaggatgtgatcgatgacgttgaagccggtggagtttggagcaagtattataccagttggcaggctatcaggcagatggagaaggaaatgaaagaatcgacttaagaagtcgaactctttctctccatgagaacagggaatgaatggagaaaagttgtacactgttgtaattgtgtttgatatatctcaattgtagccccagggaatcttgtgctctcttcacaccaaacgtaatgaaaacagaacataagacttggactctatcgcgagcgaagagaatgaacaaggggatggggaaatgtatgtagagatggttgttcagttggaagcagaacaagatggaaagaagaaaccaaaacaaaacaaacaaaacgaaacgaaaaatctcacgtccagaccaaaggaaagcaaacacatttggagacgaacgagtgtaatcaagagataaaagagaagaaagaccccgaaaggaacggaacggaaggttgaaccctgggttttctatgtgaatgatggacgatggcagggcgagcaagactcaggaaagcgatcaggcgagaagatgaatgcgagattttatgattatcagaagatgggatgataggatgagtgacccgactggcgagaggaatcatcaaagacagaggagacgagaggtataagtatacattagggatgtgggtaaagctgagagatggtagtaggttaggcaaaagaagagtgtatatatagagagagaaaagagcgctcaaaaagaaggaggataagcagagagcaaataaaactctgaggttgctatccttgtgcaactttcgatcggatgaagcgagaaggagaaagtagtcaaagtctatggaaagaaaccgttgaaggagaactccgaattacttcttggcctgctttacacgaggcttgcccatggcatcgtatttatcctatggattgcgtcgattgatcaatccgggaaattaggtcagcaatacaatccttgtgtttcgtttatgcggacaaactgagaagagaagtacctgataattcaactctcgacggaaaagcaaaacccatggttcgggtgcatgcacttcactaaattggttgaggcagaaaaatgaggtgtcaaccggggatcatgcagacgaacccttcaaaagctggtttgacttactagtgctcccatcctagacctattcgtacagacatagaacgaggcaatcgagatatcagtaaccttctgtttgaatggagaatgtcgttgttgaacctggttgatagctgagcttgaatcttgacttactctgcatgattccaatcgacctgatgtgtcaagtaagtaccatcaagaagagggattgagaaggatttgttgtcagtccgcaatctaacgacaaccttagacaaagaaaccatgttggactctcatctgaaattgagctcaagaatagtacaaacctccactcggtctcagacaaaatccggagaactccggtgtcgcccggctcaaacattctagacagaagggaagacaaaagggggcaagaataaacgaagtataagctcaataacgtttcacgctttctgggcgactgatttcagcagtcagaaaaggaagaccataccccggtggtatcagtttgagaagctgcttgggaagaatgacatgtctgagtgtgtattgaaagacaggatcagctccctaaaattcttcagaatctatgctagatccaaacgttatagatacgaagaggagcaagcttggctgacctgtattcccactcgtcgtcctcgtctgacaggtatgttaagggttcgaaacgagggatgtcagctagttgttctcaaacaaggagacgccagaaagctccgaaagagaaactaacacttatcactatagaagatcctgaaggattgagaatcaaacgagttttagcataaagcaaacaaagaaattgagaatgtgaaaagaaaaaacacagaaaaaggagatcaggaaagaaacaaatggcgataaagacccataggacatacttttcagtgagctcctcgtatgtcgggtttttagacatgatgtttatgaccttctagagtacagactcgcgcctttaatggtgacctctaagattcgggataaagaaagcctgaagaaactgagggagctgtttgaggacaggaaggagtgccggggagaaatggataggcttagggttaactcgtctatgtgatatatcataaataaattcaagaacgttgtctaagtgattgatcctttgctgatgcctcttcgctcatgtagttcatcttatagtcgtaatgtccaccaacatagccagaagtcgaggtatgtgatcattctgaagatgttctttgtaggagcgaaccagagccagaacgacactgagatgataggaagatgatgggtaagaccgttacccagtggctgacgacacgatgctacatttattctgaatttcagccaagatgacaacaaccaaggctgacctatcgaaagaagcaacccccaaagttcagccggaaattcagccatacgagaaaccaatgaaatggtttgacggactcgtgctggtgcctggacagaatgagacaagaagtctaatagatcaagacccagatctggagaattgggattggtacctgaacgcacggttcgttatgtttctgcttgccttgctgtttctactcaattcgcgcgctccatatgagggacttaccacgtcgcttgggtatatgcgtctcgactgaatccacacagcttcaagcattttcagcagtctcttgaaaagctaaagactatatatcctggcggcttggatgagtttagctctggatatctcaagatgggacttgtagtcagtaaatcatttgggatgccattgataacaacgtacaataaatcgtgttaacgatagccgtcacggaatagttacacgatgataattcaataacatacactgaatgggctgaaggcattatcgaagcttcgctaatcggcgacttcagtaagtaggaattacaagagttcatattcctcggcccgtgactgattaagtctgatactttggtggttcttcagacgctttcaatccttccgcgcaccttctcaagcatgaaatagacgagcacaccggttcttcatactggactatccatcttcctgtcatggagaatgggcaaccacaaataccgcttggttcagaagtaaaggtgggtctgtaccttgagatttggtcaactgaagaagaactttctaggctgacacccgcgaatacagatcagaataactctgccatcgggtgaatctctggacaggttcccagcatgggtgcttcgtgcaactcaatctcagaatccacctgaagttttgttcagagcgcgaatagagcgactcccacctatatataatggtgcgcgaccactagctccccgaaccccaaagttagtgttgctcttcgagatttagacattcatggcgcgcctacgtttgtttatgcctaacattttgcgttcccatttgttgatacccctcgcaggatttatgaagctcacattggagccgctacgtccaaaccacatgctataggcacttttgaggagtttgagaagaacgtcctgtggagagttaaggccgggggatacaacacccttcaactgatgggaatcatggagcatccctattatgccgtgagtggattggcctctaaatcgatcttggaaacaggcagaacgttgatcgtcgtatgcgtgtctgctgtatcctacgtagtcctacgggtatcaagtctcttcgttctttgccgtgtcgtcgcgatttggtaagaaaccatcctagatagcttcagtctgacaataccactttttcccacatactcaagatcttcttcgttcgacaatcaggatctatcgcatccttgacatctcttattgatgcagctcacaagcaaggtatccgcgtgatcttggacgtagtccatggtcattcgtgcactaacgacatggagagtctcaacatgtaagagactatgggtttgtgtttcgatgctgaaattcttatctgactgaacgtatgttacttcttggtgaaaaggttcaacggcacaagaggaatgtacttttcggaagattcgaaaggagatcatcctatttggggaacgtaagaaccctaacgttcggacatctttttcacatcattgtttgttgattaaaagttcttaccctgttggatcagccgggtgtttaactacggacatctcgaagtccagcgctttcttatgtgggtctatctgaagtttctaataatttctacagccgatgtactaactctatacgctcaagatcaaatcttcgttactatattgaacgaataggatttgatgggtttaggtttgatagcgcatgctccaatttattcaaccatagagctgtaaaccagagctggactggaaattatggacaatacttttcgagtgatacagtacgctggatagtttctacaagactagactgtattccaatatccgccagaccgaaactgatagacacacgccttggacctttcgttgaatatctataacaggaccatgcaggcgttgaatacttcatgctagtacgtcgccatacttgctgagtttctgatgctttgtgcttatcgagcttgttccgtcttgtttcatgcctctccttcatcattcaggccaaccatatcatcgtatgctcgtttcggactgttctcagcgatgtgcaagttgtttcctgatggtttctttacctttacctctcgatcaagaaaacactcttcccttttgtgacaacaatagcagaagacacggctgggtttcccacattagctctttcaacagatatcggaggcttgggatttgactaccgtctgacactaggaccagcataccactgtgagtgctgaatcccccagcgatgaagcatacatgtaggataaaacaggagagattctaaaaggatgtttatgtgcattttacagtgtttcacttattgaagacggagccggatgatgcgaactggtctgtcagggatatcgttgcttcattgggcaataggaggctgcaattaggcgaaaaaactatagcgtttgttgaaagtcgtatgtatttataccataaatcttctttggtcgcactgccaatccgatctcttatttcgtagctgacgcaatacattttcatagatgatcaatgcatagaaggtggaaaaacgatgtctcagtggctttttgacgatgagatttatactcagatgtctgtcttccagacacctacgcccaaagtggaacggttcgtattcctctcgttcatcatcacgagagaccatttttgttgatagttctgaagaactacttgtttcttgtagagctatggctctgcataagatgcttcgactgatggtcttcgcctttgccggagagggttatatgagtgagttccgttcaacttcggtttggatatgccgccttttctgattttctggatgttcattgttgttatttctcattcaaagatttcatgggcaacgaagtaagcgttcttacaccttgttattgatatctgtatcatgttctgatccaacccgaccttcgtgtcaatccaaccgtttagttcggtcacccggaagtgtgttcctctcatcctgttcgctatttgtcccactcacccatgtactgacgatctccatttattcttctccagtggcttgttttcccctcggtccagaacggattccacaccactcactgccgtcgtcaatgggacctcgctgatttttcgcgcgatttaagatatagagatctcgcccggttcgatcgagagatgttggaggctgaagaaagaggacaatggggaagcgcggagcttggacatgtatggacacaagatgaggtacgctctccagtctttcgactttcgatacctctttctttattatatctgttcaatatgcatggagagaacaggagaggtggcttatttcttaagttcctttctgttcttgtaacaacgacgaaaacaggattcgaggttagtagttttcacgagggcaaaccacttattcatcttcaactggaacaccaagctaccagccaaagacgacaatctgccgattccggagccatgggcgcttgaaggccagtatcggatcgagctaagcaccacaagcggagtagctggggcagttgtgaatgatctgaacaaggtccgttcgatctctatcgttcgaatccgcttttgcccagagactgattgttgtcgtgttcatgttctcctatgtactcttcgttccctatccagctcattctccaaccaagatcggcagtcgtcatatccacgttgatggaactctcagcataattagggaagaataaaatgacgattgacgtctcggagattcagagactggagtaaaaaagagaaacagttcatgtatcctcctcatagtcccgatgccatctcagattgtttttgaaatctgtccatgtcggccagatctaaagtagaagtatgagccgttataaagacttggttaacttctcaagtagcgcacgagacaagagtagttaggggagggaataggaaaacaagttagacttactcggccttctaccctggccaatattaatgccatcggtactggcccataatcccttgaatctgttgagttactcaaattgtctccctgaagccagacatgacctttcggcactctcacccagccctttccaccatccttcccggacaccgctcttaggtttcctggatcgacctcaacagtatctccttccattgcgatgattcgtttgcctaccgttcggtctggaaggtagggatgtgtagcgataacgaggtccccacgttggaaaggggcgcaaagaaatgatgtagaggggtagtaagggagccgggaatagtagatccaatcaccttgaggggcgagggtaggtagcatggattctcctttacattcttgtataaatcctattcgatcggtgattaagtgaagaatgcatgcactctgcgacaagacattattataagagaggaccagatgaaaagcggaaaggagcaaacgttagaggttgacatccaactttcagcagaggcgttcaaaagagagacctacctggacggtgacgatactagcctggaacaagagccgactttgaacgtataacttctcgccaactctccgaaagaaagtcatcttctatgagcaagaatagatgggtttgtaccgcgcgtgtatactagaggatcacaggataggatggatgggttgtctgatgttatatcggttggtgtgaatgtgtagaggcagaatcatctggcggatacttgttccttcttctttctacgtcctcgaccaacccatcatcgataatctctgctttactcccaacgatggctccgctagcccctcccaagccagcccatccgccacccgcgaactggccctctgatatccactatctgactgctcctttctattcaaacctacctccggaagtcacagcgttcgtccggtcgaaacaaccgccccctgtacataagccgaatgacagagttgttattcagtcagtcatgttccattctatcctatctatcatgacactcttgtctttccatagatctagcccactagatgtttctctctgactagcttgaacggtgactgacgtatacttcaagggatgcgtgtgtcgatcccataaaggttgatcaacaaccctgctcaccccgctcatggtcaacgggggctttttgcaaagaaaaagctagaaaaaggagaactcatcgcttggttcatatcaatagtttgattcaatcaaacatctaggacatgcatgctcatttttcatcttatctgtatcctaaacgcttaatctcttggtaggtatacaggtcatgttcacctcgacccagaatctgatcctgcccgacgtgaacaacgagagaagtctgattatgacctcacgctcattccaaaactgtctaccttgcgtcctctgacatcaactcctgaaccctggtccgacctaggcgtcgccgttgatgcttctcaatacggaaacgagtctcggatgtgcaatgactttcgaggcgtacccgtgcctgctgatgcagttcctcaacgaaactcgaaaggaaagctagtcgctcctaaaagcaagccaaatgcgttcttctactcggtacgaacaacgacattgacgactccaaaggtgcttaacccagacttgattacgccggtagagagaatgaatgcgccgaaaggagagttacgtatgggaatctttgtgttgtctcccgagggcattgccaagggggaagagatcttgatcaggtcagtcttgattcatagtttcgatagatggtcattctgctcgctcagtttttgtgtgtgtatgttctcgatgggaattcgaacggcctgcatctcttctcctgtattctctttccctcgctattcctcgcctttaccggttccttcaagggagacagttatggaaagagcttctggtcatctcgaatacaaaacttggagggatagatgtacatgttatatgaaacaagagtcaagcagtaaaagattatatgcgcatacactcaacataaggacacggagattaattagaaaagcctgtattgattttgagaaacatgactatgaacgatcgtagtcgaagtcgtagtcggagattaaaatttcaacacgctcaaacctgaccgacaccaactcatttgcctctccaccttctcattttctctcacactttttttcttactcaaaaaagaacgattccctcgaaagatggccggtaaacgtaaggccgaggctcagggaagctcagatgtcaaggtaagtgcaggaaccttttcaagagatacagcttgtatattgaaccacgatcctgatcctgatttatggatataacgttattatgacctgcagcgagctacaaaatcaaagcctacctcggatgatgaggatgactttatctcagacgatggacaagatcccatgctctctgccatcgatattgccgatgatggcgaggattctgggagttctgaaggagaggccgatctaattgatgatgaggccgaggaatcagctatggacgacgaggaggaagaggttgaggaagaagagggttctatggaggatgtagaagctaataccgctcaagcttacggccaaaagaagggaagctccctttacaaagctcctacaaacgaggagatgcagagtacgtctagatcaagctttctcggtgcttggtttctctgtaagactaatatgagctctttcttacagccttgaaatcgggatcaactctgtacaagtccaacttgtttagtatgcaactcgacctacttcttccttcccttcgacctcttcccgtgtccatgcatcctgctcctgccgctctttccgccttgacgtcgaccttacagtcccttcgaccttttctcctcgccttgcctgccttggcaaccacgacccctcaagcgtctctcaagcagtaccccgacctgccctatcctaattctggaccagctgaggactctaactggaagatgactttcgttcctcccaaagaagtacagatcgtaggcgactgggccctcgagacagtctcatcttccaaagcttccaagaagggaaaggggaaagagggcgcggttgacatggcgctcatgatgcctgaggagtactttcaggaaaaggacttcctcaacggaaggtttttcttcaaacagatttactggctcggtgtgattggaaaggcacttagcgatcagaccgaaaaactaggactcggggctgtcgaatggagcgtaactgatggaagcgactggaagccagttttagttctgaaatcgaagcagggtaagcagacaggatttatgatggagacatggttcggagtttctcagaggctgattttgccttcgggcccgtgtcttgatgttactagacaaatctgcaaaagacttttccaaactcaaccttgttattacccttcatcccaccattcctacgtccctctttcctgcaaccaagctctcgccttcccgaaacaaccttcgacctcccccctcttcagccgccccaccacctcccactcctcattataatgctc

SEQ ID NO: 250 - DNA, 12020 bp, Xanthophyllomyces dendrorhous
tcattataatgctcagattctttcttccacccttcctgctcaacatctcgtctatctgcatcatctctcacttgctctgcctgcttacaaggatgcatctctcatgctccagctttggggtcgacagcgaggatttggagccgagatcccttggcaaggctatggtggttggagcgggtggtgtcagatggtgatgggcttgcttgtttttggtggaaacaacgagaagggtaagaaagagagcggaaaaagactcggtcgaggcatgtcctcctaccaagtcttcagaggtgttctcgactttttcacaaagaggagctttttcacccagcccgttttcctgcacactcaacccaacgcagcgccctcagctgagaaaaagatcccgacagaagactggatgatctctggattattcgacgctgtatttgtggatccaacggggagtgttaatttattgagcggggttgagagaggtgtgcttgagattttgggacaggaggctaagggaacgttggagctgctggatgaggatgactacggagaggagaaggaggaggtatttgatagcgtgttcttgaggaaggctactggaggggagagaagattcgatctcgtgttcaggtatgtttcctcctttcttatgccgtacacttctgtacttcataacattgtttctcatttaattgcccataaatcaactagaatcgacatttcatctgctaagccgctcttgcagcctgcacttgcccgcctcgaccagccctcccgtactgctcatctgatgacgtctgtgtcatctgttgtaagacgtgcacttaacactcgagctaagtgtgtcgtctctcagaaggccgttccttcaacgacgacgagtagatggactttcggatcccccaagccgactcccgcccccgagtctcaggtcattgagcttggcatcattcttgatcagagagaggccgctcgattagtcgaccacggaccttcggctgaagagcctgaggcatcccaagagttcagagacttctggggagataaatccgagttgaggcgattcaaggacgggcggatattggagagtgtggtttgggaggtcggacctgctccagaggagagaagtttgatcgttggacgatccgttcgatatattcttaaccgacactttggtcttgatgcggatgagattccaatcgagagcctagccgcctaccttcccctcctgcgattaccagcctcggccaccaacttgttgtccaccgacgcttcatccgaaggattcaggccagctatagacgcgtacaaccagcttaccaagactctgaaagctatggaagatcttcctctttcgttactcaatatcttccctgtcgcggagggccttcgatactcttcggttttccctccgctgccgattgataccgaccggttttcacttgctccagattgcctcaagtacatcgagccactggatgtcgtcattcagtttgagtcatctggccgatggccagatgacctgacggccatccagaagatcaagttggcgttctttgaaaagattgctaagcagtttagggatcgactccgagggtgcatcgtgtctgtggcaatggacgaaattgacgatgctgaagaagccgtgattgaggataactgctcgttagaaatcttcgtcccttctgggtacgctttcagacttcgaattcatcacgatcgagaacggttcctgttggagcagatgattgcagataaaaaatcaacaaacccgcatatccgacgggttgcccaaaaggctttggatattcatcattctcgattcacctacctcccccgacaccactccgccatggccgccttacatcacttgtatccctccttttcgacgaccgttcgactcactaagcgatggttcgcatcgcatatgctttcctcccacgtttcggctcagatgatcgaactcatctgcgcgcatgtttacctcaagcctccgccttacagaacgcctgcttctccctccgctggctttgcccgagtcgtaggattgctttcgacttggaaatggaagtccgttcctctgtttgtgcctctctattcagcagctgggatggaggccggtcaaaaggtagtgttccccaaagaaaagggggcactgataactgagaaattcaagaggtttagagctactgatcctatgatctctcatggagcattcgttgttgctaccgaggaggacttatcaggaagagttttcggagcttcgagtcctacgaggttggttgcaggtagaatcacccagttggccaaggcaaccattctatgtttggaacctcaagatcaggttgagccgctgaacgtccttcacgttttcaagactcctacttccgactataacttccttatccatctcaaacctgccgttctcccccgtctgtcgcaagcattagagcccaaccaggccgcttgggcgtcaaagtacaagaacttatcgacattgcaggcttctagctcgacgtatggtagagagcttcgactccaattcgatcctgttcagctcttcattcgtgatcttcgaacgatttacggagagacattcgttctcttccaagattctctcggtggttcagtgatcggtgggatctggaaccctactcttcaagagcctcgaaactttaagatccaaactggattctctggccgacctgtcgcgagagaagggggcgacaagaagagccagatgatcaggttgaacgaggctggcgttgtagcggagattgagaggctaggagagggcttggttgagcgtgttcaatttgaagcgtgagcttcgaatataagatagatttaatgaactctttttctcaaaaagaggtggtcctgctctcgttttaagcgagcgcaatcttaaaaaagagaaatatcaacttgaactacatgcaaataacataacataatgaggatagaaaactagtcgatgacctgacagatcgaagaaagttaagtacaagcgacgcctggtcgcgttgaaactacgaagattgaaggcgtagcaaacaatgtgtgaatcctacataatctcccaacgctggtttcccaagctgattaatcgattgaaaagctcatctcttctaaccactccaaacttgtatgtaacctagagaagagagaaaaagcaagaaagatcagagactgcatctattgactaaatcctaggaaggtgacaaaagggatgacttcacctcttcttcgattttcctacccacctccgaatggtcatgaccttccacacctgactcagaactggcactccttcttatcgtcagctctagtccagctccaccaacaccttgaatacctacaacccagcccaccagcatccgaccctgccagcctcccattccaaatcgtctgatggccgttaggtcgtttgctgaaatagtcaaagcaggaagcggcggtggttttactttctttgctttctttttttcttcctcctctttcatgagtttagagagattatcatggggagtgggattgtgtgatgtattgactggtaaggaaggaacgggttcggtcgtgacggatgtaaatgtaatgtcggaaccatcaatccgaatccagcctggacgtcctgaacgagtggccaaaaatgctgagaccacagaaattcaacaagaacagaagttcatgattagtgagcatgagaattagaaatgactggaaagcgaaacatgttcaagagaaagagcgaacagcagggcccttccttgtcttgcttgaccggcataatcgagagtagcgtccgtgcggcctgattatcaggtgaaatattgagcttttccaaagcagcctattttccgtcgatacgatcttgatcagcttgttcataggtggatattgacaacaagatgtacacttaccatggatattttattccagtttagcttcttctctccgctgtaatatccagcgctctagtcatcaggaaaatataagtattacaaaaaaaaaaaaggtcaggaaccccataatcctcgagcttcggattaaagaagcatgtctaaaaagtacagcccggattacatacttcttctgtgagccttgctgtagccttcaagaacgaagaaattctattcctcccatcgggtttcttctcaacaaccgctgcctctttgctgtttgccgtttcaaattttacatcgagctcgttttcgcgctctaaagaactggagataaaatcaccgtctgatccatccatcttgagttcatgaaccgaacgtgaatctgacattgaagaactcggagggatcgtagaggaaggagcgggtcgaggaggggggataggggtttgtttaagctcagcttcacgcaggaggcggagagctagttgagcatccgtagggcagcctgctaggactccactgagagtgtcgcgcaaaaatagcaagagtttcagtccattgccgaattctcttggcacaaactcagattgaagatcatactttcgaagttcaatcttctcttgccagccaggaagatgctcattgagaaggataacaagttggtccaaggccggttgaccaaagaagcaaattccaacgagagctgaggtaacccgagagagcacgtagtctgagagaacagtggcgacaacttaacatgcatgatagaatcaattcgatgatcaatttttacttcttggtggatctgcccagctcagataggataactagagaggagacttgggactcaactaatgagaggaagaagtatcgtaagaaagatccgcgttgatccttcatgagcggagaaaggcggggttgggcttaacgcactattgtgcaaaatttcccgttcgcaagctaagttagatgaactgtatctgcgagaatcatggagaagagactgtgcgcactttgcccaacgctcccatccatcggctaaatcaccgcagatcatcatcactggtcgcccaatcttctcgattggctttttcttctgagtttttttactcgtagacatttcgatccggttctcctgtggcttcttttcctttggatcatccgaaggcctttcttctcgagcttccgtcgcctcctgtgtctgttcagcatctacaccaccttcttcttcgtcttgggcccacgaaggtttaagacctacttccgctaattcctcaagatctgttgcgaactgagatgcttgagcctccacttgctcttcttgggtcatcccggggacgaagatagttgagggtgtcttcgtggatatcgtttgagagggtatatctgggagtgggaaaagaagacaccgggctgaaggaaagaggactaagatagaaacgaagaagagtagagaggctgtgaccagatggatggaccatgccatcatgtatatctatttatccgaggaaacaaagaaaagaggatgattaatggataacgaatgaggttgccaggtggaactgtacacagaagtccttacagccaaaaatgtccctgtccgaagaacattttcccagcttctcaatctgatcatttcagaaacaactcggatggatccaataataacagtgctatacagcctttcaacgtttgatcgaagtttctccggggcgaattcttcttctggcgagggctgaaggtcgagcagaggtgatatagatgatatccgaggcgaacgactgggaactacttttacccatgggatttgctgataggtagaaggcgtgtcaaccagcccctgataagtctactctaagccagaaacacctgatgacaaaccttatcgaacctcctgagcaatacatcgacctgctcgtttgtcataccttctacaaactgtttttcctgagattttttaggcagaaagattggttcagcttgcttgcgtggaggcaaaggcggaggtactgctctcgatgtcgacgatgggcgagaagggtgcacagatccaacgggctttacgcaaggattcatggtaggatcgcgctataaagagttagagtgtacgagaattcgagcaagtggaagcgagaaatcaagatggatagatagaatgtgatgtttcaatcagcccttggttgaacattatcaaacgtcatcagaatcacacagctttaatcatgtaatcacgtgtttctatcaatcatcttacaagcaatcagttcacttttaaatctcgtcctgtatgtccgaatgatacatcatcatatcttcattgtgaagcctgttcataataacagctcagacatcaacatatccacctagcgcgacacctttagtctcatctgaaaaagtctggctggaaagggagacttatcagagtgtatggctatcaagctctcgaagcacaaatataagatccgtgaagaacttgaaatattgttgccactgaggttttgatcgtgatgtactcagggtttatgttatgtcttgtaactgatagcgagcgtttttgctgagattttatggcaccatgagggcaacatgagacgaccaaggtgagcgcgaggaaagaagagtgagagaataattgagaatcatacaaacattatacgtctacttattctctgttttcaagttttgtacgtttggccaacaatcctttttcaaagatttcacgccgatgaacgctaagacggcggcgatacccgctaaaaggatccaaaccggtgctttgacggcaacctctctgctaggaaagatagagagagaatgtattgggtgctctgaattgaagaatggctgcaaatatatatccttgtcattcagatgtgcctatgggccgagcagaggaaagatggcaagcatacagtgacgagtgtccagatagtgtaccaaatgagacccaagctcgtgaagagtagaagtccggctcctatagatttatcagagatcatctgaacagatacaatagacgagaaatgtaagcaagttatccttttgtatatctcaaagataacagagctactcactacgttgattgatggttaagaagaaactaggaggaagaaagaccataggagacaatactaaaacggtcacgtgatcccattccatcagcgctcaccccaaatcctcctttggccctcactgaccatcacacccacaacttacacaaccaacgctcgaacctctatcgatgtcggactcgtctcaactggttcacctgctatcctcgctggcaaatcctagctctcctcaggagttgaccagtctcactgaacttcttcaatcaacctatcagaccacaggtttgttcatgcatatccaatacaagccgtcccttttggttgatgctctctgacagcctctgacttgcgctctcaatacgtaggggttttcaatcaattacaccaggtcgctctaaatgaatcagtacctagagacgctcgtgtactggcctcgctggtcatgaagaatgaaatggttactaggtggagagttaagatgtgagcacgactgttacctactaagctgttagcctcacctaaccaagtcctttttatcaagcgctgggattaatgactgtatgctaatggacagcttgctgcgttgcttggctgatttctgaagcattatacctgaagaagataagcaaaatattcgagccagattcttccaattcttgacagaacccgatgtgaccgttcgttcagcatttggtcagccttggtattctgttttcaacatcgagtctcactctgtcgttttctctttataccgatgtttgatctatacagatatcccaaatgcaattctggacgatgtccaagatctctcgtcttgactatcctcgttcatggtcagcctaccctccattcttctccaatcgtgggaatcaatctcatcattttttccaatcaaatctgtatatcgcaggccagatttgatgcagaccctgaagcaacatctcctgcaggctgctcatgctcggttctcctctacatcctcttccacggaccgatcgactctacgcaacactctttggcttctcaatcgaataataaaagaatgggtcactgtccggctaccaatcggtacaaagtccatgggcgagtttcttcaattactactaccagtattgattccgctgttggattcacttgtcacgctaccgcgagaagtggaggggtcagaggactcggagtctgctatgctctgcttcaagctcgtcgcaaggttaatagggtgggagtgggcgagaccggcctctactcatactactgagtcggaacaacgcgtccgttcaactttcatctctttctagcaaacgcatgcatacaaacataaattgactttttttccgtttcctactcaaatcacccttctcttttgttattgctaatttgtaacgatagtttgccggagtattctctacatcaattcagcacttgacaaacttaatggagactaggaacgcgttgatcgcacatctagtatctgctactggtaatgcgactctcgccgcgcgcgcggtgctcaagaaccttacgaggcatgtcggcagcatcatcaaattcttcaaggtcagttctctcccaattttgtctttttcgaaaagacaggatgaaggttgacgtatgtacatatattgacaagatacgactgtaactttctgcagacactagaggagcataaccccaaaggatttgtctcactcccttctgcaaacgagatcgtgatttacctttggaagcaacttaaggcagagcttgactcggaagacttttctaatgaggatcaggaatcctctagattccctacaaagttcaaaatcctctcgttgttactttataagaatatcttacccatttgggctacaagttctccccctggtgagattactcatatacgctctccgtgtttcttgagccaatcgagtagattgtcgttagacgagagattcggatcattagactgatggtttctattttggactcacccgcgttttctgtactcgctagttctcgacggagcactcattacagagacattcaacgttcttgtcgtgaagattttaccattatcggtgcttgatctagagactctggcggatgagcctgaagaatggtgtgtcaatgaaacggctgggaatgagcaatggacttatgatcttagagtgagcttttcgattcagaaatatatccgtttaaatcagttgttctaaatatgtgattcgttgtagccatgcggagagagagtccttctagcatgtgaggcgacgaacatcagtgctatctcttatctactttcatctcgtactgatcgaataacctgtttacagtaaataacgcctgccgcaacagagaagatagattgatggataggttgatgcaagacactcttgctcaatcaatgtgtaagtacatcgtctcgatattttatcagttcagatacataggcctttctcatcatcctcgtcttattaatttgtctgtcaatgtttttcttcctcattttagcaacacctattacggacgaactctcactccgacgcaaagaggcagtttatgccgccgctggccgattggcacgttcgcttgtccacaacccgaatactcctccaactcagtttatcctcgctctgacagaagaatgtaaagcacctggaccagaataccgagtgttgaaacgacgagtggcttggttgatcggagagtgagttttgtccttgcaataacgtttctcttgtctgtttatttaccgccagtaatccttccgggcgaataatctacatacagattggttgatgctgaggaagagctcgctcaaggctccttgatctgggagcttttgatcggtctgatttccgaccgaagtgaaggatctgatattggtgtccgacttacggccgctacttcccttaaacaagccatggatgtatgtacattctattttgatttgttggcatgtgtatggtagatggtgaaactgacatcatatggttcgagaacgtcaacacagctttgggaactagattccaattgtttcactcaatacgttcgttgatgcgtaccttgttgcatctttttattcagcgacaggtctcactgatgaattgaaacgaaatacaaaacaaaaacacatatcagatctctcaaatcgcggatggtttgttcacactcttaggagaacttgagcttcttgaaggaagacgtcgtgttattggatccttagaagtcagtcctcattttacatttgatatcctattatgtttgattgatcgacgaaaccaaccggtcttaacgaatcaaacaggtccttatagagcgtgtcgggttagaaattgttccgtacattgatcggatttctcaagcgataccgactctttggtcggatgcttcaagtcaagaaggacaatggttgttcaaatcatccttgctgacactcatcacaaagctagtcgaagtaagttcttggtggactcgtcttcactgtatgtgcggctttgactctggtcaatccataccatttcttctctcttgaaaattcgttgttcttagtctgcaaaaaccaattcgagtaggctctcgacgctctgcatccaactccttggtgaatcacttcgaggtggagtaagtctttccttcctcttttcctttgtatcttaaggttgtctgaggcttatgatgaatttgtcggtggtatcgatgttgtaataggcaaaagttcaactagaagaggacgccatgttgctctggcaagcctggcttcgaaacacctccacacttgatgcggagctcatacagctggtgcccgcagcaattgaacagctcactgtcagtcgagaccaagttgagaagggtttaggaatcttggattcttatatgcttcttgacggacagcgtatatatcaggtaaagaacgtcattttcttgcgttcctggtgcttgcttatcggaagttagagtataacaatgatgacaagctatgtgttgcctttccatgggcatataccttctacaggagtttgccgtccctatatgcgccgtcttcaaagacatcatcatgacctcaacacctgcggatgtgctcaacgtgctatcaagtctagcaatccatgtacagatagcctctgcatctttctgggcggtagggatgaacaacaccggtccgtcttcacatcttcactctaggtagaatctgattactcacactgttgttcgtctgtcagccctcttcactgctttgttcaaaggagcaacggccaagaacgttggaaacgcgcttccctattacacaaacgtctttgccgagatgattctccgggcttctacaagtaaggactccgatggtcagccaaaccaagctgaattcttcacattagccgagatgagcggagtgtcgaaagctcaatttctggacttctggtgggattcggtaagtcatcttgatatgaaagatctgtcggtcagaatctgacaagttgagcgagttaagaactaattctcgtcaatctcatacagttcgatcggattgctaggtcgtccattcgaaagcgtgttgcacttgcttctgctgctctttgtccatccggcgatcctgacattctttctcgattccgaggagagtttgtcaatttgtttttagatgtcctaggagaacttaaaggtaggccactttcttctctatctaaatatatgctcgaacagttcattgatagatatttggggttggttctagaaacggagttagacggagccatagactcgtcggtttcggctttggatcttcattggaaacggggaactgaagctccgacgttgggtgatgccgagggtacggccgaaggagttcgtttgcaagctgtgcgtttgtctcccttattctggttttgaagggttctccgctactacatatctatagtttgtctagaatgactgacaattcagaaaacttgcattttggcagctgttcaacctagatccagtttacacagccagtctcaaaggttatgtgagggaaaagttggccgagacgcctcgtctagccgaatacgtcgatatccaagagtatgtt

SEQ ID NO: 251 - DNA, 15886 bp, Xanthophyllomyces dendrorhous
atccaagagtatgtttctgttcctcacctgattattcttgcaattgcttcgtttctacttcatgataggtttgagactgactagtaaccctttatacagccctgctttcatcgaattacaggcatatctcgcttcgtgaacacccttggatggttttccttgtaaacaagatactattttattttactcggcctgatagtcgtgttcattgcccaaagccttttatgaaaccgtgaacatctcttcgagaatcatttgccttaagcggctgattggacgatgaatcgagaacatagatgtcttcttcgacaaatctaaaccggccatcgtaggtgactagcaggattgtcaatgagcgggttccgtaccagcgaggttgactattaggtgttgatggtaatctgagtggaggaatcgttacagaatgcttgaatgttgacctgtcgatcgttgggacactagggctatttcaaaaagagagcacatatccgtgatggtctcacgatattgagatttcatatgcgctgaaagagttataggaggcagatgaaactgaattctgagacgtacctcatcaatgtccggaggttttcaatccaatcttcgtcaccccattttctaccctcatcctcttcttttctcaagagctgttccatctcatgtttcacataattcaccttcacccacgggtcatctatcaccgagttacttagcgctccaatccccagagttcgatcggatacgtctttccatgcttcttcgagcctgtttgaaaaatatccgagctgagcgcgctgatggccacaactagtttcggttgaattgagagtttcaggtgaactctcggatgtgggcgggaagaggtcgaacagaagtagattaaatcctccatatgattgagcactgggagccaaggaagaaatataatcacgtggcctcgaagtaagaaaagatggttgtgaagaaccagaagaggaaattgattgattatttaggtaggaagtgacgagcgttcctctggtggacgggtagggggtctccgggctgggctctgtgaaatttgttctgaatcagtttgatcagagtcgctgtggtcagacgtgagcgagacatatggaaccaaagaacgttttcgtcttgatgaaactcacaagattcccacttgaccagttttgatactcattcccaaccatgttcctcccccaacggtatccaagccgcaaaggatatttccgtctttctctgatgatgctttgagatcgtcaaatctgtaatttgcttgttctgtgggctagagacctggaaggtttaggatcacatactgtcgtaatcgttgatttacgaaatggtcaaataattgcttactcgatgaagaaactcatcccggttattagccaagatgctgaagaatagtatagaagagctccgggctgtgtaaacaatcaatcgtttctggaggtgtggtagttggtaagcgtatacgtgttcctactcacagtttgtatacaggatgagcatccacatcgtatacaacaatacacattgttgaagtcttcgtagatggaggtaggcgagtggttgatctaagttgtcaaggagatgacgtggggcgatgaaacttggaggttggcaaaatcacctctgcagtttcgagagatcaattatacctctcgttcactcatctgccctgaatcatacatttgacccatctgtacatctaacttaactcatgaattctagagcatacaacgaaaccgtcgagttaacagacagagagctcgttggatctaacggcggtgcgtgaaacttgtatgttgttgggtcattgataacccctgattgactcgattaattgatgaattcatttagccatcaggatcctttaccaattcaagcccgcgactactgtgttggatctgtcgcataaccacttgctgggtcatgatggtcttcgatctctgatagatggaatggaagagctctttgtggttaacgagaaacaacccgagtgggcattgaaggagttaagcttggtaaattgtggattaggaggaaacggtgaagatgtcttgttcatttgtgaatgttgatcaatgtatgatgctgattctcttcttgtctcatattggcttgtgcttcgatcgctatgttatagcgaccaatctttctctcatacagctcgctagacttctcagcttgatcccttcacttgagctgttgaatttgacaaacaatgatctcaatgacctccctgctcccttactggactcgatcatgagccatccatcccttcagaccctacatctctcaaccaatcctcaacttggtctctcatttcgtccaggaactcgttgtgcaatctataaactcctcagccggctgattgatacggcttcgaccagcactctgacgattcggagattgtcattgaacgacacagagatccctgccgaatcgtgcggaccactccttgagcggcttatttccctcggttctcgtggcttggaggcacttacgttaaatatgaatccctcacttgaacggtattcgcctgtcgaccaagatacctcgttcgttgactcacgtctccttcgaacacttgtgcggatcgtttcggaaaaaaatcgattcattcagaggtttgagatctttggatgctcatctggtctatcggagtttttacaagtaggtctattacctacacttgagcttgcgctcgaacgaaacaagaccttcttgaaggaaacaagacagacagctctgaatgtcttgagagtcggtcgcatcgtccttctcggttcgatgccgtcttcaatcgagaagagccgtcagggtagatttccaatattggatcttcctccagagctcattcaaccgattctatcttccatgattcctggcgccctgtcggaacatcaggtcagggctgttctccggtgggcaagtgacaggcggacattggtggggttctctagacggaggagcagcctgcgcgtggacacagagattgagaaatttaagttcctcaaagcagtgggttgttactattacgactgttgatcctcatcaaggagatagactatgactcgcaggattttatgtataatacagatttatggatgcccgttgtaaattcttgtttgtgtcttgcaagacgtttcttcaagtttacattcaatctggtatcaatacagcaactagaatgaactatagaagttaacatttttagatctggatgagcttggcgagcgctccggaggacttcgccttgctgaggtcctgttatgatgatgatataaagaagagaaggatgagatcaaggtgcatgctgatttagatctatcaaggaagagatagccaagaattgagaaacttacgtcagaaccaccaacatgctttccctgaatgctgtcgaagagaaaatcaaatattgaattggttgatcagtcatttgtcagacaagtttagtctctgcttggtttaagaggaaagaaacgaacaagatgttaggaacagttcgctgtccggtcttctcagcgaggtagttctggatgtcggctccgttgtcaagctcgtcaagtctagaaaggagaaaagaggagaatcagatagagattagtgacttatgttttgatcaagccagatctggttcgacagactcggcttactcgaaaaccttgatgctctttccctcgggaagagaaagctcgttcaacagagctttggcctttcggcagtaagctagatcggggaagatgagaaaaaaaaggtattggtaagcgagattgactagcacgaagacgagaatagactcacggcagtaagactttgagaacacagcgatgaaatggctagagatagcagtatcgacgagttgcttaacggcggcagacatattgatcaagtgagcggatgagtgatgtgggtgaagtttagaaaggtagatggacgttgtaggacagaaagagaaacagatcagatgtaaaagcgaggatgatgatgtaacggattgcacgtgatgacgacaaactgacgtgccggcgttgttatttgtggttacgattctattctctgtatcggacacttcctaataatactagtcaacatcaccatcatggaagccttcagatcatctctcgtgtaagtgacaatcctgtgttcagagaaaaggtagtctcgtgttgtgattaactgactgatggcctgcaaaaatccacaggacggtatgggtctcatcgcctgaaactcactcagagcgaaagttcgacctcgagttaaccattgctcaactcaaggtcggtcgactccgtcgagaaatcactatgcatctgatcaaaaatccctgatacaaacgccctgctgatgacgattctgccttacagggaaaacttgaacttatcaccggaattccatatgactatcaaagtctatcactcctacgatcggatgaaggcgagcttgtgagaagtttagaaggaaacgaccaaaataccttgggaagctttggagtcgtcggtgagctatcggaagatatggtcatctatttatgttcatgcctactgacttgagatgtttctgtcgtttttcacagattggaattgcatcaaggtcagatacatgaaaaatgacttcaccatttctctggcccacctcgcgcaatcttgatacatacatgggctgaaatttgtatcttgataactgcctcaaggtcgccaacttggatcccaacgccggtataggtggaaacttcacagacactagtcaagtcgacaagttcgagttaaccgaggaagagtatacgaagagaccaggtcagtatttgtctggatcggttttttttttgacttagtcttgacgtcttgcttcattttcaactgaccggctacaactgacacattgaatacaaatacaacaagatactcttcaaaactatctcaaaacaaacaagcttggccccaaatatgcttccacgtcggaaccggcaactcctactcctgttccatcaatacctattcagattcatcctggggaccggtgcgaggtcgtcacggctggagcagagatgaaacagcgaggaactattcgttttgtgggagagactcagtttggaacgggcaaaaatgcaggtgcatggattggagtagaggtggatgagccagttggaaagaacgacggttcggtggctggagtcagatatttcgattctaaacccggatatggcctttttgtaagtgtagtatccttttgtgcatttatccttatagtcaatgttcacaaccgattactgatcaattgcgcttcaactcctgcctcacttggttggtaggtacgaccggacaaggtcactgttggggactttcctgaagaatcccttttcgatgaagatgatgaggagatgtagatgcccttcgttgctttaagtgagcgtggtgaacgacctaaatgatgctttgacaatatagattctcggcgttttcaaattattcaaatatagcttaagataatctgtgttatgttgcgtatgttggtagtccttccgctcactttcctcatatggcatttcagtcaatctcatccatcagactatatttcactcagctattcattttgcctatctcttctgaatccatcctaacagcttttcaagaggaaaatgagtgacgatctttccgagggttcgtgttctttttgcttcagttccggcttcccgagcgttctactggatagtattcgctttaagcaggagagatcataaactctacatgatgagggtatctctcgtcagctctatgatatgaatccagggtcacacatgtcgaagtgttgtacatactttcagtagtaacatacaaacagattggaccctaactgtcctttccttttgatggctttacttctgaccccccgtagagctcctcgctttggcggacacacccgctgtatctagaaaacgaacatcctcaaggtcgtcttcaaagccgtcaaaacgacgaaaaccgtatgtgctgcttcacattcaatcgtattctccgtttctagtggtgttggacatggaaacacggggagtaaagacatgtctaacctgaagaggagtgagaagaaagatggtcttgcaatcggtaacatatttggcttgactgatgcctgatttctcaactgcgaaataggacaatggaggattccgacgatgaggaggaacaagttgccgagttggagagtgaggatgacgaggatggagcttctgcgttgtctaatccatatcctttagatggaatgtataaggacgaagccgatcgagcaaggtatgttcgactttgcttcactctttctcttcaagagtttcgatcaatggagtggcggacctgaacgatatgttttatgaaccttccttttctttccatctgaatcatctgtacaggattcaatcaatgcctgagctagaaagagaagagatcatcgcaactcgattgcaagaaaagcaggcttcgatcgataaacgacaactggatgccattatcgcgtcccgaaacgcgaaggaggatacgggtgtcgctcaagcagccaaacgtgagttttccttgtttgtctgtccatggtttaggggaccatcgtcttatccattccttgctaaatggagactgatgcgcacgtcatgatttgtcttattctctccttgtataggtcaacatacttccaccgggacatctcaggccaaaacttccaaattggaggtcctgaagaagaagcgattagaaaaagaacgacggatgactgagaaggtatgtttgtatcctgcttcttcatcactgcctcatcaagataaatccttgagaagccagactgaattgcctcaatggacatttatacgtagggtaaaggcaattattcaccaacgagaagaggcacatctggagagtcgagcgacgaagaggagggcggaatctctcgcttctcagaagatgaaatggaggagaaggctaagaaagctagggagatcattgggttagaagacttggaaagagttcgactgagtagacgacacttagcagatatgacttcatcgcctcactttgaggaatacgtcattggtatgtttgtggtcctgcctatttgcttttcttttttatctcttaagcattttgaaggagagaaccctgacggatgggtcgcgtatttaacatactaggaagctacgttcggtacatgatcggactcggtcccgacaaacgaaatacatacaggatatgtcagattgtcggtaagtaccgtcatcttctgtttcctgtttaaacccagttcggaagatatacttgagagcgcaagtctgacaaatgctgtttgtgttttacacgtaggtatcgaacgtggcaaattctatgaattcgaaaagatgagggacgaccgaaagctcacgctcaagcatggaaagtccgaacgaggcttcacgatggaacaagtgtcggaatctcatttcacattggtaagtttattccttgttgagctacaagaaggaagaaaaacgtgcgtcctgaggattaatatgacctcgatcaacaatttgtgtgatataggacgagttcagacgatggtccgagacaatgaaggcagacaagctccctctaccttcgagatcttcacttcaaaagaagaagaaagattgggaagaaattcgatcgagaaagttgacggatgtacgctttcagtttcttgacctttttatttcggtttccttggtagctttggttctctatgctgacagaacggcgtccttcttttcggtttcgttaggccgatatcaccgccatggtcaacaagaagaagaactcccaaggccgactgaagttgaaccaagcaaatttgaatttgaatcgacgcagagcagaacacacgatggcgatcaagcgacaagactacgaggcggccgaagaaatcgctctcgctattgccgctctccaagaggaggtcgcctccttgacgacgaacggtgattctttctctgcaggtggttacaacggtactgcttccggtggagagggtggagggctcatgggaaaggaggaagatctgatggccaaactgaatgagaagaacagaaagagtcaacaggatgcgatcaggaaggcagacgcggacagaagagaacaaagacgggctgccgccttgttgaagagtggaaacaaatcgttgttgtctcagtttagttcctctatttcttttcgaaacctctcgctccctatatctaaggtcaagaaggatttttattcacccgtttgctatgtttctcataggtcaaactctggaacgagcaccccgacagtcaggactttggacccaaaagacaagtgggggatcaaggagattgttctcacgcttgaactcgatctcggagaaggtttttgatcaggcttttttatgtttggttttttccaagaagagagaaagtcatgctattcattttcctttctgtttcctttctgtaaaagggggtgagggagagtttgtacagttattcatgatcttgtccttaacctcagaatgtctggaattacctgttatccttcatgagtatgtaagaacaagacgaggtgtaaggatttccattggcattaaggtatatacgagtattaaaaaaccagccggtttaagcagagtgataatgcattagggatgtcttcaataaggaaaggtagtctgagtagagacaagaaagaaggggcattcaaagagctgtgagattgatggggaggagaaagaagaatgccatgagaacattgcgaaaattgaatctagggcgtagcggtggtagtgttattggtagtagccggtgcgcccaagggtacactcataggagcgactggaccaggttgggccgttccattcgccttctttaaatccagttcctttcgttcggcatcatcgaaatcatcgtcgttcgcaccaccgaaggattgaggacagcaccctgcttgtttctttgtggtgttttctccggttttacctagaaaggtcgcgtcgagaaagaggtcaggtacaacatgcaagcaggatttagggaggttggttaatgagaagggcacatacagatgttgcaccagttttgtagagatacaatgaagcatgttcctgtgaatccatcaaccgataccgaatcttactctcagtctagatttcctcggggaatcctgccactatgtctgctctcgacttgagagaagagggaatgaacggaccgatggctccacagcaaacagccacgcatccttgatcatcagccatgtttttggtcttgagagtatagtttggaagtgtgagttcgttagaagagtccgggaataagagcttgtagttgaagttgaggttggtggacgaggtcgttattatatttgaggattaatgatggcggtgtaagttacgaggtttcaatcaatcaacgttttcgttcaaccggcactgcctgttggccccgatcgctcttccaaaacagttgaacgcctctcggagcatcttgattattctcttcggggctttagaaccgaaccgaatcgatcactcgccatcattatatatatatcctttcttttgagataacctgtacacctgatgtacacagacacatatactctttgtcgctttctctcggtttgcaaggctgtaacgagggtacatgacgtcacgcaagcaaggaaagaatagtactcaatacggatacatcaccatgcatattcttctatttagccggctttatgtttccctaaagacaaggagagagatgcacagagaggtggaaacggcattttgagagagaaagaaaaaggaaagagatcgcaggtatatcctatgcttggacacgaagagatgcaaacacaacctatctaatcacaaacatgcgtatcctgttttcaaacagaccacaagtgcgcaaacccgaaacagcctcatcagtttcatcgccccctttgctacatatcatgagaagagtaactaagaaaagaaataaacgatctcacctccgtcaaccaagacatcggaaccggtcatgaacataaagttatcactgcacatcgccaccacggattttccgatgtcctgagcggtcgccatcctatttcccgtcgaaggcccaaatcaaacgagaagaaacaaccagggaaacaaacaatataaagatgtttgaacatcagttatgtgtgttgtttgaatccgtcgttcgtgaaagggggcaggataaaggatcatgcacgtacctgccgagtggggttcggtagacccattcatccacccaagtcttgtcgacagttgcaagctgaaacagagaggaagagaggagaagaaggaacagatatgcaagaagacggaaagtttagtttcagtagaagaaattgataaaccacaaatggaaaacttgaagttttgatagggacaagattcataccatgtccgtagcaacatatctgagcaacagacaagacaaaataagtgtccgggcgagagagagaagtcgatgaaaatcagttataagattcagtagttcattgagcaagtatatcaagggacattaagtctcttacccgggagagatgcagttgattcggaaccctaacggcgcccattcgatagccaaggactggagagaactccatccatcaaagtaagatgtgttagttctcctttgcttcgatctgaccgtcggttcaggaccagcgcaccttagagaaagccgtcacggcagcctctgaaaaagggaataagaacaagatataggttgggaaagaccaggaaggtaagtgcataaactaccaccaagataaacctgatcgagaaatttgacgtactagaagcattataagcggcttgcctatagagtatcatttccatcgagaaggaatatcaagagaggcaaagcggttcgttcattcagagagaagagaacacacatacgagagaaaaccgatcgaaaaaagatcactcacttttgaggggacatggcaacatggccactaacactagaaacaaccaaaccgacctttccttccaggcttcctttcgtcttttcctctccggcaggaagccaggtgttgacacattcccgcatcagataatacggtccgaacgtgttgactcctattgttgtccccgacaaagcgatgatcacccgggttaaccaaacaatttctcgtctgtctctccccaaagattacaaagaagcaagaatcagctgctaaaaagaacggaactcgccaaagatgttcaacatctcgtcgtctgtcatgttttctgcctccttccatagcgcaattcctgcgtttgcgactacgatgtccaaacttccttccagtccggattgaaggattgcaggcagaagagcctgataggatttcgattctgaaccgttcagttgaaaagctttgaattgacgatctgggaactctgattgaagatcttgaagcagagcatccacctccgatttcggagtcgaaccatatgtcaatgcgatgtttgctccagctaaagttgcgttcatccagccaaagcggccccatcgagatcgaagatgatagtgaaaatcggtgactgaggacgatataagactgagaagacaaacctgtggccatctccttgacgatggcaagccctattcctcggtttccacctatagaatgataaccatcaatagattttcagcctactgtgagttctactttcctctgaaactttccaaccttgattccgagagaataccaggcaagacgaggcaaagacgagggctgtaggacgaaccggtaattaaagcaatttttccagaataatcgatagtagcaggcatgtcagtcaagtctcgaagatgtagagaaagatgggttgaagaatgagtgggtgcaagatggtgtgaatgagagaaagtataaaacagacaaaaactcaagagatggacgaaacagatctccggagataactcgtccggaaaggcaagatctccggcccggcgttcgccggaagcgactaggctttgttatacatcttcttcctttagagtttttcctttggtcttttccatgcgatatgttcaggactcatagatcgacaagagataaagaggcaagaagaaggaagggtgagagaaagagaaagtagaagagagttaaggcgaggtggaaggtggaaggtggtgtagtagtggagaggaggggagggtgattggagttgagctgagctgaactatgtagattggagttggattggactggattggagagtggatagaagggaaaaggagcagattccgaaagagcccaagaaggacgaaagcatagagagatgaagaggtaataaagaacaggaaggatagaagacactggagcaaagccaaaggttccgaggtttgtacgattttttttggtagagaaagtcattgtttatgataatttttttgggttttgtatggaattatgtcaaggaacgaatagagtaagaatggactcgaagacagatagaatttttcgaaagagaagaaacacatagcagcgaaagaaagtaaaaaggagcagagggacaagaaaagaaaagaatataaacaaaagacgacagacccgacaggtcactcaatcatcgtcttcatcatcaccgaaagcttcccgcatccctcgagcgccttcctcctcttctctagcggtcatctcccgggcggactgctcgaatcgttcgatcattcccgtccactcaccagaggcaagttcggggaatcgaccaatggcggctcgggcaaaggccaacaatctctcgttttctccttccaacacttccaccttgttctctaacgtcttgacatgctcaagctttcggatcctcgatcgcctggcagcgagcgtgttctgtcgtcgtttgaactcgatcgagtttgccaggttttccgggagtggctcgtcctcaccgggtatcgacatcaaggaaagcacgggggtggaagaggtagaggcggaggaagcgtcaggagtcgcatcagtcgagaccctctttttcttattaccgcttttgccagcttgtcgtgcttcaaaggcagcaggaattcttcttttgctcgtcgcactcggtccggcgtaggttctctcttggataggtgcgtccaagtcgagaagctggtcggcctgtatgccttttcggtgtccagtaggggcagatgatcggcgaggcgcaggtcgaggagcagcagaaatagtacgggaggggaaaggcgaagagttctgtcggacaaggccaagaggaggggtctgggagggagcgtgagtagagggaagagggggcgagcaggcctcaggagagatcgtcaaggacggtggaagaacggaaggaagggacaaggacggagagggatgaggggtagaagtagcgacagtagcgacaacaggggctgcaggagcggcaggggtgacggaagcaacagcgttcgaggtggatgactttgaagttgggaacagggggagatcaccaaacagggaaggtccgtcaaagatgaaatcaaagttatcatcattgaaggagctgtagagatcaacaagtttgaaaagatgttagcggggtagtcagtttcaagacgtcaacaaacggaaagtacgtacagcgcgacgtcatcgataccagcctgtgcacccgaatctccaaacaaactagcactcgcccactcgggggaagcagtaaagttggaaagaggggaatagtcaaggttgggcgtaggcgagccgggagcgagagggatctgatcaaagagattgccaagaatgtcgagagagacggaagggtcgaaaggagcggtggaggctggtgtttgttacagaggaaggaaaaggaaagaggaagtggaagacaaaggggatcagaacaaaaccatggacagacacgaaaaggtcgaaagatatacacacctgaacctccgaccatatcttgaaagccagactcgttcagaaggggactggtctgaccggtctgacaactctgttcgccttgctgatgggccggctgagaaaaggcgccaaagccaaaggccttgttttgtagaagagccatatcgtcaaaagtgtgatgtgggggtttgttagaaagataggagaaagaagagaagttgtcgggggaatcgacggtgatgacgggcacggtagcaggggctatggaccggttgggaaggggaggaagttcggattgatgcgtgcgttgtgggcgcaggacagtgtggacggggttggttgaggaatcttgtgtggacaagacggcgggtgctgttttcgtttgttctggtttttttcgaattggtataggcggaagacgggtagggagacctaaggagatgttgttggcattttgtcagtaaggaagtgaggtcgaaaaagaagatgtatagatagacagccgaaagaactcaccatttttgtggaggatggaaactaggttagtttggtggccgaagccgggtggtagaggtgttacgggcctattgatagagaagaataggcggaacgagatcgaggcaaggcaaagacaaccaaaccgaccaaggaaagcaaagcaaaagacaagaaggttaacaaacaagatcagataagaatgttctgggtggatttgaagaattgagatctgcgggcgcctcggttctaatttctctctagtcgaatttaatgcacgcgcagtgattcctcggaattacttccgatacaagggtttgaccgaatatgcgcagcagattaccggagttcggtggtagggaagagaaggcgaatccccgaagcaagaccggatggaatatggacgatggaagaacacttacgcatgttgggtggggagacaaaagtcaaaacctgtactggatgtacgggaaaagtagcttgagggggggacactaaaggatgagagagaaacgcatgaaaagattagtcagaaagaaaatccgcgtggtacgggagtaatagattacgaaagtgataggaatagaaaggaaaaaagtggccacgaccaattcttcctgtcaactttttttctatcctctcttctctccttctcaaaaacgcttttgttcggagctagaaaagaaagagagaagaaagaagaaagaaagggaaaaaaaagaaggaagaggacgcgagaaggaagagaagaaaacacctactggttatttaaactgagtgaaattgggggcggttctcggggaaagaactggttgcttaggcgaagaaggacattataaccgtatttctgttcgtgttgttgtgtatcagatgggatttggagaactggtctctgggttcagcagggcaaagataggtgccctgagggagtgtgttgaggatttggaagagaaagaggaggaaagataaacttgacggaaacaaactgaaggtgatggacgaaagagaaagaggaagggagagatgagaggaagaaaagacgagggcgagaaaaaagaggaaatcaacgaaaaagggacagtatcaggacaggaaagaggggaaaacgccagagattgccaatcagaaacggataactctactgcgcgctgaaaactatgcagatccagcctcggccttggctgtctttaccccgaggaagggctgatgaagggcaaacatggttacattcgggcttcacttgggaacaatctggggcagacagctatgcaacttgggatcactcacagtctcgttcacgtgtttcccttgaggtcatcgggacaccaaaaaaatgccccgaccctacccatgatatggacaaatcggggtcagctgtgcaaaaacttatgtaaatagattatcttttatttcatctttcgtttattttatttcatttcgtccttactcgacttaccgcctggtccgcggaccgcctggtccgcggaccgcctgtg

SEQ ID NO: 252 - DNA, 6862 bp, Xanthophyllomyces dendrorhous
cctgtgggtatatgtgtgatgtgtcctccggtctctcgtgtccgtagagttcttttcttcttctctcatctctttctctctgcccaccatctacattaaatcctcccttcctactttccaatcatgtctgctagcacactcccaaagcttaccgcccggacggtgaggaacgcttgcaagcttctgaagagccctccgaccatcagggtcgtcgcttgtcctttcaggtcagtcctttcgattttcgtgtcatgacatctttcagtccagttctcacaaagccatgttcccttttttttctctccatcttgcctcgttgcttgtcaatcgttcatcactcaattgattatttggctcatattcagtggtggtcaggttcgttgtctcttcgtccttttacacttgataacatatttgaagcccaaatgtttgcgttcgaccctctctgatcacttttttttgtttggttttaaacccttcagcccaggccaggaacagatatcgctccttcgaccctcctctcggctgggttgatccctcaactcgaggctctccactggaaagtcaacttccagaagccgttgcctgaatcttttctcgcgttgaacccaaaggatgatccgccgattggcaggatgcagaacccgcgcagtgtcagcaaggtctgcaaagaggtcagcaaacaagtcagcgaggcttgcaaggctggtgaattgccattgactcttggtggagaccacagtctggtaagcgtttcttggtttccgttctctgttacatgactttgtctcttttggctgatgcttcttgatgtgtgacactatataggcaatgggaacgattgctggaactatgaggtgcgcaactttgtgctcatccagttcatctctgtatgtcttagcttgggccactaatatggatattggttctctcgacgttcttattctcgccgtccgaacagcaagtaccctaacgcctgtgtcgtctgggtatgttctctctccttcctctgctttctccttattttttctttttctatccctcaccaagcttactgcatatacctctcaggttgacgcacacgccgacattaacactcctaactcgacagagtccggtaaccttcacggatgccctgtttccttcctgtgtgtatctctatttctctcttgcgtggtcctcgaaagcaaaaaaagtctctttcgctcacaacagagaacccccgtccgcctctgtatagacttggtttgaagggagcaaaggatctcgctcccttctctgaatggctttcgccgtgcttggacgcaaagtccattgtctacattggccgtctgtcccttccactcttccctgctttctcaataaacacctctggttgacatccttcatgattatctctcctacgtagtccgagatgttgatcctgccgagaaggctatcctccgagagaacaacatcaaggcattcagtatgcacgatgtcgataagcacggaattggcaaagttgtcgagatggcattggaagctgtgaaccccaacggagaccgaccgatccacttgacctacgacgtcgacgccttggatgtttgttcaatctattgtctcgctgtgtctcttttcatttcagtaggacctggctgattccttgttcgtccatctatgacagcccgcggtggctccttcgaccggaaccccggtccgaggaggtctttccttcagagaaggccactacattgtcgaggccattgccgagaccggtatgctcgtcgcgtcagtcttttccgctctctctttcccctcttgtcgcctgtcaaggaggttgacttggactaatgcctcatcctgcttgattctttgttacagtttggatatcatggttcgtcgttgggtcttgtctcgaagacggcttcgattttgaacgtacacgctgacttttcctcctgtctgtcttccttctttcccatgatcctacgatcttatacaacaggaggtgaacccttctttgcgagatgagctttcggtccagcagacggtagccgtcggatgctcccttgctcgatctgctcttggtgcgctctttttcagcctttttgttttttttttttgtttcatctgattctactttcgctgatgcacttgcgcgtatggcctgtactgatacgctctttcgactttgttttacaggcgagaccttgctctagaggaacaaaaagaactgaaaccatacgggtctcagcttgtggaagcagaaggaatagaaagaagaatgataataagaagcaaagagataaaaacgatgaaggtggagaaaagatatgaggtacgacgggatcactggagatagatctcgtgtcgtcttggttgatacccaggatatatatatgaacatttcatcttctctgtttcactctcgtttgtctctacttggattctttgtgcatcatcgtcaccatgaagcgagattgagaatcggtctggccgtctgaatgatgtctttatttggttgagccattcaagattgatctttgcatgaatttatatactaatcgttttaatttttatatcggcttgagtcaaagtccccctactcgttgatctttgcgaggatgtcagagtccttgaagaggaagtactcctgtagttttcgcggccaaaggaggagaaaatagaaggctcgttagtttgttttacattcatggtttccatcgttgcaactgactacatcacacacgcgcaccagccgattctccggaaaaagagaagaggcaaacacagagacaaggaaaagaaaaagagaaagaaagagaaaaacgagaaagaacgaacctcctcgccgagcttaatggagtttcctccccatccaggaaggagcactcgatcaccggcctggacggcgcagggctggacgacgccctcctgtgttgttgcacaagcgcagaaggtgcgagatagatagcagggcatgtatgtgtgtcagtatgataacgaaagaaaagaacggatatctgtagatcgtgagaggaggatatagcgagtggggaaaaaggaggaacgaacggcgttgggagctccgggtccgacggcaatgacggtagcctccggcaacgggttggccgtcacggacgagggcaaaaagattcccgacgcggttttctattttaaggaaagagtgtcgttaccggaaatggaaacatgacattattatcagcaagaaacacgtcgaaacaaggcttaagaagagaaggaggggaaggaaaggaaggaggaaaaaaattgggaacgtacggtctccggcttgaatcgctggacgaggacccgatcgaagagagggacgagggacttgatgtttttgaatgtagcagactgtgtatttataaaatgacagatagtggttagccaaggatctaacacgaatacagattgctcttaaaaagacatgagaacataccatgatgagtgatcaactggactgatggtagatggaggttagggaaagaaagaacagactaggaaataagaaaaagcgaactacaaaaaagttgcgattttcaatacggttgtttttttggaaatttctagaaaatccttttttctttttctttttcttttccgcacatcgtctttctcttcatcaccacccatccatccatccacccaacgattcactcacagatgaacagactttcagctatcaccagggctcttcctaggtcctccaagccggttctctccagagcttatgcttcccacaaggagatcaagttctctaacgatggccgagccgctatgctccgaggagtcgacatcctcgccaacgccgtcagcgtcactttgggccccaaaggtgggttcttggggttccctcttctttggtttctgcttcttgttttggttgtcgatgtacgattctggtcgcacttctgatgcgtcttgatctttatcttttgtcgagacaggccgaaatgtgatcatcgagcagccttacggtgctcccaagatcaccaagggtaagctcgcttttcagctttcgatcggactctcagcttgttcgcttatgcttcccatcatctgctttccttagatggtgtcactgtcgccaaggctatcgtcctccaggacaagttcgagaacctcggtgctcggtgagtaaagtccttctttcttgctttctcttctcgcgtcttttttcgaaacagattctgtagagacggacgtccgcaagtatatctatgagcaagtttctgatcggcttgtctttcttcactttgcggtatcgcctctgcgttcaaccgacagactcgtccaggacgtcgctagcaagaccaacgaggtcgccggagacggaaccaccaccgccaccgtgctcgcccgggcaatctatgccgagggtgtcaagaccgttgctgccggtaagtctaatttcggttttacgcccaagggaaaagacagaaggaaaagccacccacaaaagcttacactgactgtttggccgaacttctgttgttgttgttgttttccgtattaatcgtaggttgcaaccctatggatctccgacgaggttcccagcgagctgtcgagcgggttcttgaggtcttggaggccaacaagcgagtcattactaccagcgctgagatcgcccaggtgagtttttttttttttgtgtaaacaaaatgctcggattttcggcgaaaaactaagatcttaactctgtggttgctcttctccttccctccccatatcaaggtcgccaccatctctgccaacggagatacccacatcgggaacttgatcgccaacgcgatggagaaggtcggtagggaaggagtcatcaccgtcaaggagggaaagaccatcgacgacacggtaagttgattccggctctgctgcaaaacgcgtttgatccagacgaaacgaaatggaagatgtgaaactaacgcgcgcgcgcgcgcgctcgctctctcgcgttttcttttgccatttgctttcttttcttctcttttcttttctttttctttgatggaaacgggttaatctttgaaaggtcgagatctccgagggcatgcgattcgatcgaggatacatctcaccttactttatcaccgacctcaaggctcagaaggtcgagttcgagaagccgttgatccttctgtctgagaagaagatctctgttctccaggacctgctccctacgctcgagtacgccgcccaggcgagacgaccgttgttgatcatcgcggaggacgtcgatcaggaggctctggccgcgttggtgctcaacaagctccggggtcagctcctggtggccgctgtgaaggcgcccgggttcggtgacaaccgaaagtcgatcctcggtgatctcgccatcctgacgggtggggtggtgttcaacgacgagatcgacgtcaagctcgagcgcgcccagccggaccatctcggttcggccggctcggtcacgatcaccaaggacgacaccttgctcctccacggatcgggtgacaaggcgaacgtcgacgcccgaaccgagcagctcaggaacctgatcgccgatgggtcgacctcggattacgaccgaagcaagctccaggagcggctcgccaagttgtcgggcggggtggccgtcatccgggtcggtggctcgtccgaggtcgaggtgggtgagaagaaggacaggtacgacgacgcgttgaacgccactcgggcggccgtcgaggagggtatcctcccgggtggagggacggcgttgctcaaggcgtcgctcgcgttggacgacgtcaagtttgacaactttgatcagtccctcgggatctcgatgatccgaaaggcgatcgtccgaccgtgcaagcagatcgtcgataacgccggtgaggagggttccgtcgtggtcggccggctgttggaaaagtacggccaggagttccagatgggttacgatgcctcggtgggagagtacgtcgacatgatcgagaagggtattctcgatcctctcaaggtcgtccgaaccgccttggttgatgccagcgggtgggtgtcttttcttttattttcgtctgcccttgttttctccccttttggaccgaatcggaactaacggacgtggccttgtcttctctctctctctctctctctctgtctacatttgacactcaagagtcgcaagtctgctgacgacatccgaagcgtgcatcgtcgacgcaccggaggagaagaccggaccttcccctgccggagggatgggcggtatgggaggaatgggaggcatgggtggtggattctaagaagaagaagaagaagacgaagaagaagaagaagacgaagaagaagaagaaaaacgcttttcacgttgtctcgtgtgtgtgtgtgtgtgtgtgcacacgcgcatgtgaaaaaggtggaggtggcaagagaaggaagagaaaaacaaaacaaaaaaacaaagctcaactcatcaaatgtttcttacagatctcatcattctcgccgtcgattcgagaacgtccagagctggcagtgcaaaggagagtctcccgttggcaagtgacaagaaaagaaacgagcaaagcgacaaagacaacgttcaccttttgcgccttccttccttcctttttttttctttttcttttttcctctttccccctcatggttgaaagcactgcttcgcgtgtgtctgtggttcgctcagagacaagatgagaaagcccgatcggaacgggacgcacagtgaattgtcaacataagtatctgttctccgttcacctagagcgagaatatggtatcgaataatcgaataccgaatacaaacaacaacaagagggaagagagagaagagagggaagagaaagagagaaagagagaaagagagaaa

SEQ ID NO: 253 - DNA, 957 bp, Xanthophyllomyces dendrorhous
aaaggaaaaggaaaaggaaaagtattgaggaaaaatttgggaaattgagaaaaatgagaaaatgagagagttgactgatgtatccgagagtgggacagaccgggaaggcgtgaatggattctatagagaagaaatgaagaggctaggccgatggagtgaaatttcaatgagaaaagatgaaagtgaagagtgaaaggtaaaagatgaaataagatagagataaataaagtgtgaggaaaatataacaagcgagggatcaggatcggatcagagttgaatcggaagacgtcacgagaagataaggagacacaagagaatggcaaagacaaagaaagtctaatgataaatagtgtttcaaagggatgaactttgggcagtgagaaggatgatgagagcacatggaacggagaggacagacaacttggaaaagggaggagagagagagagagagaagaaagagaaaatatgcttgaaagaaagaaaccgaaagggaggggcgggcgagccgacgaaacgggaacgggatcggaaacagaaacataccaacccaccgactaaaaagcaaagggaaaacactatcaactcaaactgctccgtaggcgtattcgccttgatcgtggttggtatgctcgccttcatagccccagatgacctgtgtgaattgatctggttcctgtcctcctcctcctcctcctcctgccggctgctgctgctgttgctgctgccgaggagaaggatggaaggatgaatcggcccaaccggcaccgttggctttggccaggtcgaacgacggtggtcctccagggtagacatgatggtctcttctgaaggaggcgtttgttaacctggacgaggtcggttccccggtggacggcctgcctaacgggtgtccttggaagccgtcagaaccggccgatgtggaggggccgctgatgggctggtggaaccctgttcctg

SEQ ID NO: 254 - DNA, 2566 bp, Xanthophyllomyces dendrorhous
tgatgatccctggggggcggacgaagggggtgggggatagtacgaattggtggacgagctgtgatagctggtgaacggccggttcgaatgattgtccatcggctgacggatgttgtgagagggttgggtgctgggttcgaacgcgcgttggtcgtacgtgctgtttgcctggtggggatgagggtggaacggatagaacggttgtggctggggcggtgggggaggtggcaaggaagctgaagctgaagaagacaaaagaccggatgcgtatgaggatctaccttctgatggagggatcgcgtacgtctgacgagcgccgccggcctgaatccgaggagaaacgattaacgattcggaatcatacggtggttggtcctggtacggacgtctagacgagcttggtcgattattggggtatccgtctgaggaggacgacgctagcgtaagagaagcagaggcttgggcggagccaggagcaggggcagaagtaggagcaggagcaggggcagggagagcgggagcagaaagagcagtgggaggagcaggatgaggatacgaagggtttgtaaacgcggcagccgaggcgctcatcgggatgggtatcgagtctgagtttgtgtttgtgtttgtgtttgtttccggagagacatacgacccgggctggaggtgtgtggccatatacctggcccgggagccaggtcgataggagtccagactggtaccggatatggggaacgagtcggatgtggctgtcggggctgggtttccgtacgggtggtagtttctggacgctctggaggacgagccccaggagccatagtcagaaccgggaactccatgggcgtgcgaataccgacggatctctccccctggcggtactggtggtgctgagcctcctgccgagccggctaccgagtatgtctgatggacgtctgactgctggatcggcagaggtcgtacagcgctggtggacgaggtggggaagccggtgtcgaccatggggaaggagccggaggtggagtctgcgctgcctggtggctctccgctgggataaccgttggggatggggtgtgggtgtgggtgtgggtgtgggtgtgattgtggagatttatcgtacggggcttgatacgacgggaaatacggggagggtgagatgatgaacggggcttcggcgccggccgggtagaacggctctgtaggtgttgccggtgagattgtgtggtactggttctgggactgcttctgggtcgtcagttggtttggtggcaacgcgcggatggtcatcgttcttgttttcgactttgctctcgatctttggtcttgtttcgatctcgagccggtgatgaaaggcgaggaggatgaaaccatggggagggcggctggtaggggtgtgtgcctgaggggaggagataacggttgtttttctggttcacccctttgtggtggtgtggtgttgtgttgaaggggggagaggggggagggagagagagagagagagagagagaaaggaggggaaaagagaaagggaacaatataggcgggtgaggtgcggccgacaagttggaagcaagcttgataagcacagacaagataggaagacacaggagtagagataaagaacaggacgtaccaatacctgagcacgccggaggcatcctcttcgatctttggagggtctctgaagaacgtgtcccggagcttttgagggcacacccaaggaaggaagaaaggcggtcaagagaaaggaaagagggaacacggaagatggtggggacgacggtgtgaatcctttttttcaagggaggaaagaaacatctgacaaacgggagattcgatcgacatacgtattctggattgatctcgagcgaggcgagctctggtagactggaaggtgtgcgcaaccggccgttcattgcgtcttcgagggtgtagtatgataccaggtgttgggcgaccccgttgatgctggccgacattgtctgggagagggcggggggaggttgtgtttgcgagaaagaaggatggggtaggggtaggggtaaaggtaaaggtagaacggagaagagcgcaaaaggagagcagagtgagtcggaggaacggggacatgcccaagtggtgcgaaggaggaaggagaggaggagaaagaagaagaaaaaaaaggacaaggacaaggaaacgagtacgaactctctttacgagaccaccctctttgaaacggacggaggcggtgagagagccgacgagctggcgttctcttgcctgttctaacgagcgggtcatgccggagggaccgtcgtggcgaccaagctggtgggtgtctgctccggcggtgctcggtctggaatcatctgggctgacttcgttcggactaaagtcgttagggtcatctatccgggaggaaaggatctggtttccttgggcgtccacggtgtttgccgagtaggacgtcaacgcggccatgcctttttctgttcgtttctcgacctctctgtagacctgtggggggggatagagtgaaggggacgaggtcagcagctttttcttcttcttcttctttttttttttt

SEQ ID NO: 255 - DNA, 1169 bp, Xanthophyllomyces dendrorhous
aggagagaaaagaagaggaaaaaagagctatggattggaaagagatgttttctgtttatctatatatgttggactgactaagaagttgcttaggatccgggatggagaccagaccaagccgtcggtccatcgtttcatcccgctttcgccttcgtcaaagacctggagggggggggaagcaaagatgggaggtaaaagaaaaagaaagggaagaagaaagagaaagatacggattgagtaacatggtctggcagaaatgagagatggtcgacgagcactcacaaaaacggctccggattgaatcatgcctcgttctttctcagacagtcgcctggttactctcgggatgaggccttgtttggctgcctggaagatgacgagagcatcgagtgtggttctttttagggggggaagagaatggatgtatgtgtgagatgcgggttgatttgaacgagcgaagaacgggggggggggcaaagaaagatgatgggcaagatagagagatggagggttttcggacagacacggccggacttactcgacgatacccctgaacgggggtgtgaccaattcgaccttcatacggttttaggggggaggggcggggggcgaagatagagagataataaagagagagaataaagagagaacgaatgaaagaatgagaagatcggggttggacgtgccaagggatgaactgatgggtgtacctccgtgttggaaccgaaccgggcaaaagacgtgggcaaaagacgtgggcgatacagatactgatcgggctgggtgagagcgtgtgtgtgtgtgtgagggtgcgttgacgacgaccacaacgacgacgacgacgaagaacacgaacgggatggaaagttgaatcaaacgtcgaacggacaagaaaggatgagggaagcaaggcggagggatgaaggaatgacgatgaacgttctgcgttcttgaactctcttttcttttcgtctctctttctctttcttcttggtggctttgcttgctagctgtcttgtcttcttgttccccctcgttggatgtgtgtgggtgatgttatttgatgttcttttggccgatgcaatccgggtgggagaacatgggagtcagtgtgttagcccgccgggtcaggtaaatctcggacgcgccagaggaagaagaagaaaaaa

SEQ ID NO: 256 - DNA, 1151 bp, Xanthophyllomyces dendrorhous
cgtccaacgtggcggcgacttccaggcaccagacctcggggcctaggcacacaggcacacccacacactcagaacaatacaaaaacgccacgtcttccttcttcttcctcgtgcgttggccgcgccagaccaaccttctaatgaaagcacgtgagtccagaaattcggtcaacttcccgacgatcttccgctttccgccttccgccctccgcctgttgccggcggagagcgtatcgaggtgattgcatgtctttcaattaaatcattatcgtcgtcatcatccgctcgcaccgcacacaccgcccacacccacgcccacgcggctctcgtttccaccgagagaacccacataggcacatgtcgatcgattggtaatcggccgccgaggtcttgaaccttaatccccgttcgacctcttccgcctcctcaatgaaccctctccgagacttggcgaaccgtcaggtcccagccgaagcattccagggcaatcagatccctgctgcgctctccaccgcaggcgataaggccctcctggtcaccggatggaccttttgtgtgcgtcgccagctgcgcgtatggatgtactttatgctcgtgccttcggacgtaaccatgggcataaccatgatcaccacgttaaccctccctcttaaccctaaccgacctccaaggcctttcccccccacacgtcatcatctctcgtcgcctccttctttttcctcaccgcccgttcgacaacatccggctcgcctcaacctcacgctgtatccatcatctaaccatcctctgcccactctctactctaatctctccagccaccctcaagatgtccgtgttctctgggaacccaacacagcccaccaccgcggagcagagacagttcgaactaaaccagatgattctcatcagagaggctgccatcgatggtaacctcggtttcttgtttggcctccttctctttccatccatgctcaccccttggctttgtccctcatctccacaggaatccagatcttctcggtagcatctccagtgatctatctgctcaactcgacgcgcacaaagatgttttccgtaaacggtctcctcagagcgtgtcagtccgtttttgttctttttttatatctttttttttttttaattttaatttt

SEQ ID NO: 257 - DNA, 21516 bp, Xanthophyllomyces dendrorhous
cctccctcctcccccctctccgttcatgtttcgtcacactccagccgctataggagtcgcagccgtcggtccgtccgtaggagcctgtcttgccgccttgcaactgaactttgtaaagacaaaggaagaagtcaactctagagtgctcgccctcaagtccgacgtcagtgcctttagccttgtcatctcgacaccaccttctctcttcgccctttgactgacaaacatctctcggataaaacatccaccaacagtttggaaaaactcagatggacgactacactctcatcggcggcgtcgtaggttcactcttcaccaccgtacgttccctctttttgcctttgctctagtgtgtatcctgcggatgaagcgtctgaaaaaacgtatacatctgtctatctctctctgtctctctttctttctatcacccacatccacacccaaaggcctttgcgttgaaaagggcgagattaccctgggcactcgtcggtggtggtggactgggtatcgccggtggactcgtcgcgtcagtatctcttccgtagcccttttctcctccccctctctctctcatatgtgccacccaatcatctcaccctgattctcactctcactctcacgcccacactctcaccctcgaccatccaccaaaatagacactacatcacagaattccaaaagacaagtaccgccccgacagtgtccccgtcggcgtcctctccatcctcctcctcctctcctgtcacgactccgagagtgtgaactgtctttcctggctctttctgccttttctccggaacaaactataagtatgatcgaataaacatatatatacatacgagacctccaacccgatggtccgggagaggaaaattggatttcgtcaaaacggctggagaggaggaggaggagatagagagaatggaagaaaggaaagaaagaagaaacctagatcgggtattcagatcgcaaaggacatggaaagtaaaaaaaaaaaagaagaagaagaagaagatgcaatacaagatacacagaggaggccaaggagaaagtcgaacggaagcgcgcaaagaggaggataggaaacaaagataacgtaatgtgaactcgaacacggtgtagacctcaccattcctcctcctcttcttcttcttcttcttcttcttcttcttcttcttcttcttcttcttcttcttcttcttcctcctcttcttcctccaaaagattgtgtaaaggctgtccgtgaacgtacgagctgataccccgaaaatcaagatacacccacacaaagacgaaaaacaaaacaaaacaaaacatgaggtgatcagatcatcgttcattctcattctcagacactctctcactcgactgggctgagcctaaacccacctgacaggaacgaacagatccctcagcactcggatgattcgctcatccccgttcgaccaggatcttgcgccatccgtcgttcgtctctctcccgatggttcctcccggggcctcgtcgggcggaccacctcgcccagatacatagacacccccacggccaagggcatcacctcggccacaacaggcctctgaagcggaacgacctcctggcgcccgccacctccggacgcctggccagaacgcaccaagagtggcgcgcccaatggggccagatcgttcctggcctcgtccagatcgcaagcagggtcggtcgtcaggcggtgactctccgcccggacgtcgggtcgcggaaagattcggagtggttcgacaccagctttcgttcgctcatcctcgcctctacgaccacgaccaccaccatcaccaccatcaccaccactctcacccacccggaggagttctttttgcgcggatcccgttcccgatcggaccatgccggtcgtatcaatcgaccgtccggtcggaccgaccgatacgctctctccagactcggtcgtcactcggaccacaggcgtaagagaataaacggatccaacaagcttcggtccaggttccgggggttcactaaggtcacgcacgatcggtcgcgcaatacccgtacaagattcggccggggatctgaccgggtttgttgtgtcttttgtttctaatttttttttgggtcgtcaaccattttaatcatgaggtattaatcgtcattttttttgaattcaattcaatcccatcccggagcatcagtcaaatggtcagccttcgttacttttcccacaaagaaaaacaaggaaaatcaagacgggatagatagcaaaaagagagagagagactttttttttcggacgaacctctgaactcttgcatatatcggtcgattctatctctcacgaccgcttctctagtcatcgccgccgccctcgtctttctcggagcgtcatcatccttctcgtccttctcgtcctttccaggatttcctgtaacgccctgattcgacttcacgagacccttcctgatgttgacaagactcggttccgatctcgagccgtgaacccctctcggtcttattcccggctccggcctcaactccgaccgatcgattgcggtagaagaatgcgaccggggaagattcgtccggtcgtccagatgggtagagtacgatctgtgaaacaccaggtgttgtcgagtcgaccgatcctgccagactgccgggtcactcttctcatctcgtcctagttctcgatttggttctggttctggttctggttctcgttctcgttctcgttctcgctctcgctcccgacgaatccgaaccggatccttgcctgcccttttctgtttcgatcgtctagggttgaacaagttaaagttgatctgcttcctcggaggtggagcgacaagctgacgttgatactcgattgggacctacaccaacggcgaacaagaaagtgttttccaccggtcacacatcgtttagtcatcacgatcaccatcctctcgacgacccaacgcaagaacaaccagagatgcgctcacgatctcctcaaacacgacatacaacgtgtccggtttggtcgggccctcctttcggctgatcgtcttgtactgaacctgattatccagataacatgccgagtaatgaataaggcttttcgtcagatcttgttccctggatgaacacctaccaaaaaaaaagaaaagaaaaagaagaataggcgaaaaggaaagaaagaaagaaagaaagaaagaaagaaagaaagaaagaaagaggaaatctattcacgatggcccagttgcactccctcgccgttgggtccacccggttcatccagcctgcgctaaacaaaagatctgcccaggcatcgacaaacgcttcttccatcgtcaccggttcacacacccgtggtcttcaaggcaaaataaaaattaaaaaaagaaagaaggaggaaagaccctcggtcagtggataccaaactctagaacctaagcctaaatccgactgaccggacatcatagtcaaacgcaggaaggttcttttgcgagctcttcaaacgttggtagacctgctctcgatctaagatttcaaaaagagtaaaagcatatgtatcagcccatcaatcacaactcccaaccgagttgacgcaagagaaagagatgccgaaaaagagaaagagtctgcctcgtacgttctggccagttggtgatctctttctggatgggcagaaacaggttcagcggatcggacagcgtgattccagagtctgggaatccagtgttagaaaaatcgttccacgtgatcgatgctcttttctcagccattttcgcctacattctcgatatgacaagccaaggagagagagagatcgagatcagttgagcgctgttcaggaagagaaagacaaaaaaaaagaaaaggaaagaaaaggaagacgaagagaggaaacaaaagagaaagccagagattgctcacagctctagaactctccgtcagatcaaattgcagctttccgctgaccggatcctccggtttattcagatcaagcgatcgttcatggttctccccgataaagtcaaacccatcttgagcaaagaacccccacttcttctctgccaacgtctcccacccagctcctccttcgtccttgtcccatccgtcgtcgtcgtcatcatcatccgcctcgccagccgcaagcgcgcagagagacccatgggatccaacccggtacgacggaagcgtagtgttcgggatgttcaacctttttctgtagtccgaagcaaagcggggacctctgttggaagcgaccgagcctgcttttgtctttacaggggccaccacgtctctcacccacgcaccacagacctcgtacccgtccgacgctctctccaactcgccaacccaggactctgccgtacggaagagctctaccgaatatgctcggacatctttccggaccagctctgaacgcacagatcgtccgtcctttcgaggatcaccagaaagccagacttggtcggaaacgatcgtcgccggatagttcttcgcccagctctgcagtcggggaggcagaggcaagttcttctggagggaagcaaaggattgggatcggatgaacgagagcaggagatgctcggtggcgagcgcggacttgacaaaatgtttctgagtgtcaacgagtgtcaaggtgaccggaagaccaaagaccagaggcctgagcgggtcgtagtaaacaacagagttcatcagcttggtaaacctatagatcgagcaaaagacattcaacctacccaaatagtcctccgataacgggaggtgtctgattgatagaaggaagggattgagtggttcgcactgctgctttgaaacgttcgacaagcgaagatgtactcacgcatccactcaaatgactatgtgccacaagcttggagaataaagtaagaagatcgacaaaaattggttgaacgagcgttccgagcttggcggcaaacgcaaaaatatgggtctgaggatgatcggcggctggaaaatgaatgtgcaaccaacagaaatgcacatcagcgggcagtgctcgataatgaaactgccgaaagagcttgacaccacaagaaaagaagaaggaaagaaagaaagaaggagaagcacacttacctctctcgctcttcctccactcggcatattggtccaaatcggccaaccccctcttttcctcatttcgttctcgaatctgtaagactctagcgagggcccatcggaggacccaggcgagttctcgctcacccgaaagcgaaatctcccgggcccaagtatcctcctgaggagtaggccgcggaatggtccagtcaaaagcggactgcacagaggcaacatacgtccggacaagggatttgattttctgacacgacagattcaccgcaagcgaggaaaataagagaggtgtttcaagaccttgtgtgattgcggtaggaggttgacgagcaagggctaacaatcagcctacactcttttggcgagggagggaaacagtgaatggtaagcaacacaaaagacggacctctcttagaaagttctgcgcagatggtctgcacgagaatacctagatcttccaggcccagtatctaagaaggcgaaacaagcaaagaaaaaatagagcaacaacttcgaggataagcctagattcccagagcaacgaaaccgacggaggaacccgaacgcaccacatcatttcgctcgctcataagaccccacttgatggttttccggccggtatcaaccaagggaatcgacgtgctggcaaatctccattctagttccgacgcttcatccaggtccgttggtctagcatcaaaagttgatggttttttagtttccgaccccggaggagataacggaagggctgttgagtttggtccgccggtgagacgacgacgagaaggtggagaaggtgtcgccggtatcgtttgtctgcctcttgtcttcctggagaggagaagagcttgatccgactcacttgagttgaagcttccagcttgagaagacttcccgctcaaactggatttctcatcagatgagttaccaccagcaccaccagcaccaccgacaacccctcgacggcctttgtaggacctcgactgttttcttctatttggagagagcgtgaacaaggacagcatcggatcagatattggcaagatgtatgcaagatatatatatatatatatgtatatatgtatatggatatgggaatgtggtacaacgatcaagtcaaagagcacaacgccctctctcaaagacaagcatgcaaacaaagagcaagactcttataaaagggatctggaggaggaaagaaatccatggcgactcaagataacataaccaggacggatcaagcataaagtcgagaacgtgcccctttttttccacccaggacccccttttttcccattaatggtttcatcttcctttcagccatctttcatcagtcttgttaacgtccatcatggcaattgaattcaaacaaccacacccacactcacactcacatatacgagacaagacattggatagaaccaataaatgattagacatgaaaagacaaaagataaaacagatacgataaactaagatagaaaattcaagattcagaatctatgacccaagcgtcgcgtagagttcgctgatatacacttcctccctctccctccttcaaggcctatatggtgtgaccatcataggcagctgtgctccaaagctttcttctcccttgatcctcggacggacaatcaagctgccagcatcaaaatataaggttatcagcgcatgagccaacggcccaaagatgacatgtaaataagcggaactgacaacgaaagcttctttataaagtttggccgagggtcgcaatgcgcaaacacgaacgatcgtaagagcacaaataaaacagctttgatcctgagttttcccgaaaacgcacacagaaaggacgatcagcatgacattcgactcatccttatcacagtctttgcaaaatgtctagaaactgactctacaagcgcaaatcgatagccactgttcatcccaaaagccgaccagtcaacaatcacatcttcaaaaaaaaaccccgaaaacatctagaacgtacacgcaagatctagggccactgataaaggtagacatatgggtccacacacccggcacttctttcgcggcatcactaaagttctcacccatccacctttcgggtctgaaatcatggtcgagcgtttgaacaatctccacagtcagctgtttgcattcaattgatgttggcagatgaagaagcacacaaacggattctaaaatcgagacaaacctgaagatctgaccatcaccaccccagatgtcgtccaaagtgttcaggttcaagattgctacagataaaaaggcagagaaacattcggcagaaatatcagatccgcccctcggtccgaatcaagggaaccagacttacgaataaatatactcgtccctttcgcgatcggcacctcggtcatcatctttccgttcctcgtgttcttgatcggttccgacagagggagcacatcatccttagatgccactcggagtgtcgatggaataggcgcgtagagccgaagagtctctcggcacacctagtttgagggacaaagagaaggatagatggtcgcctgagatcaaaacagggaacgaaacgcaagacatgtaacggctgcgtgatcatcgatcgggacttacagcatcaagataaggtaatgcgttaagctcatccctttttttttagccacgcgcgtgcgatgtgttgtcttcagcatcgtgtcatttccaacggagctgcaaggaaaataaagacccaaacacttacatcgagggctcatcgttctcaacctggactagctctgctctcagcttgtcttgaatctcagtgttctcgcacatcgcgtacaagcaccatgcgagtgatgtcgccgatgtctcctgtcccgcaagcatctgtcccaaagcaggagagaatgaagaatgattcagtgaggagttcatactctgggtagagtggaaggagacgaacgaaagtagagatctggccgatgacttctttatcatgcaatctctgacttgggggcagatctcgtgccatgtttgaccggactaaggaaaaagaaagaaaaaacccgatcagagagtgaaatccgacatcctttcgatgagctccagaacctcttcaaacaggcacaaagagaagttcgcagggcttactgagcgaactcaagatatccttgcccgaaaaatctttctttccaggctgaacctcggttttttcattttcatctccagcggcctgttctgttcggagggactcgagaacggcctccttcttcttggcaaccaagtctccaccaattcgttccatggtagcaagggcaataccagccgaccgagattgcgcggtaggcttagagaggaattataagtttgagaaaccatgagccacgtgcatctaacttgagttcacaagccgagactgaacaaaacgtacgataaacttcaagaaagggaaaaagttctgaaggacaagcaacaaggtaacatccgaaccgtgaacaaacatcttttggaacgcatccgccagttcattatattcagtcttcagagcattgaaatgatagtcgaagcctagttgatcaagatcgacgggcagtgtcagtacaaacatacgctcacgatcagttgaggaagaccaaaaagaagcgatacagaccagctcttccgataatgtccaatgtagctctaccaatccattccaagacatctattcgggtaggcttgtcatcctcgatcatggataagaacttgtctttgagctgatgaagaaggagaaaccgttgacatttcaaggagttcgttaggcacgattagcgggatataagatcggcacaaaagataccctaagatcaagagatgtacttcataggcatgttcaataaagacaggtgtcatatctcggatataatttcgagaaaatgaagtaacgacgatcttcctctgttgacaaaaatggagattcgaaaccgcggtcgatcagtatagggtctttcctatctaagacaaccatggactaggatagactactaacctgtctttgatgaactccacctagagccattcatcataggcatcagtcaaggtcgttctttgtacaaagatttctcacaaatcctaaaaaggagaagaagacaaaccttcagcggacaaaagacctggaaggatggcaacgcgaacagtatgattgaattcaactttgatgaccaccattggatgaaagaaaggaaaagaaaaaacagacataccagtacccagaatctcttccagaaggactctgaccctggctggtttgggatagtcatatccgttgttgagtacactgaggagcgttcgggatagtccgataggaaacagttgacaacaggacgaagaagatattagaattcaggtaaaagaaataatgaatggagactatgacagactgactagctaaccgcccgaggatcagcagtgtagaaccgttgcatctgaagaaacaaagatgccgtctttgagttttgggcagtatcaatgccaaacgagacagaagcactcacgcccatgaaaccattatatcgcagggtctttccgtatttgagcacaagagcctcatgtccaactccaggttcattgctttgcagacgaatcggaagaacaaatccgaactatgatcaacttccgacaggaaagagcaaggcgtaacacgtcgaaacagaaaaaaaagacagacttcataaggcctttcatgtttccccaaatgtagctctcgatctttggcccgggtaggttcgagtaggacgtcaaggaaggccggatatagaactggaagataaatagagagataaagagaaccggaatagatataaggattgatacccatgagggaatcagagaggctaacagagaaggcatctgtagattgtgtgatgcacacgatctgatgagagaaacagagtatgtcggaaggagaaggataagagaaggtgaaacaatttgtagaagaaagcaacctatgaggcaaaaaggaaatgcgttagattattacatagtttatcttgtattatctcatcactcccggtctctttctctgcagaccgatttaaacattccctctaatcgattcgactctatctgtttgacatatatgaacatattgttgtacagttccgagcatgatcatatcctggcctacagaggagaatcatctcgtcaaccagcttcggcatcacctctcccaccgtattgacgcgtctctgtctcgtctcgatcggtgacgcgtgaaaagggtgtgacgcgtacgacgcgtgtgtcttgcttcttcttcacgagaactccagcaagcttcctaaatctcaatacacgatcaaactcgttctcccctatcgcaacctttcaagccaaacacgattaagctggacctcaaaaatgccgtcaaggccaaagacggtttgtggaaatcctctattcttagaatgggttgaaggtaagctcccttcctttggctggaaggacctcttctccagcaggtgtgtctaaaacagtagtcagctaccttcttcttgttttgttcctgttcttaccaaaataaaaagagatgaggggcgaggcggaagagaagggaatgaagtcggcgagcacttacgccaaggctgctaattcacttagactctgtccgatcaagttcattcacccggcccaatgtgcccagttagtaggcgttggacctacgatcatcgacaggttagtatgatctcacaatgattgttgttcggattattccttgttaacatgctaaaaaaaagcaaatattcaatctctcaacttgctggtgttctgtggacaggctttcaaaaaaattagcagcacactgtaagcaaacggggatatcggagccacctttaccaggtcagtactcttcatctcccaacaggaccaccatcatcagatttcaacctgtacacgaagtcttgttcctcatgctttctaaattctccatacagagggacttcctaagacccgcaagaaagcagtacccttgtcgcaagcccgaagcccacttccagaagacaatcatattgaatttggtttcccaccgtcccaacccatcgcctctggctctggttctcaatcccaattccttccaccatctaagcgtaaagctatgacctccaacatagacggtagcgatgaagacaaggaatcatcatctgagaatggcgaacctgcattccttcgtaaaaaggattcccttcggccatccgcgctcaaagccaaaaaagctaagaagaccgctacaacaaagatgtacgtgcctgcccaaggcactggaccatatgccatccttttagctcttgtgtctcatacgaccgagcaagatcaagacgttccagtaacaaagcaagatatcattgacatcgctacgaggcatagttggtgtctcaagagcttcgtcgtgcctgaacccggaaaacatcataccgcttggaatgggttcgtcttcattcaatcaaatgtgtaatggaacaggcaatcttgcgatgcaggccgaacttctcttttatgtatttctgtcggctgaaaaatggttgttctttggcacggtctaggataaagacgttaatgaaccatgagctgatctacgccagaggtcagccagctaggtggtccctcacagaattaggatagtacgtgctatcagcttctgatttcaatcaaagaagaactttctaactgacagggttgtgttctgaaccactgttgtgaatagtgaactagcttgtcaattgcgcgcatcattggaaggtttcgcaaattcacgagaccgaccggatagagttccttatcacgaacatcagcgtcaagcggacccactcacaagaacagaaccgcctcttcggaatgttatacctccgttcgatacactcagtggatcagtacaacgctctagtgataaatctcggttcgatggggtctctagaactccagtgacgaaccaccagtctacaagcgcaaatgagaagtttggatttcatttccttggtcagtgctctctcgataaaccgtcatcaagattcacgtatcatttcatctaaatatgttgctatacatctgtatccttcttcggcggtagatcgaggaagtaataggattcgtgagattgataaggcccgtatcaaagtcgatgacagtggcgagcagcttgttcggatcgagtttctctcctcccaacaccaactgagttttgtcaaagcaagcgtcgtcgatgctgaggatgcaccctcaggacgagatcctacaaatcggccaactgttttcgggtgggtacctgtcgcggacgtccctagaattgccattgggtttccagatcaacaccttttgaatggcgctgcatcatcattaccggctactaatcgaacgttagggctagggttgccgaatgtcctccatcaaccacaaattatccctcctcaaccatcgaacccggatgtaattccgctttcagtaacaagaagtcagaattctagattacttcgatcgacctccgcctctgcttccatacctgagtcagccaaagctgattcaactttcaaccggagtgtttcctcggggcatcagacccgactattggattcatcgttcaaaactcaggtgcttgatatctccatctcaagcgttggccatcaaactttgggaccacaaaaatcttcgaatttatcaggacccgcgccattgcccatatctggacttgggcgttcattgatagctagatccaactcgatacagcatcgcctagaagtcccgattcctctgtcgtctgtgtttcacgagtctgatgagaaccgaaactactcaactactcctctaccgacgacaacaactacacaaacaggagtaggaatgacatctgacgagccgaggggtggtgtgattgccgagaacgagatgccgatagattttaagacaatgaaacccatcacatgggaagctggctcgtacgacatcctcctccttctcgatacacgagaagtccaatcgaggtccgagagagacgcgttcttagacaagattaagctgacaggcgtggatgttcaaggaagagcgttacctgtgggtgacatggtgtggatagcgaagagaagggatgggtttggaacggggttggaagaagaggtggttttagattttgtggtagaaaggaagaggttggatgatttgatcatgagtatcaaggacggaaggtttcacgaacaaaaggtaaggccggcgtttgtttctcaagagtgcgtttgtgatcaggtcgacctgatgagagagtgtggtgtcctgtgcatttaaaccgaacagcatcgactaaggaactctggaatcggccaagtgatttatctcatcgaagattacaatgtcgcctatcaagaacaggtttgggcacctcagatcgcaacggcagtctcgtctactcaagtcgttgaagggttcttcgtgaaaaggacccagagtttagatgccacagttgaatatctgaggtgtatgcatgatacaatcaaaacccttcacgaggtaagttgtctttaccttttcttcttcatatctggaacgcatcactaactccacaaaatcggttctcttcctttctcgatagggcgcaaatttgacgatcatccctgatagaaatatttctcgatcaacctacctgtccctccagtcctatctccgaaatcactccgcctcgacgcctcatcttatatcctacagcgcctatgttgatttaaactctaaatcaaactcattgacactgcacgaactttggtgtaggatgttgttaaccatacaagggatgagtgcagaaaaagtgggcgccgtcgtcgaggtttatcgaactcctatgagtctatggagagcttttcagacggcagaaagggaagaggctaagcttaccgaagcgactacggtttcaggaatcagtctcgaaccagggaaggggaaacgacaacaggacagggtgcctatggcgaagaacttgttggcggacacaatccagggcgtaggaagacggtcgattggaagagcgttaagcgcaaaggtttacgaactttttcggatggaacattattaaaaaaaattatcgataccgattaggccactcagtttcaagaacaagaaggatacacgtcattagattcggaagagagagagagtgagagcacacgaccattctatctcggacagtgcgatgtataagataacaaaaagaagagaaacgagctgcctccttcccaattattgcttgcttgcaatcttagaatccaaacaccaattctcccaactttcctatgattcctcctcctccctgagacccctgagtcccggtcgcagaacctgacacagtcgtcatcgccgaccctcctcccgaagatcgggctacagcaggggaagagggagtctggtttaatcttctgaacgccgaattggaaggagccaactgaatcggtcttccgttcgctgaagtcgaagccgagctcgagctctgttttggagtggatggcatgccgggtttaggagaagaggacagttgcaagtgagacggactggtcgaaagagatggcgtggctggatgagatgggctgaggagaccttgtctggagctagatgggtgatgaggatcctgtcaaagacatgtataaagccaaacaagcaagaaatacaagttaatgaatgatgagaatacatatcccaattcatgtttctaggacgcagacatcggaacgctgtagaactcaccgcccacttgaccccgatcatccaaactcctccgaggacctccccattatgtttaatcgccctctctgcctcggcttccgtcttgaatgtcacgctaatccagtttccaccattaggatcgggaagagccgagacaatctctccgaattgggagaaatgctgaaggagtgggtcgaggagggatgatggaggtccaaagatggttactgtagtgagaagcaaagaagaggaagacgaagaagggcctggtggggggatagaggtagcggtggagagggtgttttgctgtaatggctgggagaacgaggagtaaaagttttgactagattcgaacaaaaaaggacggtcggaggtgaattgtcagatgagatgatgagagaaaagctagtgatatgagtccgaaccactcacttttgacgaggagatgacgagtactgttgaggacatgatcacgaacaagaagacagatgaacaagcaagggtaaggatataccattccactatttcccttgttctcaaacaggaagtcaacggattacatgctaacgtacctcgatatctccagaatccatatctccgtcctcaagcgaagcggtagggggcgcatagtcttgggacggagcgacggtcactcgaaggggctgcgagttgactactctaggcgaattgtatggcgatgttctaagaaacatacagcgtgagtttgcatttcagaacgaggagaagaatatatgtacgatgtcgatagcagaatcgtaccgatcaaacagtcctccagaaccaaatcgggtggacggagggctagggaggccggaatttgtacgaaaagaccctgaatggttgagtgactgtccgttgttgttgctgccattgttgagccacgaggacgacgaatttaatgttgggtttgctctgttgggagtctctggactttgtgctcccggaggtgtctgcatatcagatgagaagaagggaaagaaatgaggaaagtaagtaaattcatcatcaagacaaaatgcaagaacgaaagagagaacaaacccccttcatgctggatgtcagatagccaggtaaatggttaggtgcaacctctggttcgtccatcttatcgtccagcaaggaatggtttccgtaagaaaaagccgaggatacagagttagcctgaccgttgacggacgaatcgatcgcccaccaggaagacggagccttggacattgcttttgataggtgagggatgaaggtgaacgaaagaaaggttgacagaagaaaaaaagaatagaagaaattgaaaattgattacaagtacaactacaaattcctattgaaatttcccaatgaactcaccttctcacggtggccccgctgacttgctccggcatctcgttcattattcatcgttcatctcatccggtgttcaccatcaacattgacctccattcttgagccacttcggaaacttatagtgacatcttgcttcctttctttcactgcacgacaccagctattcatcgataagctataaacgacaacatacatgcccttggcatctcccaattctggtcagtttgcaaacaagtccgtacccgatctcaagcaccttgcgagggtcgacaaccagcccgacttgagatcgttttctccgaaagtactcgtctcgtccgcccttaccttactcacacaggcaaagcttgcacaagacaaccaggactgggagacgttctttgtatattctagaaaggctgctaagtaggttcttgtttatgcttccaaagcttaggatgcctactgcgatgctgaaacatagaatcttctggtctctccttctttctcgttacctttccatgttgtatcgcccaaagtatcgccctacagcttgtcgaactaaattcggtctcatctaaccattcatcggcccagggaacagagaactcaaaaactctcctcccactacttcgacttacggtcagtatgctctgtcctctctgtcgcctcccgagcttctgtagctcaccgccttacttgcttgccgctggtctctttcacctcatgttatccgccacgactcatcgtccgtcattgatttctctgcctctcaatagacttcggacgaattcaagagaaacgtcagtgaagcagaacacatcctcactgctcgagatcaggcacgtaagcgctcttcggtgtcttcgtcatcggctaccatgcatcccgatccgacatccctatcatccccttcctcaccccctagcgctgctccgatgagcataaaacaacgaatggcagctcttgcaggcgcaggactcgataccggtagtgggacgccggtatcagccgctaaacgtgctcctctcgtgaagtcatccgggctagatgggttaaacgggtacaagacttcttccggtcaggtttcaccaggtatagaaaagttcagcggatcgagtccattcaatgggacttcaccctctggagtatcttctatgtttcctggaaaaggtgtcactccttcccactcgtcttcgcagccttctgtgaatccgctctccccgtccgaatcccaagtggcgccttctcaaccaataaatgccacaaaccattcgtctcactcgccttccgcttcccttccgccacctaggcatcagtcacctccacctctgtctccaacgcaacaatatcaacctcgcttgtctcagccccctccgaaacctttcaagccctctacgctgtcggcgaatgtatcccctatcatcgcttccgctccattcatagaagcagcacaacaagagagagaagatagagacacagagatcaatttctcccaaattctagagccaaatacaccatttgatgccacaacattcgaacatcaattcccaagtatcatcgagtttgagactggcacaaagtttgtcgagcctccagtcgttccctctaacggaccttccagacggtcttccgtggctgttcccatcatgaatggtaatttgtcgtcgtcgccaccctcaggtttgactaacaaatttaatccatcatcagaaaatggcgacaatatctcaaacgggtttccaatcttgcctgatgcccccacatcgttgcccgtcaaaggatctcggccattaccgtcacctcctcagaatgcggcttcactctcctccgggctccatcatgctcctacttcaactagttcatctccggtgagtagtaccagcatcagtggaggagtagtcggctcttcgaataatccctcctcggctatcgacttgcatggcctagaacttggccagccgccctcgttgtctgttacgtcttcggggtccggctcgtcctctgtcaacttggcttcactcggtcacacatccacaatctcttcatcggctgaaaatccttcagcatccatgtctgtatcgtcatcctcctcgtccacagggactggagccggtaggctttcaaaaccagaatttccgcttgccaacacaatcttcgcttctgcccttcgtcaatatcttactcaaacatcagcccgcatcctcttgttggatgttcggccttacgcagaattcagacagggccatataccccatcctctctcgctacaagaatcccctttgccagagatcgtcaacgtcgatcctcaatggttaaactcatcgacatcgctttcgtccactcaacttggagggcatctccctccggactcggcgtttcaccaacgagcatcctttgatctcgtcgtcatatacaaccaggctggtggacggaaagaagtaaaagaaggaacggtcggccggttgggagagatgatctatgagcgagaattcggtggtcagacattgaagagagcgccagtagtgctgatgggtggatgggaagggtgggaaagtgaatgtagactgccacccagtgggtttggaggattaggagtaatgaaaccgttgattcctaggtgcgtcttcttattctttgctttgctttcccttgctcctctcctcccttctcatcttgggattgcatcatgattggtccggtggtcttgaccaaacatctattgcattcgtagtataccgactagacaaggatctggctcactagatccgattcctcctgtgtcggttcctcaaagaatgggttcaaacgcttcgacttcaactcctctctccgtttcatctcctcctctaaatctgagccgaaactatcagccgatggtgagtgcagtttggatttttttacttcttctgatcatgacgcaacgcgaaattactgttgggctagtgctgatatgcgaatatgcttcaactttcatctacaagacgacatcttcccaagcgtcttaccaacctccctccacctttacgccaccctctacaatctacgagccgttttcgaaagattacacttatccttctctcccccgtccctcatcgtcaagtgccaatactgctagctcctcgttgacatacccggcaccagtgttaacatcgcccccgccactagcatcgccttcgactgcctctcctaattcaagaagacggacagattatatagaccaggcttcccaggcgtattcaggtgctccttatccctatcaacctcctatttcctcatcttctccttccgcgggaccaagctctctttcaggacctactctaagctcgatcacctcccatcattcagctaggccgagcattgactatccaaacttgaagacaggtctgggtctagggattcaacagccaccgatggcagcagcgccttcgctagagagacagtctagcagaggagcagtcgttcctgtgagaaggtcaagctcgataagtttattggacggacagacctacgggcaaacaggactcggtcaggggagaacggatgagcgagaggtcgtctattggggaaatgaatttgtgggaatgagcgggttgaagaatttgggaaacacttgttatcaaaattcaacattgcaatgtttaagtgctactgtacctttctctacgttcttcagaggtctgtatatctgttttcttacatcacattgctcgctgggtgactgatcctgcttctcctttgctctgttcatagatggtcgctggaaacgagcggtgaacacatcaaatgtattgggcacgaaaggaaatctggctcaggcgtactgctcgttgatttcgactctttggtcaagagagtttcattttgttcaaccgctatcttttagaaaatcgatcgtcaagttctcaccgatctttgacggtaccgaacaacacgactctcaagaattcctcgccttcctactcgacggtcttcacgaagatctcaaccgagtccttgtccgacccgaacctgtccctatgacgtctgagcgagaggcagagttgaatgcccttccgcctcaagtagcgggcgaaaaagaatgggtgatctatcagaaaagaaatgactcggtagtggttgatctgttccagggacagtacaggtcgaggatggaatgtctgacatgccatcaggttcgttgcgtctttctttttgtcctcctatctcctcggttctttatcttcttcaatcgcgagactcatgggaactagaaatacatttttcgttttaactagacatcgacaacgtacgacgcgttcatgtacctctctttgccagttccgaccagtcgattgaaaaccagagtgtcacttgaccagtgtctagatacattcgttcgagaggaagtgatggagaaaggaaacgcttggaattgcccgaaatgcaagaaaccgagaacggctagcaagagcctgtctctctctcgactcccgcctgtgctactcatccacctcaaacgattttcgtccaagaatggcgtgttttgggataaggctgagacagtcgtcggttcgttttcttgtcttcctcagattctttacccctttgtttccgactaacaatcttgtaactcgaattatttttggtgaatcaagactttccaatcaaatacctcgaccttacgaaatacatgcccgctccgttgtcggacaaaccggatccaaatctacaggcaaagtataggagggacgcacgaactcagactcctccatacgtttatgaactttgtgcgtctaagtttatcgtctttgaatgataggttcagtctattaacttgtagatccggtttctgctgatagatgctgtatcaaaccatactggaagcctgagcagtggtcattgtacgtatgacagtctcgactcagtcactggacgagaagaaatactgaccgataatcgatgggcaactaaatagatacggcgtatgtaaagagttcacaacagaattggaaatactgcgacgatagaacggtgaccgatgtggatgagaaaaacgtgatggttcgtttaatgtattttctatggtcttctttgtttggatgtctagcttacgctgtatgataaccttctcaatcttatctcatatcagacgaagaacgcatatatcctgttagtagatcttcgtttgtactttgcgaaagccgactacacatcaacatggtttactaaccgctcttatttctgtttaacgatctctctatagattctatcgccgagtaccagcgactcggagtttatgatgaatgaaacctatgaactgagagatcaagaagagataatcgtggttttggaatacaatagacttaatcaaagttacatatatgaattacgtaaaatatatagcc

SEQ ID NO: 258 - DNA, 34096 bp, Xanthophyllomyces dendrorhous
tatatagcctgcaaaaatgcataaccaacctctccaaatgcattcacacacctcgcatttttgtcttttttttccctcgcccctcactttttttcctccttccttctgttggtgttcagcttatcctcaagagaagtgagcacaccgtcctgagatccttgtttatttagtagttcatgtgaagctgacatacattctacgtctgtgcatgtatcatcaagtcaaaatggctgtcaagaccaccgttccctccgccgaggttagtatgcggcataggctacaatttttccttcactcttcagccccactttctccctttcctccctccgtcttatcccttcgaccataacttttctcccgataaatcgatggcttgaaagaagggacgtagaagcgggaataatctaggagtagaatcagtagcaaagttggattcaaagagactcaggagatgaaatttgaaagttggtattgagaaaggagggaaggactagatgcgacaagggctttttcttttctctttcttttctttctttggaatgccgaaagaatatcaccgttctgacttctctttcctcccggaaccggattattgatattatagcaagttgccgtccccgagtctcttctcaagaagcagcgatctgctgagaagacccgagaggagaagcttgctgctgccgctgaggcccgaaaggtacgttttgattgcaactctacctttttcaacaccgtacgctttgtccacctccatccggcattttctcaagggcaaccaagtctcgttctatactcccaaatgttgtcaacacttttccatcacacctgtcccgccgacaaatttggccttctcgactctccatatctgtttccttagaaagaggaagagtgttctgttgttaaatgatgcatacgtctatccatgacgctaattgacgactagtcttgcacgacgatgatgtcctcaagttaaccatctttcgggactgaattacgacaagctcttcttcctctccgtcctcgttctctcgaacacatctgcgtttgactttgcgatttttccatctggcccagaggctgacatagatcgtctttctgtttggtcgtttgtgtgtgaacgaatttctttgtcaatgatgttgaacttggataatctacggaactttctctccttagaccaagcgagctcaacgacaggtcatcttcaagcgagccgagcagtacactaaggagtacgctaccgccgagaaggaggagatccgactccgacgagaggctcgagcttccggtgacttctacgtccctgctcagcccaagatctactttgtgatccgaatccgagggtcagtttagatcttgtatacagtcaaaaggaagacaaaattgacattggtcctgtattttattaatcgttactcaaactacagtatcaacgagatcgctcccaagccccgaaagatcctccagctcctccgattgctgcagatcaacaacgccgtcttcgtcaaggtcaccaaggccaccgcccagatgctcaagcttgtcgagccctacgttacctacggagagcccaacgtctcggccatccgatcgcttatctacaagcgaggatacggtaaggtccagaagcagcgaatccccctttcggagaactccaccattgagaagtctctcggagagaagggaatcatctgcatcgaggatcttgttcacgagatcgctactgccggacctaacttcaaggccgcttccaacttcctctggcccttcaagctctcttcccctactggtggatggcgagctcgaaagttcaccggttacgtcgagggcggtgacgagggactcagggagaacgccatcaacgctctcatcaagcagatgaactaagcattttaaaaactacctttcccttaactttttaacgcttagtttattttcttttaacctctcatgtgaatgttgtggtgggcttgatgacatgaagaaaaaaacgcacgagacaattgtttctttgtactgaatacggatcttggggttcaaagagcaaacggatagttttggattaaaaaacggatagagaatctcaaactgagagggtaaacactcatgatcagatagttccgatagaatcacatacatcaatgaaattttgccactcagcagtccgaatcagcgttcttttcgaacggctgttcagatgaaagaagaaatttagaccacgaaacgtagggttacagtctaaggtatgtgtacgtttgtgtacacttatttctcttgacaaaaccaagtctcaacgagacaaacggaagcagaggatgcagaagaagctgacaagaaagtgacatggatgaccaaggatagacgcaaagacaaaaaggtttgaagaacaattaagagaaaagaacaaaaaaaaagagatcacatgagagccgctgatgcagatatatgttggaacaaagttcaatatgcaatatggcgaagagaaaggacaacaaagatgagtccgaaattctggctctgataagggacaatgagaagtcaaggccagaacgaaattatgcgcgagatcgtaagaaaaagaaatgccagccgaatgaagatgtaagtacgttttaagaagaaagatatgatgagggaagttgtctagcctagttccttctgaatccaacgggaaaaagcaatgaaagaacacaaaggtgagaggagagaagtgtgatcgatagagacacgaaaaaaaagatgcaagatgttcgaagtccgaaaaatatagcaagcttctttttagcgtgtcacatccggagggaaggacaactgttgctctatattttactcccatgcttcagcgacctcttcagtaacttctccggttcccgcagggcaggagaatgtgccgttgatgtagtaatgaggagcgtaggactggttcagagccggttgaacgatcaagttttgaagatgggtcttctgattgttggcgtccgtgatctcgaagaagctttgtgaagcaggggtgggggtaagaatagaggccttggtcagattgacgctgaaacaagcgagagattgactaaggagaaagaaaagttatagatggagacgaacagagagctgacgagggacgactgattgacgatccagtagaaactgttgacgccagtgatgttttcgtagcttgcgatcaacgttgtgttctggtagtacccaccatcagcgatcaccaacgagtagggttcctgtagaggtgacaaataggagtgggagtgccatcacgattatgaaacatgagtttcaaggttcaacgaagagcgaaaacggagaagtagctcaacaaaaaaaaactgaccactccaggtccggtccaggagatgttggccactccacactctgtcaggttggaaacctcgagcgtttgctgagtgattggcgcgcctgctctaggaatgacggaggccgacgcgaacgcggtcaggatgacagcaggaatgaagttcttgaaagcgagcatgttgaaggatacttgaaggtacttgagagtgggaccggcttttcgtcgatagatggatggatggatgggtggaagtcagaagtcaaaaagaagaaacgaaaaaaggctggtacaaataatatgaaactcggatggtgagctgccaagatcaaagcagctaaaaaaggataatagttgcgctaggaacagaacacgaaaacaagacagccacaaaaacaggaacagtgacagacctgaagggaagggctgcctcctgacggggccgatcaaacgagcgcagcagcgacttccatcatacctagttacgtcatcgacttctcgctcgtccgctctcatacatgggtttccatcaaatccaaaccacgaagttcttttggaacgaatccaatctagagctttcctgtaggccgttgagaactaatctataaagctcatgaatactgcccaaatgaatctcgaggagcctccactggaacgcgatctggctatggtggtagccattgcggctcgagtggccgctcctaaacaaaatggacccgatccatgggccacatcggtctgcgatcatgttcgtgtttctcctttgttacaccactttgtagctatgtttgttgaagagatcgtgaccagtcttatccgtctgctcttctcctcgtcttcctcaaaaacagctacaactgaatccggcagtcttaccggacagtccatctatttcagacatagaagccatgcgcccgattgtcactccttcaacccatgcacgagtcttgcgcgcccttgtgtactcctccattttttctttacatagaaacaaggacacagattccaaagggttctctctacttaccaagggatctcctccgcctccgatcgagtatacctcaatctcacgagcggccatttaccgaaccgccgatgtgctcaatattccctcgacaggaatcatccccgaggagacagttgtcgctgctgaacttttcaagatgctgcaagcaatatcatccgataaggctcaaagcgagctagaggagcatcaacgagtcgaaaaggctagaaaagaacgcgaagaaggttggggaggtaaatggggacgatgggcagccacaggcgcaggcgttgtcattggttctgttgctctaggtatcaccggtggagttgcagcccctgccatccttgctctcttgcctaccatcggactcctcactcctgccactgcgcctgttgttctcggcaccttctttggactcactggaggcggtctcgccggcagaagagttcgaaacaggtggagtggagtaaagcagtttgaatttgtacagattgacgacaaaatcgatcctcttggtaggccaaaaccaaatcactacagggaacaggaggccaatcgagtggaagttccatacgcggttcgaaaaaagacgagtccgaatagtgggacaaagccacctctgttggaacccaagctagaggctttatcagtctcggaagaggtggacgaggtaaataaggcgagagaagagaaagaggaaagaaacacgacgattgaaataccgtcaaaagctccttctctttcagtggttattgttgtaccaggtctgctgacagaggatgaacttgaaggtgttcgaacatggagatcaatctctgaaacatctaagaaagggcccatttctgtcatccaggcagcgtcttcgtcaccttcgtcagagaaaacctctatggacggaatggttcatccggtccccgatgatgtagaaaccaaaggacaaccgaatcaggttcttgaggagatcgaattaagaaaaattgcgttcgattacgaagacgaaaaggtgcttatgtttcgaggaagggacattttcttggctaagattgagacggagatcatgttgagtaccggaaaggagatcaatcaatggatcacgactaaggtaggctagacttcctacatcgcacagctcgcttgcttgttagaactgttgctcatttcgcttctatcatatatttcatcagcttatcagcaaagctggccgagaaatcatcaaacggacgtttgtgaacgcttgttagtcacagctatttcctttaaattagacaaagtacattggctgatacgtttgatctggcttgcttagatctatctgctgtggcattacctttgactgtttgtgagtagtggatcttactttgcacgattcctcgccttgggtgatctgatgctcacttgctgtccactatcttccttttcctttctctattccgcaagacggctgggctggcactgcattggataattcgtggatgcgagccgtatgtgaagcttcaactcaaatgatactgtactagctgaggacagatatgaacctcccgtaactctctttgtttgcataggtcgacaagtccaagaaagccggccaggtcctagcggatgttctaatttcaaaagtccaaggctctcgaccagtcgttcttgttggaacctcgctaggcgcactcaccgttttttactgtctgcttgctctcgcttcctctgattctcctgaggcgctttcaatcgtggattcggcctatttgatctctctaccctccagcccatctgaggttcaatggaagaaagcaagatcggttgtgggtaggagagttgtgaacggctggtccggaagagacattgttctgtccggagttgtcagattacatgaggttgtaggaaaggtgggtgagggaagggtcgatggcgcgtctgttgctgggttgtgtaaggtcgaaattgaagggattgagaatgttgatttgagcgctgtagtcgatggtgagttctgggcacagaatgtgtgtgctcaggttgattttactaattcggtctttttctccatcctctttttgaaccttttgctataggtcatttctcgatcaaccggccacggacgttggcggagattttgcgccttattgatactgatgcttgagaacgagataatgtcgtacatatgatcccatgtagtctttgcctctcttctttctctctttcacatttacaacctcagttggaacacaattgtcagtgtgagtataggacggagatttgacggacaagccgagaaatgggagtttatgtctgattcatttacgtaagcaacaaacacctgccattttgtattttgttcctctctggtcttcaccccttcgaccgcatcgatcatcaacccacctttgctcgcccatcatcctttcctttctaaagcaaccgagcgaccacaggaaggcatccgatagggagaaccgacatcgtatgcccttttccaagaaacgatctcttcccgtaaattcgacaactgttgggtcgccttcgtccccttcctccgctgctgccgccatccccgccatgtcccccttgtcttcccataataatgccagctcgatgctatctacttctcctacctccaggttctctcttcgttcaaagtcactcgcacccactgtctcgaaagatactttaactgctcatggttctctgctgagagtagttaacagacggtcgaacgactcaatgtccggattctctccccccgtcgtcgggttgacgtcgtcagccccgttcgctcagggaaaacaacagacgccgactttgacatcgtcgtcgtcactccctatcggaggaacagttttgagcccaggagatccgaaatacgatcctctgaaaactcccatcaccagctatccagtggatcagctcggcgtgccctcatttaaacacgaggagtttggttggtgtgccaatcaggattaccgacatgtctcccaggtaagcccgttatctcttatataaatactgcttttttcgtcgttctttcattgtttttctgaacgttgccgagagcaacggagaactgagggagggtagacgatgttcgcttcccgtaccctacgcgtttcttcccttaatccttcctttatgcatctcctcgatcaatccgatggaacgctaatcgcattttctcctgcatattctaaagtacacgaactcggaacctattcatcaagaacccgttgaacctccgtactacgtctttctcaccacctatgtcaggtaagttcatacttactgaatctcacatcaacttctggctagttgagatataagattcgtctgatacagtgttactttcgattccttgtcagttatttgctcctcatctttgtaggacatatgagggactttttcggaaaacgaatgtatccttcgttctttcgagagcttatgccgcatgatgtgagtatttcgtttttcatacttgttatctcctgcgagataatcaacaaggtacttacgactcttgccatcgtcccctcatcctcataacagggatacgccgctctgaactcggattttgattcgttctacacccgtcgcttgaaaactcgaatcgaggactgcttctcacacccggttacgggtgtgcccggtcgatccattcagacattcgaccgatcatcaaacgattcaaacctgaccttccagtacccaggcacgaagacacgatgcctaaatatctcgtcttacaactatctcggatttgcccaggctacgggcggatgcgccgatgcggtcgaggaggccatcaaacgttacggagtcaccgccgctggggctcggctggatgcgtccacgttggatcttcacatccaagcagaatcgcttgtcgccaagtttgttggtaaagaggacgcgatggtggtctccatgggtttcgccacaaattcgactacaatccctgccttggtcagcaagggatgtctcgttatctcggatgagtttaatcattcctccatccgattcggagtcaggctctcgggggccagcgttaggcaattcaagcataacgacatgaaggatctcgagaatttgcttagagaggtcatcagtcagggccagcccaggacgcatagaccatggaaaaagatcatggtgattgtggagggtctctattcaatggaaggtaccctagttgatctaccaaggttgattcagctgaaggaaaagtacaaggttcgtgtttttcatctacatgtcggtcctttctcatttcgctatcgccttgtgtctcatccttcgactgtttttatcgaaaacacacagttttatctctacgtcgatgaagcacattctattggagctcttggaccaaacgggcgaggtgtatgcgattatttcagtatcgacccccgaaacatcgacatcttgatgggaacccttaccaaatctttcggagccgccggtggctacatcgctgccgacaaatcgttgatcagccgccttcgacttcgatcacatgcaatgtgttatgccgaggcaatgtcacccgccgtgatcacccagatcatcgcttccataggatctatcatgggtattgctcctcccctggcacttcctgcacccgataacagtaacgttcaaacagaaggacactcaaccaccgttcaaaccggggtgatctatgatgcgccagtctatggacccgcgccagcttcaggtcttccttcttggatgaacttgccgccaaacctcatgaatggaacagagggaagggaacgattaagaaggctggccttcaacgcgaggtatctctctggaggtctcaagaagcttggattgttggttcttgttcccttgtgtgatagttgatgatcgagatcacacgaacttaacatttctttttttccttttgttcaattctcacagcatcgtttatggtagcagggattcaccaattgtccccatgttaacgtttaatcctgccaagatgccgcttttctcccgaatgatgtttgatcggttaggcggccctgataccacaccaatagtgttagttctgtgttttctgcttatcgctcctcatgctgctcgtactgacgtctctgtccatttttttttcagcgttgtcgttgttggttaccctgctacaccgctcgtgacgagcagagttcgattctgtgttagcgctgctcacactaaagacgatattgatattattctacgagcatgtgatgagattggcgacgttcttgatctcaagcagacttcgccggaaggcggaaggtggaagttggaggatgtactggcgaacgcgaaggagatctcttcggccccatgagttctggttgagttccacttgtgaagaggagtaaaatggaacagggagggaggaaaggaattcctcttgttttatatttcatccgatttatctatattcagtttgattcgatcaatacgtaattcaccggcggacatttcgctttttttctgcttcttctctgcttcgtcatgtcacctgccccttcttttccttcttcttccttacgcctcgctcttctttatcttgcttcctcgcgaggcgtgttctacgtaccttcaaatggttcggttccatttcgcgtacacctttacaggtcggccgcatggcgacacgttggcctcattctatcccaaactgtttttgacttttttccctttctttacaagatgacgtctcaacgccgatctatcaccttctctaatactcaaattgacttgcccgtccatccgttatagagtacccttttcttcttctactttatctgttttctcttcatatagtaatttgcccaattcagatcttataatgatcatctggcaggaacaataaagaagattcatccatgctctgcttcgcgacaagtctctaaatctctccgtcttcgagatcatctggattagacggaacggtgatcttcgccctctgctcagaagcgatttccgacaaataaaccaaaggaaaaagacaaaaccagggaatacagattcaatagatcagttacgaactaaagatgagggaacgaagaaaagcaaaagaacgaaccttcgaggctcggtcatcaacatccctatccttatccttctccctgtccctcgtcgaagacctgtcctttcttctatctgacgtatgggtagctgtggacggaaccccatcaaagtaatccataggagcatctcttgatcgatggctttccaaatctggtcttcgacgatctctatccctatattcacgggaatgatcgacggatcggtctttccgagagttcaagtcctcttctgcttgttctcggatcttttccttggttgattaaattcagtttgtgatgataagaaaatatagagagcaagaatcagtaacgttgatcgtggtaaggtcatttgtaggagagcggaatatctaccttttgccgtttgacgaatttagagtaggtgtacttcctatcttcctcatctgtcagctcgttaaatagcttaattgtctgtaatcgaggaatcgcctattgagatagtgtttcaaaaatcacaaatcacgaattttaaacatgtcaacgagataaactcttggatggagagatgctacagaagtaagaatacatacgtcttcgtaggtagcctcgagatcaagaggtggctcgatttttttcatttcgtaccgaagatcatccatcagatgtcttctttttcgttctgcccgtcttgcctcctccgccgctctgtacgcaagcttatcgtgaatctgtattataccaacaagagagaaaaggtagggtcaacaccctataccaatgctcgaaagaatacgggaacattgaactgactagctcgaaaaccaatcggtcttcatcttcttccatcctagggatatccaaatctgttgatttcgctttctccaacgcttgttcgaaggcttcgaatgaggtttctagatcaaacacaaacccagatcttgcaaacacatctcttacatctccagagagatgttcgagccgttgatcgagatcgtcaactacatcttggaacatttcaagtggcgttgaacctggcttgccaaggagggcgaggtatcgctcatcctctgcgaaccgggggagagtctttttccactttgattttgcagtgagtatttttttggctacgagttcgagaagaaggttctgttttgatgttcaagtgtgttctgtcaattttgttctaccattctcgaaaacacgcacagaatatcgcaagaacaaaccttgaaactctccctggcctttctcgcctcccgaagtctttccgattttttcttcctaatctcaatgtcgtgctccagctctaactccttcatcctttcttcgaacaatacaagaatctctagtggttccacagaacgcaagtacgcgtctgatctccattcgttggagccaagaactagttcctcagcttcgcgccatcgactcgagaccgtcaagtcaagcgatttgaagagacttgtcagtttagcaatgttttgtcgtcgagtttctctaaggtcggcctgttaggggagataaagatgaacagaggaaataagaagaagggagtcagggttcaacacatctcaagtcggatcaagaagagataaggacaggccgactgactgattctctgttcctcagctcagagatgaactcgtcaaaaagcgacttgcgctcctcctcctgagtttgcttccagaccgaagaatcctgaagaagcctatcgacagttcggaaggtagagtatggtttgacagacggtgtttctgacaagagttttttgtactgaggtcgaagccgttctagtcgggcttccttttcttctgtcttccgtgctttcgtctcggcgatgaactagtcaagaggagaggcatgtcagaattttcctccgtgttgtgtcaggaataaaaaaaggaaaggatgaaatgaagacaagagatagaccttagtgaaaaccgccttcttctcggccaagcttcccaaactcttgtagagcgggtcagtgatgatggctctcatggtgacatcccaggtggaaccgatgtccacgcctgcctttttcaaaaggtatctgaacgcttcttcggcttcctcctgagtgggccaacctccatcggggattacatacttgtcggctaccggagcccgaggagcaggaatcgaatcagctggagacatacccacagaaggcttaatgggaacagcagcggccgaaggtgatggggatggcatttgaactgctggaggaggaaagttcatcaccttgactggtggtggaggaggcggagcgagcgaagcagacacccgttctagcaggagaagtagctcttctggcattgtccactgtttcagtcattgagttcacgcgtaagaatcaatcgagaagctctagagaagagaggcgggcaagaaagttccagatatattgccacttaccacagattctttcgtcactttattcacccaatacttccgaccttttgctacatactccttccacgcggtctgagccatcgcccgctcgaacggagtcttgagggcgtccggcttttcccagacagagactttgtttacggtgtcataccaactataggaaggcaaagtatgttagtgaagagaaataagaccaatccagcaaaggttgacaacaaacgagagtcgcgacgaagatcaggcatgccaacttactacatcctgccctctgcattggtgtgttcggtctaaacgccgtgcacacgacagtcaattacagaaacaagatgataagatgcatgcactgatcagccgaagttcatgaaacatgacagcaagcgacaaacgaagagagcttacataggaaggaacagcggcccctccgggtgttacggcaccagccggacttgcctccgaggcaacaccgacagcagctggcgtggctggtgtagccggggtagtcggaactggagagggggatgcgtccatctgatgatgaatatgttggatgaacgaggctagacagacgattcgaatttatctaactggccggtgatggttgatagttagaaaaagtaggtttgtctgttcgtgcgttctctcgtgcactctttgttgctgcaactccgtactcgagctgatgaccatctaacatcgggaaagatcgcatcttgttaccaatgatctactgatagtattctgattcgtatccttcgtttataatagatgagaacctagaagatttattctcaatctcgcttgaccggcatcactattggtacaagtgtaatccagatacactgatacgcatttgaagtatgtttcgctcctccaagtcactcaacacatcaagtttattgtttggagaatcatgaacggtagctgcttctgcgctcaaagagtattatccacaacagcgtgaatgattggaggattgacttgttgaaacatctcgcatatttggcagatttatttgatggcacgtcgaatcattgaacatctcctctttttctcctctaaaagcatttgttgtatctgtagtgttttgtctattcattgtttgttcacatgcttcacgagacgatatgataattactatttcttgatatgttcagttgcctgtccgttgagttatgtatgtatgaatacatagatagacgagtttgggagaagagatgcatttctaagtgaagaacaagtcgacatcctccatcttgttcacaagaccatcagtcgctcgataccctttcctcttgatcataacttctgaacttaagtgttttatatgatgcgctgctgttggtgtcatgtatgcgagttggtctttcctggtggagaggcgaccagctatctttacaaagtccatactgtccgatataactaatcgatggtattattagaactggcatcatgatctatcatattttctctgtccgagtccctcccttctgtcgcgaatgttgctcactagatgtatcgtgccatctcattggtctatagtgacttaagcatcgtattcagagtgtcgatttgctaggctagtgaaagcccgcctacgtcatcctccactcatcagatggctaagaggtcaagaattcatcgatgtggaggaatcactcagaatgcagagaatgattgagaaccacccaactgacgcgcaacagcaacggcgccgagaacgtcttctgaccgaggggactgaccagcaggaagcttaacgttcggttgaattaacatcaaagcccgttctgtttgagaagggaatcggtctttccacgttgctcgggttaaacaggaggtatcctgaccatgctctttcgactcgtccgttcgtccgtccgtccgttctgatcggctgcatgtccaatggctttaccggcttcgcttgcagctattctcggccatgtggactctcttcgttgagactataaagatcacagactcctagcaaatctatacatccatcttgtacccatctcaataccatctgatatcactccatacacttaaaccactttgtcgaagtcgctatgaaagtgtgtattcgctcgatgacattacatttaatcaatcaacatcggagctgacactgatcatgacactgatcatgacactgctcgtcttaatccaaccaggttctcgctatcttgtatgttggaggaaaggcagccgaagaagaatcccggctccttggcacagtagagaatagcgtaaggcctggtcttcacagtttctcttccatcggctaaccttacgcctgtgtcatgtctacctctcgcttcttttgaccatcctttctcaaaccttcttagcttggaatcaaagattggctcgagagccaaggtcacaccttagtcgtcactgacgacaaggaaggcgcctcgtctgtctttcagaaggaactcaaggatgtaagtgattcttctgattatacatgatgggaaacgtgaagctttatctgattgattctccatccagaccgatatcctgatctcgactcctttccatcccgcgtacctcacggctgatctactctcaaaagagaaatctcctaacctcaaactctgtgtcactgcgggagtaggatccgatcacgtcgacctcaacgaatgtaacaagcgcaagatcactgtcgctgagtgtgtatcctccgtttagttcaattgcttcgcctcggaaccgaatacccagaattgatgtctaatgtatcttgaatacagagtgtctggttcgaacgtcgtcagtgtcgccgagcatgtcattatgaccatccttctcttggtcagaaatttcatacgtgagtagttctttacgatcgatccgtctcctgaataccgtctaatattctatctctgtacctaattcccagccgctcatgagcaaaccgtgcgaggaaactggaatgtagccgaggttgcaaggaacgccttcgatctcgaaggaaaggtctgtaccatcaatcgtttacaatttcccgtgcaatattctcgaatagattttcaagtagcaattctcctatacctcgttgtgcgccaggtctgcggtgtaatcggagccggtcgtattggataccgaggtatggtcttccgaagaatagagagagcttgtaggcttgatctgaacatgtcatctcatcaatcttgttgcgcttatgattttcagttctccaacgactcgtccccttcaactgcaaagaacttctctactatgattatactccaattcctgaccgtgagagataaaattccaggcaatctttctcgtgtgctctcgccgtctcactaacttttattaactcttgacgtgaatccaaaagagtatgccaacgaattcaaacaccgacgggtagatgatttcaacgagttcctttctcagtgcgacgttatcagtgttgtcagtcttttgcaatcctttttctgtatatgtagatagcgcggcatcgaaaacaagacagaaggaactgaagtactcagcacttgattttggcgtattggatccataacagaattgccctctacacgaaaagacgaggaacctgatcaacaaagacactctgaaacactttaagaaaggcaagtattcttcactttctcttcgactgttcgtgaacttgcttgaacgcgctcttcacacctgctcataaaatctgcgcttcctgtattccgctgaataaaggcgcctggcttgtcaacacggcacgaggcgcaatctgcaatgctgaggacgtaagagatgctctggagagcggacaacttgccggctatggcggtgatggttggtggtttcatctgatacgctcccataattcttttgtaggcttgagcagaacattgaccggtcacgctcggtcttaattagtgtggaatgttcaacctgctcccaaggaccatccttggaggaccatgacgaaccctcttggaggagggcaagtattaaccacccgatttacctttgtcttgcctctgtcgctgacttctctgttctcgtcatatcaatacgtacagaaatggaatggttccccatatgtctggaacaactctcgatgctcagaagtacgtgactagtctggcagcgcatgatatatattgaaggaataatgcttattttacaacctgaaacattccggggtttttgcttgtgatattctatagacgatacgcagacggaacgaaactgatcatcgaacaattccttgctggaaaacccattgacaagcagaacttgatcgtcgccgatggacaagtttgttcttttcttttcctctgtagatttgggtttatcctagtctatccagtctaatcctcttccattgtcatgttttctacctatctcttgtgggtgaatagtacgcgacgctagcctacggacagcgaaaagataacaaataaggttttacctcgtttccacggcctgtattcttttttattttactcttcactctgtacttcttagtgtgtcaatacatccatccgttcgttcgttcgttgaatcatctgcactactagtcattctgccttgcagccctcgttgcccttaggtccatatacattttccctcatgcgtcccactgtttctcttgagatatttgacaacacaagctacttatttggtggctggctttccgaaagtcgacctcgagataaggagcaaagagatgaaggggatcatgtactattgatatggcatttgacacaaattggcccttcctcctcctctatccaaagcggctgaattcatataaaccaagtaagggatgagagaacagtcagtttctcgggataaaccagtcaaaaattggaaagtgataagagaaacatacagaatacagagatggacatcgactacattgcgatggtgatccaccatgtcctgactgacggccttcgtccccattcgtgtcaccattcatatttgcgttcatgatcccattcccattcccattcaaacttgaactctcggttccgttcgtgaatccacatccattctcaatctcatccgtccctttctcttctattttgattgttctttcatctggccccacaaattctgactctgtatcaataggtcgatatgtcaaagacccggacccgagccgatcgatgaataagctttccaaaacttctgctttttgtaataatgggaatgttcctgaaggaatcggcctcttgtaagtcgaagtgaagacttcgagcgccgtctatttgaaagaagagaagaaagagaaatcatacacaagatttcgaaacaatcagtactcgtccatgacagccataagggaaggcagcggatagcgtataaataatggaaaaattattcactttgttttgtgtttcatctagatcgtgaagtgggtaaatgattcgtccatcgaggttgtgatctttacaccaaataccagggtgcatcctaaatccataaacggggagacgtgtgtggtcagtctttatgtaacccgactaaacagaaaaaggaaggatatgaaaagatgatcgtatttgtataagaaatccactaacattcctttctcagccctgaaagatattacattgacatccctgcgactcgattttacctgataccatcgggtcatagtcagtcgttgatgaatatgaaattgcgttttcgtctcctcaaaaatagtatagcagagctcgaacgtaaggtcaaacctaccaaggtgatctcgaaaccgaaagtgaagccagctttgaaagcacatgacacgtgaaagtgactggtgttgcagtccatacattcaattacagctccttgacctgattttccacatagtgtgcaccgctttacatgtacaatacaccacgagaagaagtgaatagattagcagtgcatacttcagagacttagagatccgaaaaaaaacagtatgagacaacaggaaacacgcaccgctgcccaagattcataggcaacatgttcgactccttctattttactaagatgtttcggatcgttatatcgtacaggatgaaacacactacaaagtagatgagcccaatttccgtttatcgtagatttgagcgcgtgtaattggcttggttccggataaactgctttggcctttcctttgccaatagaaggtttaaaggggtttggctcagaggggcaaaagatgcaggtataatcctacggcggggtaaacattttggagacacaaaaagttaggggagttcatcaagaccatgtagtgagagatcatataaaccgggatctgaccgagtaacttactaatcgagcatgatggtgattggcatcgaaacaaagctcgcatacttgagtattaggagatgaagaagttactcggaaagacccataacaacctatagcattcaatagaaagaccccacagcatcgttagaaaagaaagtcaagagaaaaaacaacgcatcatcgacacactgaccttcgtgagctgcgaaatgacatatactgcaaaaacttaatgtgctactgggttcatctcgatggcagcatgcacattttgttggtgggggaggtggaggtggtgggggtagtggcgtagatgcaacaggagcaagcgcccgtttttttgtttgaggtgatgtgaggactgaaggtggtggtgtagagttttgagtaacctacgaagaagtcccgcaaagagaacatatggatagaaaaaacattagaaacaggtgaatcttgactatggtcaaacaaatatcttcaaaagtatcttaccctaactctctttcgagggcctgtaggtaccgccggtggcgattctcgtaagagcttatctgatttcacgacttcctctggcctaagaggtctatttgggacctggccatacttcagaaaataggccttgcacgactcgcagtagactcccgacagggctgctctgagcattgtccaccaacgagaggaaagctttgttgaacaagatgaacatgacgttttgggtgtgacgtctttatataaaagatccgattcttcgagtaggtgactgttggcgccgaagagtgacggctggggaggtagtttacgtagcgaaggagaagacgcgcgttgttcgaagtatgctcgcagagctccttctttgaagatctgatagtaccgaacggtttcagcaggagatcggccaatccttgttgacgcttcatgagcatctagtcctcctttttcagaaagtgaattgtctaaaagctctatctctttaggagagaactacgttcgaagaaaatatccttcagacatgaatataccgcaaggatgctagtaagcaacgaacacggggactcacagagatgatatccagttcttgaggtgtacaattgattaattggtcgtatgcttcctgaggagaatatgacatataaagatgaacagctctggtcaaaacgcccagatagtaggagggcactggtagtctagctaatcgaactcgagccatgaaacagttcacttttgaaattcgtagaacagaatcaagagaaaatgagacagttaacacgtttgcctcggacaaaaggtgaagaaagtttgtaagtaaatagtttcttacgttcgtcgacaaattcaggaggtttactttgcagctccactgtatcatctccgcctcgttcatagacatctggtgattgaaagatcacgatcaatactcatgtaatcacaaccgatgacgatacgcaataaaacttgagccaaagaacaagactcactctcaggacgcggttctgtcgaggagttagcctcaggtataaattgagcttgataacggggacccaggcgagaaacaacttgagggaatatgggatcatcggggtcttcgaaagtttgtaatgaagtgacgtacgttgagtttctagatatatcgaagtgcacatgagagaaaaaagcagacatacctaatgtatcttcggctaccgtattttgactatcatttaccataaaaatcggaaagtcaacatccaaatacatatgtctccgaatgctatacattcgaacagaaaagagatcgacttgcccaaagtatcgataaggaaatccacgaaagtacttcacaactttactccccgctatcttcttcgaatttttcgagattgtcactggttgtattgcctttttctttattccaaccttccagccgtccacttcgtcttcgtccagcagtgtacacggtgcacaggcccagctattacatgcgaaacaagtcaattggctttcctattttacaaaccaagagagatctcaagataaaaagatacttacccaaatcctttcgctggtttcgagattattggcggagtaagacaatccatatggtataatttgaggcaccgactacgaaagagaaacagaatacatgattagcatgctatgatactcgtaaaaccaagttttcattttggttacaaagatgatactcactagcaagttactgtccgtcgtggatctgcccatctatcacaaaccgagcaaacctgatagggctccgaccattcgacaaggctctccttttcacataggatgtatgagtagcgtgaagccaaagtgctcaatatatggcttggcactatttcaaacgaggcacgttgaagacggtaatcagtgatctcgcaaactgacatcttctatatagcctcgagaaactcttacaattgcgaatctgagaaacaagcatgacctcaaactcttgtctatgaaagtgatccaactttcagtctttgtggtgaaagcgacgcgcgcgccaagtagatggggatagtggaaggctcacttgatgtattggtcaaaaaaccggaagtaatagaaatgatctggtttttgtttccctatcggccattgttgttcccaattttgtacaacgtcagttaacttcttattcttgaaatgatgaaggagtcgcgtgtcttcttcattcacgtgagaatgcaggatagaagttggatgaactcacatgcgctgagattttcgatttggtctttatgcaagactgtaattccgtcattcatggtcaaacccacgtccacattaacccatcaactatcaggcgattgaagagaatagaaggacacgagataaagaactggaatgttttacaaaccaacgcattttcctattatatcagaggtcgacctaacggatgaatttatccccgcgaataaaagacgcgggtctaactgccttgcggtaaactatcagaaataaacgtatattccgagattaagagacaaatgatctacaccgtcagaaactgaaattggagagacaaaacaagaactccagtccagagaggatttacatcactgttcaattgtttccgaagaatcacccataaaatcgagagaggagattcaattaaatgaatatgtgaaggcgtttataagatcatcgatgggtagaatcaggttgagacgtacccaggtctagagacgacaggttgtgtaattaattcaatgcattaatacagatcatgttaatctccatcacatctggttcaggggacttctcccgcgagaagaaagaggaaatgaggaagagaaaaagtcgaacctgaaatagtaggctaacttgacatccagctcttccttctttcgactaacgattgaggaacttgatccggaattgcctagagaaggcggcaatgttgtaggtccagcgaaacccatcactctggccacgatcgatggttgaccgacgaatggagcagatatgtagacgtgatctgtaatgattgattattcccgaataaaatgtacgtttgtatacgatgatcgggattcagtaaaaaccaagacaaacagacagaggagatcaatttcaacagtcccatcgaattctccagagtgacttgcaaacaaagagatgagcgggacatgatacagagacaagaatatcataccatttacatgtacggtttctcctgtttctagtcgaacagaagaaactatagtcgaaccccctacggaaccagagctaaacccagaaccagacttcattcctttaccttcccaaccgaatgatcttatctagtattctctttcctctgaggaagactttctcagttcagtgcttctgcagatgattatgttcacacaaggttgatcagatgatctattgattggaactagttttcttgtttgaaagaatcttgagaaatgggattgtcagggggatattctatcctcaagatatagcccagtcgccgaggtaggcggaggagtcagatcagtcattcactcaagcaggaaggaaaggaggaaaagtaactcagatacgaacaaaagaaacaccctgtaaaggatcaagtcaggttttgcttcgccttcttcttcgattctcaaagagaggaaggttgagagtgggggaatggaggagaacggtcagacaacatcacgcgcatgggcaatgtctactccccagcgagcggctcagcgcggcatttgctgatttttcgcacaaatcactgatttctagacttgttcctttctggatccatcaatttgctcttcatataagttgcttccaattcaatttagtcaggacattcaagagatgggagtcaatggtgaattttcttcatcaagatcacctccgaagctctcaaaagatgtaagacgcaaggtgtatgccacaacggtatctatgtcggatcacgcgaacgaagattgtacagagattgccagcctgtaaaacccaaagagattgtaaccaaaagagggaggaaaaaggaacaaaagagggaagaaacggaggaaacacatcggaaacgagagtgaagaaggaaaacaagccaaaaagcaaggtgttatatttatttattttgaatcttcgccgacctctttcataacttttgaaacttttaatatcccgttcaagcagaagggacctgcttgtactgtcgacgccacatgctgtcaatctctcccaagtagtacgatccaggccagagatcgtcaagcgaaccgatgggcgaatatgacacggcgttgtgagtctcttctcggacctgtgtcgaagcgccgagcgaatttcaaaccaaaagagaccgattcaagaaggttgttagcggttgacaaagaccacggtccacaaaaaaagtcattatccaacgtaccttcagagctttgacaaagtcatcacaggggacaatcttcatgttgctcaatcggttgttgagatcaagcttctcagagatgaaagcggttgagctcttgaccttaagagcatagaaagaagcagcagctccagatccgtaggcgtagagagcaatgcgcttgccgacctgttcaagagaaagccagcattaaagaaaagagttcagttcaattgataaggaagagatgattgggatagagatcaagacttacgagctcgtcaccaggaacattagagaacaaacttgcgagagcaccgaagagagaggcggtgtacaagtttccgagctgtcggacggtggtcattccaggctcaacctgcttgttgaaagaagacttggaggcagcaatcagagatttctcgacattcttgtctgaaagacttttcttcatgtccaaagtagcaagctcggctggcacctcagcaaaaaccgggtcgttggggttgtttcggaagtcattgtacaactagataaggtgattcaagagatgcataaataatgagtaccagaaacctaaaagtttttatctcaagctaagagttacaaaaagactgcttacaagtcgggcgtggcctttgacaacctgctttccgtaaggactgttccaacaagataatatgatgacacgaattaactccgttgatcggttgaatttaaggagaatacagaagatgacgcttacctgtggaacaaaaggtaatcgaacgacgcagcactgacaccggcaacctcggtgtgtccgttggtgacaccgttagtcttgggtcctccaaatcgcttggcatactttgttcggtaagcttcataggccttgtcaatggcgttgacgtaggaagtgacggagagaggtccatcgacaatgggctatttggaggagaaggtttcagagttaattcaatggacaatatttgatcaaaaacaaatataggaggtgcgcagacgaacgtattcactataaagcaacaaacgattcgaaggatacgagcaccccgaattagtgtaagactctcccaagcgcaaacttcaaaatttgaacatacgaagaaagattaggcttgtagaagtcccaagcgttggtcatgaagtttccgtggacggctagattgatgagaatgacggataagggttgtttcagccgctggcgtggaagaaaatgacggattggaactcacgctcgaagacgacgggagcgtcgggtccgatgaggatggcgcaagcaccagcacctccggcaggtcgggcagcaccctcggcgtagatggcaatgtctccgcagaagacaatggcatttcttccgtcccaagaggatgactcgatccagttgacggcattgaacagggccgcggtagaaccgtagcaggcattcttggagtcgataccctcaatatctgtgttgccgtgggactcgaacaagtccataaggactgtcttgacagatttggacttgtcaatgatggactcagttccgacatcaattcgaccgattgacttgggatcaacgttgtactttgatagaagaccggaaacagctaacaatcaaatggaattgcaaaacggagaaaggtgtcagtgagatgcgcttgggcctttttcctgtcgattgctgaaacggaagagactgaccgttcaaggcgaacgagttgatgtcctcagtgtcgtcggtgaaggccatgaagttgttgccgagaccgatggtgtactttccggaaggaaccccatcaaaagcctcgagatccttgtgagcgatggcctgatcgagagaaatcgcggtcagtgttgtatttcgcgtcgggagatattagtagaaaatgaacaagatcaaagaagaatggacggaagcaaaagagatgaaacagtcgcccatatgagggcgagggatcgaacatgggaatagagagagaatgcagaagagagaatagttacgcactcgtcgaggaaagtagatctacagaaggagtagcgcattggaaagaaagatgacatgaatcgagaagggttgttttgtttgatgaagaaaaaaaaaggaagaaccggtcagtcgactaaagatgattaaagattgaacacaaacagaattgaacaacatacctccataccgagaattccaacatctttgggtcgctgttcggtagtagaagtgtacataactggatatctagattgagattgtgtatggttttgtgggtgtggtaagaattcggagagaacacggtagacgttttattcttttctcttctggcttctttttttgtgtctaaaatgggacgatcaaagtaagaaaacaagacgggtaaataactaaatggttacaaagtcgtccgatcgtaagacttcgtttatctgccgcaattcaagtggagtcacgtgtggtgttacatagccctgggagtgggctcgttccttgtccatccgcgtactcaaggtcaatcatctatcaatacctcgtccttacgtttcagacgaaaccctcttggaggacacgatggaaggtgatttgtccagtggattatacgaaaatttcttttttgtcatagtcctcattcgctgatgatctttcgctacttcttcacctttcaaagcttcctcactcgcctatatcgatacggtgtactctgccgactcagtagagttctcacatagacatccagatatctttgctgttgggacctatcagttagagaaacctgtggaacagactgctgtcaaggaaagcaacgggtcaggagacgagagtgacgatggtgagccaacgcgtacacctgccgcaaagaggaaaggccgatgcttggtctacagaactgacggccaaggtatgtaagttcgagttttctcgctcagcttgataaacttgcgctgtcgacttgacagtctgtctactttttattcttttctgtccgcatcagggaggagcttcaaagaatcgaaggacctgccatcttggacatgaaatggttggttcgtctttttgaaagcaaacagagaaatctcgttcggtttgactagcatatcagtctgcatatgtatctcactcgcaatgacctatgtttgagcttaggaaacctacttctgatccatcggaaccttccattctcgggatcgccgatgcagaaggtcgactggtcacccatagatgggacgatactctcgttcgcccctttcctttcttgccttcttcaatctggacaaagtttgacattatccttcacatacccccggaaataatctagaataaacttgtggaggttcaaactcttcaggtgaccgacccaaaaactctcgttctctctttagactggtccaatagggtaaacccgtacgtttctccctctctccctgtctagctaaatgaatggacttcgttcttgacgatataacactcataaacacacatatacaaccacgttgttagtgcctcttcggcttccctaatcacttcgctctcttcgatggaactttctcatctgaaatacacttcaaccggagaactagaggtggaaagaacgtggaaagcgcacgattttgaaccctgggttgcttcctgggacggctggaaccaaaacattctgtactctggtatgcatggcatcatctgccccacgccctcttctttattcgaagaaaattctatccaagctcatgtcaaacaccactgtgcgctctcattgttttaaggcggagatgattgtaagcttaaagcttgggatgtcaggtcggccgaggacgaccaaccaatctggaccaacaagaggtgagttgtcgtctggaagttcgtttgtctttatcgaagactgatattttgtaatcttcactctcaattcatagattcgatgcgggcgtgacatgcatccagacttctcctcataaacccaacctaattgctgtcggatcgtaagcgggtgattctcctgttttcgatcaaatttcgcaggaatactcgatttgacatcaatctttcaacttttctccataatccttggtttatgaaaacatgaagctacaacgaaactgtcacgttacttgatcctcgatacccactccgaccacttgtcgatccaatccccataggaggaggtgcctggcgaatcaaatggcacccgtctcaatccagacagaacgaccttctcgttgcatgcatgcacgatggcttcaaagtcatcagactcgacggttcaactgtcgagagaactgatcagaacgacggagaggcagaatggaaacttcaaagcttggagcttctgacgaggtttgacggtcatgagagtttggcgtatggagtagactggagtagcgcagctgttgaagagggaaaggaaggatcgttagtgggtagcgcgtcgttctacgaccatgcgttgcatctatggagagcatgatctgccttgatattctacctttgtctcttgcctcgcaggtacgcatcagaggttgctacatctaattgaacatatttatgtacgaagacgaaaccaacgaaagaaattagacgagaggtaatggaaagacaagaatcaaccgcgcggcctgcctctgccacttccgctccgactggagctatttgaaccaaatcctgaagatccattagccgaaggacctgtcggttgtctatgtatgctactcgatcctccattcccttcttttgccgcattatggtttttgcttccatccccagaacctcgtgaaggctttgtccccgaatctgtggtccccgtagcgaatatcctctccctagcctttctatattcttcctctctttcagtcaaagacctacccgctccagcaggcggcgtggttcctctactcccaccaggggagttattggttgagttcgtaggtctcttaagaagtgtgattttgggtgttggactcgactgtgaaacagtgccaggtggaatgctgaaattggtgtttgggttgaggtacatgccatattgaggcgtataaggaggattgaaaacaggagaagggccagtggatcgacgggcgaatgtcgagttggacccgtcgtgcagagacgggaaattatgggaatacataagtggagctggagtatttctataaagaacgagtaagagaaaggaaaccaaagagagcggcaaaattaggagagaggcatctgaagaagtagaacaagtcgtgaataggaggacaagaagtcacatacgcagcttcccagatctgacggttttgatcccatccacaagccgttgtccttgctgctgaaggtcctgatggagttctggtccattcatcgaattcgttctgagcattgttctcatctactagaatggtcgttggtaccatacgagacggaggaagaggaacctcagtccggttgggtacaaatacatttgatctggggttcagttctgtctaggacatttattttccacagccaacaaacacacccatgcaaacataaggattgacagaaccaaagcaaacaaagaaatgggtcggccaagtgcttctccaacgatatggttgggtaaccaaaaatcagaatacaaagaaaagtgacaacgtacttgggtctcccaatcttcgacgtcgacagaactgcctgttgggactataggcatagacatggaggacaagacactgcagggagttttaatagagccagtgtcaatggaagagaaagaaaagagccaccagagatcagaaggatgaggttgtctgtataactgttgcacaacaggctgttgtagaaaacatagagaaaacatagagaaaacaggatgtcggaacaataagccggctatcatacatagacaaaatatttgatatgtggtataagataaaaaggcaactttttaggtgttactcctatctgtcctcatcaacctcaactgaacattacctcgcttactgtgtctcatgaaatttaatttagtctacactctgataccagaggttctgagttctagttggcgcacatagaagacacaacttcgctcggtttgctcttccctctcaatgccaaatgatgctagttacaactacaacacacaacgcttgatcgttgaatgagtacatgacggttgaataatcatgctatataaatactgaattatgcgtcttctgatgcgcccccagacgttttcctgagacccttcatcttcctcgttctaaaaagatcatccgaaatcagactcgaaaactttgtgggtgaagatcgacaggaacgggagaaagaaaacgtactgtagctttccaagatcctgacttcccatgtggagtcgtccaaccttgtctcccatctcgtcggtctcgatgttctttctcttctttcccaaccccttctcgacgtccttcttgtccaacttgggctttttcattgcttgcttccacatatcctcatccgcctcttgacgtcttctgatcttgaaatcaaagtttggccccataggcgagagttccattcgagggattctagttccagagtgaagtagtcggatggtagaagttcggaaatggatgatgggcaaagtagaagcttctgatactgaaacagacgacgaagtggtagagggcaaaggcgggagaggaccggcagtaatggagataacatgctcgagaccagcaagatggacgtgttcgagagcatgaccgttgaagaaatcaaggaggagagacttgaactgaatcatggcaggatgggtttcgaatagaggagacgcaaaatgaaacaaaggtcggtgaccaggagtggatttgggggtctgggcaggttcgaattgccacgaaaacaaaagttattagttttaccattctattcagaatatgctgtagaaatcagctatctgtactgatcaaaatctaaaactaaccttgaactcagccatgccctgagccatttcgattcccagctccatcatgtccaataccttgccgtcaaacatcctggcaaacaccaaatcatgcggcctctttttagaatgcagaccaacacagtagagtgaggcgtcgttcttcgatgaccaaaactcgagggactcggtggactcaaaagggtgaatatcattcttcttggaaaagtttatgctgtccggtcgcttgagcatggcctaattcaacgacaggcaaaggtttacgcaagagacgatagttagaacatgcaaaacagagtgatgaccatacgtcaacttgtatagaacatcattcactcacgagctctttgagagcaactccgactctttcactgatctgatttcctctgacgaagattgcagtcttagggttctcgaccaccttggcctctcgttcctctaaagctcgcttcgctcgggcgttcttgggtttgctacacatggcatatgagggaacaaagaataagcaagaagtgacaactgatcaaaaacaactcttcaagaaaccatgacttcaattccaccacttacacagttcggatcatctcttgggagtatgtctgttttatgaaagactacagtagaaaacgcggttgtggaagacggtcctagtggtttgcgtttctcaatttctggcaatattgtcggacttgccacaaatttttgaccccagatgaaaccaaacagttgggcaaatatgggccttcgctcagagccgatgacaaacaaatcgcaatattacctgctcaattcgctccttttttattgcattcaataaagatcgatatgtatgaaatgagctcctcttttcagctcttgtagatcaccacccactttcaatgtccaagaaagaggtccctaaagatactcacagcagtttcaaggctcctggaacgatactgcgagtatggaatggattgaaacgcggaggaggatttcttattgatcaatggttcgtgtctggcactttcgtgtttgttgtggtcggtttggatgattgatatccgttccatccaaactcaaatcaggtttctccttggtatagtcattgtgatgcgagtcgctcaccatatacatgttctagccgcctcttctcgcttgattctaacgcatgcgactcattgaactcaactacaatctagattgctcgctcacttctttccaaatgcaggtcgaaacggcggcccgtatgtatagacgaaacactccgagtccaaagctcatgaaacgctgacccttctcaatcaactaccaactcatttctatcaggataagagctgtatgtctagactggcttgcgtttgagaaaaacaattgtctttctgtgtactaaggtcctgtctcccacaataggaatatactatcaagtacctcttggttgccatcatcttcttcatatctggactctctttaccgcttgcacaccgttcgttcaagtttttcatttcgctcatagccgaagtcagatctcactaacaccccaatctttcaacttttcaacagtctataaacgagctcttgattggcgtctccatgttgtcactcatattacttgcttcttcatctttcctgccctggtttttggtatcgtcaatgctgttcgagcatcggaccctaatttcgagaggttcgacagatgggctcttgtgggaatggtgcttatgggttgcttacctactaccgttagcaggttcgttcttattcttcatatatcacatatctcggatgcgagtgagcaatattaacagttctcaatttatatcaatcagtaatgtcgttatgactggacaggctgaaggagatcaatcggcagcgaccatagaagtcttgataggaaatctgataggtaatttagaggttattttgttcttctctcggtcaacagacatactcatacttctacttttgtctcaaggaaccttcctttcacccgcgctcttaaaaatgttcttatcaacatctgaaacatgggcattcggatcgccaactccgtctggatcgggaggagtaggcgaaatttatcgacaggtctctgagcagttggggctcactgtgttcatcccactatttgttggagaggtgattcagtggttgtggccgacatttatcaggaagtggagactcaaggtaaagctagcgaaactaagtagtctttgcttgattggaatcatctggtgagccttagtctcttcaacgtatcatctctttccgagtactcaagcacaatctctcaggtcaacattttgcaacgccttctactcgggctcattcgaggctctctctggatccactgtgagagacgtcccttctttcttcttcacatctagtcatattcttacagtctcacactttcattatcttcatcaggtcaccctagtggttcttctgaacatcattctttacatcttcttcagttgcatgctatttacgatagcccgaattatacctatgccttcatttcttcaggatgatcgtctctcgcaacctccagcccacctattagagggtgaggacaagacgaatcatacgtccaccgggtggtgggaggagaaaaagttgatggatgcagagacgacaattgctcttctattttgtggcgcggctaaaggttcgtcatggaggtgatctggacaccacatcacgatctgagagccaatcttgctttgtttgttatccaaatcaaccaggtatcgttctgggaggtcctgtatcccaaattctctacggaggactttcgacctttgatagaggaaaaattaccatccctgtatgtctggttgcttcatctttctggttgaatcagaagctcatcgatctcatttcggtttcgtttgttctttatggtaacagctgtatgtttatattctttttttttcagctatcctagacttgtcataacatatcactaattgcttttcaacttcatatagtgtactctaccagggctcccaggttgttgttgcacagggcacagttgctatcctcaaagcctggcatcgacgagtaaatgctaagagccaaagtcttatcaaaaatgagccggacgctgaattgtcgaccgagcacatcgacgacaagaccgagagggcttccgattcaagcgatctgtatgaaccttatgtggataaatcgaatattgtggaagctaagattcgctcgaacacttgaaagagctttgctaggattctgctttgtctttaatcgcaatattgcacatttataattctatcccttttcccatacagctatatcctacat

SEQ ID NO: 259 - DNA, 20449 bp, Xanthophyllomyces dendrorhous
gtggagcatccaggtcagagcagtcgaagatgtcctaagatgcaagagaagtaaagagatccaccagcgagtgtaccggtatgggcgtgtaggtgtgagcgtatgtacttgaccatgagaacgagatatcacaagacaccagcataggacgtactcaaacccagctaggaggagcgtagagatctgcgcgagcacttcctcatcacccagtcggttctgctcagccagatcggtagccatgttcgcccgtactacaggtgccagcgacagaaaggaaagccgagcagaaagaagacacaaggaagacacaaggaagacacagagaagagacagagaagaggtcagctcgctcggaaggaggcacataacacctcacgaacatcacacaaacaccccatgcggacagacctagagagctcaagatgtccttcccctggacgtctgctttcccaaggcccttcccgccatcgacaccaaccgagagatcgagaacggctttcttcttccgagcgaggatgtcctgtgtcgaccgtcagacagacgtccagagatagacatgtgtgtatgaacagcacacataaacagcacacatgagatcgatagaacacaccaagactcagacagagacagcaaagagacagacccttccataacggttcacagtcatcatcgctcgttctcggatggcctgacgctcggttctctacatcaaagccagtcacatggaacaccggtcagcatcgtgcacatacagtggacggacacccatcacgacagatccagccccgggagagcttggctcagccagattcagctaaacacagtcagacagagcccggcagagatgcctctgagatgggacaaaacgtacgatgtagtttagcacaggaaacagatcctgaaggacgcctagtgtcgactgtccagacaggccgtcaaacatcgtcttgtaagcgatagaaagctcgttcgactctttctcgatcgagtcaaagtcgtagtcgaaccctagacagacggtgcatcatgggatcggcagcacatcgtgagacagccatcgtcggggtcagtgtcctgtccggcgtcgtctctagcggcagaacatatggagcggaacatcaagcgtgcactcaccggccagaccgatgacatccagcatcgcgcggccctacagacaggcccatccgttcatcagtccgttcatcagttcatcagtcgagacagagaagcaacatcagacaaagatcgatacgtacgatccagaacatcacatccaccccttcagataccagcctcgacggcccagccttttctccttccgcctcggatccgtccgtcggcccgtccttcttcgccgcctcctccgtcatcttctccgtcagctccatcgccttgtcaagaaagatcggaaagagctcccggatcgcctgggcagagaacgcaggaaggatgatccggcgctgccgtcgatgggtctcgcctgtggggacaaagcacgcaaagcaagagcggatagcatcagcttctctcctccccaccgagcgctcgaccaggcagagccgagagcgctgccagtctcacaagagagcacggactgaccctcagagctcagcagtccatcaccgacgatggagcccaagacctttcggatgtgccaaggcttcggatagtcgtacgcctggctcatcagactattccgttcaccacatccagccatcgtccgtcgtcagacagtggacagcaggcagtggacagtaaacagtggacagcagtcagcaaccagaagtcgacagtcagcaaccagccactagcagtcggaccaccgcctcagcagtcacagagagagcgcactggttgaacaccttcggatcagcagagtacagcctaggctggccgagcatacccctgtacacaaacgtcggtccatagaccgcctccagatggctatgtgcgacgcctacttctagcctgttcaccacaacagacatcacaacagacaccacaacacgtcagcacaacacgtcagcacaacacgtcagcacacatcaatagctatcgccgcccggtatcaggccatatggtatgggcagcaagtgattggctgatcgccaagctcacttgatgatgtccttcgcgttcccatagagatagctctctagcctcggacctgtttgctcatgacaagacgacaagtcggagagcatccgacaagagacaaggcaggcaggcagtcagtctcgagcggtcacagtcagcgctatctcggccacagacgacaggtcgaacctggtaagttgtacagaggcgatcttcgaggagccagatggaaccagtcgacgaacacggccaagccgatgagacccaaagcgagtccagccgaccgtccgggatgatcgataacgatctgaagcacgctgaaagacatgtcggtgttgatattcgggttcaagaagaagcagaaagatattgtatccaagtactcaacaatcacgatcgttatgctttttgttcggccatgcatttgctgatcagtatcaatctgatcacgcttatttcatgcacacgtgaaagccattgtattaagaagcactgcaccgtcatgttgcctctcgagtaggaaatttgaatatgaacgccatcttgtttccataaactatccccggagttccctatgatctgagagaaggagaatagagggttttgaaacgcacttggtaaatgacgttttaacttacttgacacatatatcacgtgaccatcgcctcctttaccgcctctatcgttctttcctccagatgtatctgatctctacttccaaccgttagaagagaagaccataagcagatagaccatccgtcatgttttcgttcagattcctcgctcagactggagcgcgtcttgccggtctggctcaacatagagtcctcgttacttccagcctctaccgtccttctgttcaaagctccattggttaccgaatgttcaacaaggctgttgaccaaggagacatgtcggacgcagcttgggagctcaagcgaatcgacgataagaatgagaaggcggctaggcaggaggtagcagttactttgttcgagaaagatgagttgtcaccagaagagatcgtcaaacacctcaagttcgtgtattcaatattccgatcaatttttggacaattagattggcgagagacgataagatgttcacctttgactgacgagatagatctttggctgtatcgatataggtcagaaaggaaactgtctatagccaccgttaggtccgttattgatctcttttagggagaaaagacagagcgagaaacagaagacaacgtgttctctgtctcgttcaaattcttaaagacgtcacccttctcaacctactctcctgaaccatctttgtatctctttgtacatttgaaacgcaaacctttgactcttcagaaagtatctgatacaacacgcgatggtcaacgaagacttttatcatcttctggaggatcccgacgtatggtgagagctgctctacgttcctcgatactcgactcggtctgccgaatgttgtttgtatgctgacattccaggttcggtcacgtttgataccgtgtagggaacgattctcaggtgccaagggtgcatatcgtaagcatttcttgttttgacccagtttttctctacatcagtcaaagtaaatgaaaacaaagaaattctactgacccaatattttgtctataaatgcttcctgtgatcagaatcgactccgaacatcaaagtagcaatatcacttcacaaaagatttgagcagatggacatcggtacttccctcagataccccttcaatcaatctatagcttttgctgtcatggttttctgagatcaaggttccttatgtcctttcttgactcgatgtgtacagatcgagaagatcatttggtgaggaggtattccaataaaggaggaggaatccgaccatatcatgccggacccaagaaggtacgattctgcaatctctttcttaagaatcttccaaatatcacatcagtgcccatattgaatggagaaagtcagttgatggatcaatctgatgaatgtatttgccttttccaatggtgagaattgttatagtacaaataccctcggaacggatacaagcgaagaacttgataagctcagggtctcattgtgcccgtataacttacaccttaataatttggccatctatagtttgatatgatctccatatatcagaattagttcgaagacagacaacctcctctttcacaatatatatcaagttggtgtcttctgatgatttgaactattctcttcctgatgtgctatatttaaataccttagcactgacttcaggcgaaattaaagatgaaagataggaggaaaggtaaaagaaagttcattttcattcgcaagaaactcgaggaaacgagaagagcagtaatgttaggcgtagtaggatgttccagacaagattgacgacaacgccgatatttgatcgtcattgaaccgttttttgtcctccgcttcccactacatcaggaaaaccacacaaggaaaaggtcagaagtctgactctcgatgaagagaaaacaccagaaacaagaatcaaacgtacagtgtcttggtgactagccttgaaagaagaagcgaccttgagaacagtcgttttgatcgggattggatcggtagcatgctgtattgaagtcaaaccataagtcaccaataagtatgtctaaatcattatccacaaagagcgttgtatcactcacaggagctagagactcggcaatcaaatctggaatgtatgaaggcacagaataagggaaggcttcgacgatggcaccgattcccaagatggctgagtgcatgattgtcaaagaggtcatataagtgggatcgacttctccattgggaagccgtcgcttaggaatctgagtttcccgaatggtcttttggaatttaacctgtggatttcgagggagaacgatatcagtctatgttttggttagttgtgaagaagggaaacgttcctaccttcaaatgcacaatactctctcgtcgagctgaacatatatatataaacataatggaagatgaggcccgactttgaataaatgatgaatatcaaggcttgacttacaacatcgcaatactgaagatagtacagaagcagcaacttcacgtacatccaggttttcgtcaactaagcattccgtcaagacctagtaaaaggaaaaggttagacttcttcatgcattcgggttgatagctaaatggcgtcactcacatccatgattgaaacagcggtagtttcctgaacgatcggcaaacctcggaaataaacagttgcaaggacactgttacgtgatattgggaatgttggagaaaataaataagtcagcaagatgatgcaaaattgagatttgattaaaactagcaatgtggcttacggcaaaacgtgcagtctgatatgccatgactagaaatagttcgcgaacggatatgatacagaaagtcggaaacagacaattttatcgatcagcagcatgacaaatggcaaggttcggtgaacatttacggactttatgacttcgcaaggttttcaggaggacgaagagaagtggctcgacggtttcaagcggggctaccatcaaaacgcgaccatattggtcagtacaatacagactcaacagaaggttgcagttgatcgttttgcgacagactcacgtgatacgccagcgatgagcgcaagaacacccgcggacgacttttgcaattccatcgagtcctttaactctcgcatctatttcggaggcgtgttttagataatgcatacatccaagaaagagaacagtttggaccacaaacctggaaaatttcaggaaggataggaagcacggccgtaaatgtagcagctgcgttgacatcgatcaaacctcgcttcaagctaggatagagaacggatatccaaatattgaagaacatcaatcggtgatagaaacttgtcatgtagatgagagtaaaaacaaaaacacttactatcgtagtagagagagggaggttttgtcatattctgaagaagatcccaatggctgtcacaagttcaagatgaggagcttttattcagtacctgtatttagattcgacgagcgagatgagcgcactccagatggtctaatctctctccaagtgtttagacgcgggacacagctctcaatatgcttcgcgtcagtggatcgatgcaggcttaagggatctgaaagaggatttttgcactcctcgacgaattttagaggttcaagagtgcacactcgccactatgataggttgcatatccaagaccaacaaccaaaatcagctcaagacttgatactacaaagaataaagtccttctcttaccctcaatttctccaatcgatgtaaattgtcggcaaggagttctcggatcttgagaatagattagaataaattacggtgatcagaaaggtgcaaaccaacatatagttaatttgaactattaacctctgcaaaatcgttgccaagggctccaaaatactcgtcaataaattcgcccgaccaagcatcgaatctccacgacaagcatcgcatcagacagttgatgaaattgagagatttcgtgacttgattgcgaaaggaatgcataagttataacaccaaacttgcaacattcttatgatacacttactctcgaaggcaaatccggccgaatagtctaaagacttggctttctgaatgacaaaatcaatcattggctgtacccgacgaggatctcgtttgaagaagttgaatctataacaggacggccattctgtcagatctgacatatcagactgcaaacaaaagataacgacttactcgaagaacatggtccagctgagtaaaagagaaaacaaaaagtcagtgatattagcaggattgaacgattcagatggtagactgttattcaccagctcaaagtatccggtttaatcttcataaagatgacaggtaaagcgctagtaaaagaacgatagacgagagtcagcaaacaacaagaacatgaatctaagaaagaatgtcaagaaaaagctcaacttaatacatactcagaaatccaatcccagaactgtcttctaggctgcgttggccaatgcttggaacctctgacgaaacccgagataacctccgccagagcacgttgatgatgtctatcggggacaggttcggcgaggattctatccaattcggtctggaccatggcaaacggctacaagggacagaaatagacgttagacatttcatcaatatagaaggccgtctaaatcacaacttactctatctatgtagatttgagataacgatttcagaaagttgatgctgtccccactcagatactttcggctatcctcttgtgaatatcgtgcaaccaactatcttgaaaccagttccttagctcatttccacagctgtaaaccaaaggatgatagcagactgaccttcgaccaccaggatgagtcctcgacgaaagaagatatggctgcaatggcctcagcagaagtaggatcccattggaaaggggattcagctccagcctgaacatagtaggtcaaaaccttgtcgaacgcaagccagccagacgtgggcttatcttgaagaagcgtcgtcgtgtcatctagagcgatcggcaccttgaattctgagagatatcgagagccaaattctttcgaaccagaatcaacgatcactgtccgcctgagaggattgacaggtttatcgataagaagttgttccggtgatgcttcgcagaaggtgcgaagttttatgaagtgcaagattttggtcatggacctgacaaaaacgaaacagatggaactggtttgagtcatcacgctttgatttgttctcaaaaattaaaggctttttaaacgcacaattgtgcataatgcctcaactgagggagatcatcgaccaagcaactcataaagaatgatgcaacgttgggattgattggccggtctcgtcggacaagagcacgaagataccgacaggcataggtttgatacctccaatgggtcgtcgggctgagaatcaaactggtcagatgaacgatctgatatccttgaatgtaagatattgcatacatacttttcagcaaactcaagcaaatctgacatcaacttgtcgagctgagcatctcgggtatcaatccgggcttgcaccagcttttgcaactccgagttgacgatagatccaagttgtgtgcctacactaagggcgtcaagaaccttgtctacttctggattaggcaatctacttcgaaggctcgatggttcggcagttcggacaatagtatcttcggtgattttggcgaccaagctttggatagatggctgcaaaggtaaaaagtctatgtcaagtgcgtttcaattttagatcgtgattacaaacgaaccttctcttgttcttgagtctgcatcacacggagaacgtattgaggaaaaatatcagggtcgaggataccaaatgatgctgtcacatacagattgaacaatcagattagattttggtacgttggtcggtcgttgatttgagtgagagatatttaccaaacgattttgagcctaaaggtgaccaaaggaaacaaccatgattagacgggtttgatcacatatcatagcacatcggtcgaaaatacggaacgaaccgatgatgtagagagcgcctttcatttgatcaggatctacacccttcaataatgagtttaacaaccgaggataggccaatgtcttggtgccgtcatatgccttattataaataaaatctcgataggtcagatttgaggtagtatcaagattgatgccaaagattacttacacgagcgacatgatccaaagctccctgagcgtgcttccgtacttgattgtgaatttataatatcctgacaggattagttgacgcaaaaatgagaagcgatctgctaagaaaatacttacggcgaacgtatggagacaaagcgaaatcaaccagtttcaagataagctcgtcatctctggcagatcttttccgagtccaaccacaggcccttgatctcgaagcatgatagagctcggctcgagcaacccagacccgccgaggcaacaatcgttgcttggagtggaatttgagagaagtttgttgcaaggccaaactcttcttcttaaattcccacatccgatcatcagagccacaagcgagcactgagatcataccgcaataagataacaaggcagcaagagatgagatgggcagactcacgagctcaaaagaacaagggaccaaacttactgtaggtagagatcatactgtacgagaaaatcaaagcggacaggtcaattctatccatgtcaaataatgaataaagaagtggcacttgacctacttgatagtggcaacgttcgcatcagtcgagtcatccccagcttgacttctcaagtaagtggtagctttcacgatgaattcaccgatctcatttcggaaagacgcaaatgctacatgcttgggatccgcaggatccgtcaagatgaaagcagctttcaaaggaggtaggttgactttaaattccttgggagcgatgctgtattatatgaaggagatgaatgtatcttcttagttaatcgaagttcgagatggagtatatccaagaacgacaagaacgatgagacgtaccccttgtcagttacttccatcccgccttgcttgctaaacggatcttcaaggtagtatgactgcagcccttctaaggcatgcctaaggaaggataaatctcgacagtacgtagctgaccagtccttagtaggaggtccagcagggatacccgagtccagagatcggacagtaggaacaagcaatttctggatcaacctctcggcaaactcgagttctccttgagagggaacatgccaatcgatcttgcattcactcgatttatagactttacctagatgtagaaattgacaaatagcaatcaataacagaacattcagcaacggcacatctctttaagtaaagactaaccccaataaagatgcgagttttgcttgaagtctgcgaagaaaaccaaagagagataagatgatgtctagctaacgtagagggtttaccaaaacacaccttcactctcccattcatccttgttgacaaaccgagagtcttcggtccaacaagttgtcatcctagaaagcaacctcatcaccatcctagctgtgatactccaggaccgctcgttcctagccgtcttggccgtgaactcaagaagctcagtgagcttatcttgatgtctcaagactgaagagtcagtgtagcttagcatcccgctcaacagagccatgtaggcatgaagagtgatatccccagatgaaggaagagaagccgatgttgtaggtgtcgaggacgctccgttctcgagttcaaatcggatcttcttagcgcacatagggaaaaatttgtcaaacgtgaggccaaaatcaactttggcaagggagctgacaagctgagcgacaacgttaactgtgttggctcgagctatgaattgttagatgataagagttagttcaaagtagatccatcaccctttaaaaccatggtgacttaccagtcgtgctcgcactatgaaaaagcccgagcatgagacaaatagatcatcagaatgtaatgtatgttccaactttcgatgtgaagaggagagaagaagaacatactagtcaaagatctgattcagagcttgagtgaaaagcggctgactcaaatgcgtaaataccacagagacactcttttggaccatctgattgactgtctcttctgatttcccaccggtttttaaactctttcctccttggtcaggcagattctcaaacaatgtgaggactctagctataaactccgtcaaccatccagacaacccagctgtcgaatatcgaagggcctgattttcttcgggaatgggtaatgcaggcggtctatccgaatccggatctacagcttctataggcagaggaatagagtttgaagtaatccaaggagcaggattcgcattctcagcaggctcatagtccgtaaggtcagacaaggagacaaattgaacaatgttggcgatgaaccacgtagttgatactgtcttcattgagtcgttaagatcgatacccgggagactaccatcgatcatgatacaggccccgcaaaacgatgtagatttgctgagcatacgaaaaaagacgaaaaaacaaggtttatcaaggaacgaggactacgcaccaaagctcaagaagaggcaccaggttctttcctccaagataatatagctctctagagactagaggctgagcacaagcagctaagcatgtcaacacagacggcgttcgatgggtctagtttgcataatagaggaatgttaggacaaaatgatcaaatttgctgaacaaatcaaatatgaggataaaactaacctcttctagtccagtcaaagacggataagctcgttctaacacggactgcaaaaccagatccggctccaacaatgacagatatctcaggcaggcatggctcaaagccatcgcggactcaaactgaatatcaaacgatgatcgaggtgaataatgccgggtgtcaatacaccttggaaagtttgatgagtgaaagagagtaattaccttagagaacatggaaagtagagcgacagttcggagcgataagcagaattcacgtttaatctctttggtaagtcttcgcgactacaagtcagtacaaaaaaggaggagaaactttagctctatgctgaggatattaggcgttcttttgtcagagagagaagggctcacaggaggagttttgcagctacgcttctcttcggccttccatctcttgacgaacacagccgatagagcccaaataaaagtagtaaggttgacgacagcacttccgccattctacagtttcgatcgtgaacgttgcgcaaagaagaaatcagtctcttgattactaagatttctctcgtctatgttagaaaaggaggcgaatgataaagtcctaccgatggatggaaaaagccctcagttgtgacaatgaactttgccagcgcatccatagccctacttcctcctatatacttcctctccgcaggccctccaggtaacctaccttctttgctagctcccccaagtaggttgctggcggccagtaacccaccagccttagtgagctttggggttgaaggagtagaatcgaatgataaaggtgtagctgagcctgattggggcagaacgggtgcatcgtgagacattgaattgacaatcaaatgagcgagagattctgatgacgtattggcgcaataaaaagagcagacagagttagtcgaaacgtgtatatacgacaaaaggacgtgtgattaaatagaaaaaatgagaagatacgtacggactctatcgcttggttttttgaacttctgcatagtttcgttgagcttcgaatcggtatactctcccgtcccatacttgagactctcttctcctccgataggaacacctggaaaagaattaagggaatcagtgatgattacatagccatgttgtcgccttctggacatgactcactcatggacttcaagcaaagagtcataatccctttccactcatcttcactaaaaatccccacatccttataaataccagtccattcgctctcattctcatcaatatccatcgaatggctacccttagtcgctccgttttctccaagtgcaacaatctccgtctcttcgccttcgagttcgtctgctcgaagcgcgagctcttcttcatcgccttcttcctcgtctgggttggttgtgtattggtatgtcggggagagaagcgcgggatccgagactgcgggattggagtgtagctcagaaagtcgagccaatagatcgagcatctggtcatcgaatgttgccgagttgaaagcttgggatagtttgaacactgcaaaaaatgaatagtgataagttctcttacatctccttgtacgataggaacatacaaataaaagcttactcataggcaaccacttttgtggatgcgtcataggcaagaaatggaccaagaaagcctgggttccgatgatagtctgaaggatttggacacaataacacttctaatgaattcatgcttccagaatagttcaagaaacgcgtgtctcacattgatgtcattcccatctaggccaggtaaaataacctctaacatagcgtcaacctcaccaggatggaagaatctctgacaactttcagtcaaagtcaacagcgctccagagatgttactggaaaaaaaggaagttgttgacaaaacagatcaatacaatttgattttcataatacaaaacagcgccaaaaaaaaacatgttttatcccaagaaactcacgtgataccagttttacgcccttttgggaacagctcgattttaagacgatcataaagaggcctccaagggagcacgacatctttacgtgagattctacttcgttttctatataacgtcgacgatatgtcaccacatcagtccgaattagagatggtttgcacgcgcataaaagggtttacatactctaccagagaaatgacaagtcctgagaaggcatcgactaaacgagcatccgtaccaggagccactgatgaaacaacgtatatcagtatgaatattgggttagcaatcgctatagaatgatattgcaggttcagaaacgaaggtaaaaggaaacccaccagcaagttcaaagtagagcttgaccaagttgactcggacttctctttttaaagggtacttgaagctaagccatcgaacaagctctttatgccatctagggaatgtgacatcccagtcttttgctcgaatggaatgcactagcttatcgatgatgatgttcaatcgatcatccatctcggtgagtgactcgaccggatatggtaacgatcgctggtaggttaacaacgcctctcgagggtccagaggagtggtggatgacatgactggaagatctgtagtgctaactgatttggactaagatcataaaggaacagctgacggattgttagtaggcaagattggagattttcaagagaccactcaccggatagtcctcgtcttcgtcttgatcgaaagcgtccgggttttcttcgtcactggagtcgaaatccttgtactcgtcttcgtccattcaatattgagaaaaataaaacaaagatagaaaatcaaaggaaaatatctgaaggatttgagttatgtgctgatcgaggggtgtgtgagagtcaagaaacgaaaccactcctagaaagatgactgtcgatgagatgagttgttcgaaagtgtcgagtggttgagcggtcaaagctcaatttgtcttgctggagatctcctgattatgacacacttttaaccctaaccagctcttgacatttcaagctcgacacctatctccaagcatcttgaacaatggcatttcaggactcaaagtcctcgtcagactatacctatcataggtaaattgctgaggcccaatgacgcaaacagcgcaaaccatcactaaacgctagatacggagatgaccatcgctctctcatagaagttctcaatcacaaaagatatggttcaccaaggtatgagacataccattcatcttctattgaaatttttatcacaatgttcttcacggacttttcaacttttaattgatctcaagttccccggaatttaaatgttatcttgctcccagctgtggtttcgttgatctcttgacatccggctgtgattgaatagatagtaggggagctgtgcttttggtggtgtcacgtgatttgatgcacgctccctttaaccatctataactacattacttctagcttctgtctcggccgtcctcaagagacgaacatccaccaagacattcatctcgatctctggaacactttctataccatgagcaataccatcatcctgtatgtaatttctacactgtaatcatcatgtctgatgcaagaatagaggcgtgtcttcaagtgatctattttactcacgcggagtttctgcagctaccctctttccaacttttcattcaggtacgtgattcccttccttcgagcaaggcgcatgttaatatttcatctgatattaatctgtgcttgctcgcgctatatctagctcaaaagaagctcaaccggaagaggatgcctcggtatcggcacgtcttcagcgactacaaaataattatgaagagtttggtatgagaaggaccatggaaggagtgttactcgtgcatgtgcgtattctcttgatttctcttctcgtcctgagcgatgtttgttccaaatatctttgtacaacaacataccagtaatagctgcccgttatctaactcaaattctgcatacatgctgatattcaatctaggatcacgggcatcctcatattctcatgcttcaaatcgctaatgcattcttcaaactgtttgtgactgattcggtgttcctgaatgaatgcgcaaatctatcggcttgtccacttatccctcctattctataaaattcgtaatcaacatggggaaaacagaccaggagactacctacagccgggtgaagacgaaactgaaggtcttaaggcaagattagacaagatgctgtcacctgactcgagcacacagttcgacacaggggtaagctcttgccttgatacctttcataaacataacttagctgaccaccagaaggctcatgatttatctataacagatcaaccaagactgggaggtagtggataccttggcaaattggtatagaccatcttttgaaacattcatggtaagtacatggataagatcatcatatctgcattcttctgtctcacaccagctgatcccgtcctccaataattttctcattcttttcattgtaaaaatgacgagagtagtatcctttcgtccccgcacacgtaacaaagccaaaagagtgcaaaaagcttgttttggtccagatgccagaaagaagtatgtccactgcaaaaacattccaagcttgtcaaaatgacatgcatatagtcaaacattcatgtatgatctctctttttttcttcctcctgaataagaactgttatcggtgccgaagaacatgaagctgttggcagttcctttgttcgagctgtatgacaatagcgcgaggtgcgaaccaacctatcatacatctgtatgatttcagattattaatctgttcgtttggtatccccagatatggaccacagctgtcagctattcctcatcttttgtctcggtgagttggttggatttgttcttctgtgcgttctaatcaatacaccaagtttcgatcactgaatttctctcgccacaggtacaatttcgtttatatgggacaagacgaataagcttcctcagatgattcctctcttatttttggcaacggttgtcatttcatctgcttttgatacgtatatattccggatatgacgcactttctatacacctccttttcttcttccttaagtaatgtgtaaccatatcttctccttctagccatcttacgaagtcatggagtctgtgtagcaatgtttgatttcagagcaaagtgattacctcaggttaaggtacggaaatatcaatgtatccttgacccacgcacaactttccgactaaggcgcatatattcaacaaaaagcttttctttccgttcttctggtttctaattatcagccgccgccctaagcgaagccaagattccctcttcttgctccaggctaaggacacccgatcgaccagccacagagtcatcctccaaaactagatcgtaagcgtccgctacgagaagaggatgtatcggaatattattcctaccgagaaggataacgatgttggagacgagcgatattgattgtaatgtcgccggtgggatgatctgtttgttgtgccagatttgatgaagaatagcgaaatcaagacaaacgaatgaacatcatcagtgatgactagccaagagagaaggaaggaaggatactgtcaaacatacatcatttttggaactgtatacaccttctgcatcaaatccactaccagacattcctccttccccatcgtcctccggtatcggtgcgtgcatagaaatccaaatatatccgttcaagccaagaatcagatcaactccacaaggaagtgtttgaaagtgagatttcaatcggggaaccagcgcaggtgggagggtgatcaacgttccgtttttgagctgtgatttattgcatacgtgttcaagatggtgttaatggcgacggcgcgtgagacaatatgcaaagacgcttagagtatatgtctaacttttccatatcgtaaggaccgagtgtgtagagacattgttccgtcacccatcagcgtttgaacctctgccactagtaactatatatgttgcggttaaaaaagaaaaaaaaagacaggaacaagttcagtaaacgtggttcgttggttaatctgtactctacgattacgttataagtgttgagcttacatctccttcttcaaaaaatctatgagaaacgccgtagataactcggtcagtatgttatttaggagcaaattcaagctgcaatcgatcgatcagaacttacaaacgcatttgaagttcgtccgactcgagtttccttcgctttaacaaatcggtttcagcatgttactcgatcaaattctcctgccagcgcatggtaaaacagataaagaaagagagtacaaaatatgttgaatgtgttgacgctcacctgaacaccgcctggcaaattgaccgagcttaacatcagtacagcatcctgtcgggaacctgtgtcgaccttccaccgtttagcagcaacctatttgcatgtcatgacgatcaagcgtagccgaggctcaataagattaagcgaatgtcccaccgctttgggacctttacgacaaaggacggtattggaaaaacgaacctctgtgattctcccaaccactaaatcaccgacttcagggatgaacctcgctcgaagcggtcgcacgctgaccagtttgttgactctctcaactttacccgtgacagaagaaacaaccttatcgcccgagacatacgttccatgaccactatacgtgttgcagcccaatgattcggcccgttcatccaaaattcgataggtatagagaagtaagttctcaaaatcttctcaagtaggtaccatcgatgccccggtaccaactgaatcgaggaaagaacaatggctgaagccacgagaagaacaaaacgaaccgcataaaaagtgacgagctagtgatggtcgatccaggagtagtgaaattactcgaaccctcctcaaggtcgagcccttcgtcctcatcgtcactcatagtaacgtccgggtggtgtcgaagggaagtcttcgtgcttgggtcatgatacgtcggtgcggcaggaacgattcgaaacatgatgtagtattatatgtatttgtgtgttcttgtgtactgtagggctaccctcagtcctttaatatatgaggaaagagaaggtaaagagaagaagacagatccaggtcaacggtcggtctttgaggtttggacgatttggacgatgtagttagtgtgggctgtaaagtattagatgatttgactcgaattttcaaatattatctcatcgtcagccaccattgacaacacattcctaattacgctcgtactcacgaccatatccacaatgaacacgcccatagctcctcccgcctctgatgtctcaacaaagacaggaactgtgaagattttgagtcctgcattgaaggagaccgagagtgttacttcttcgacgccagttgtacccaaaaagaaattaacaagagcacgtacattctcaatatgactactcctccgttcattcaggaatatacgacttatcgtgtgatggtcattgtttcatgtttaaatgcgatacaggaagagcaggagaaaattaagaaagaagaagccttggccaggttcgttgcattacttcagttatatcatatcctctgacctgtttaactgactgtcctggaccttatcttgtcgacgcatagaaagaaagctctggacgaccgactagttcgtatatcaccttcgtatcgagctgtccgtttacgtacgatggaaaaaaatgttctgatgcacctaccatcacaacttaatcacccttaattctgatgtagaaaaaccgatcaaagcgacggccggctccaacggatggtgattcatctgagcttccgaaacctgccaagaaagccaaagaactgagtacgccatccttcttatttgactttctcttcttcactattggtaaacctagcgcgaccaagctttcgtccttgttcgtattaatgcaactactgatcaccacgagtgatcttaactccgccttagccgcatatgagaaagaggttttggagatctccaaacgatctggtctttcagattcaggggccgggatgagatcccttgtgaagtgaacacagaaccactgtcgatcagttatgcgctctggtccttttctcgcgggcgtacgtctctgtttcattgatacttatcagccttgacagtttatgggaggaaccgtttcttaaacgtgtaaacgaatgccttcagacatggtgagagttacctcaaccgatggtggtcgatacatggcccttttggacttgggtgccctcagaccatgaaccaccaagatccccatgggtcatgggtttagtttttgccagcctcagtgccagcctcagcagtctcaacatcactagcgacagcgtcaaagcccggcattcttgctcccttgttcttttcctggtgaagggcaaggtgcaacatgttgcgtgacgcattgacatctctgttccaccaagtctgagagagagaacaccgtgaacaagcatagagaacaatcagtcatcgagacactatcataagatatataacagacacacggcacttactcgacagacgctccgacactctttcagcgcccacgctttgtgtcttccagagaactcgccatggcacttgaagcacgccctcgacgtccgatactctcacactttgcggacctggagcagcggagagaccctcagcttggcatgcagcgtcttcacaggactaggtgcatgcccatgagaagacgacgagaaggcgccgtcgccgaaggccaggaaggtgcgtggacgtcctgccgacagacggagtgccaccttgtgttacgcttgctcgcggctgatgtgtgcgccccagcgaagacgtctccaccttcgagcggcgaagaacgtcgcgagcgaagagtaggactgaaagtgcgagacgagagcagcgcggagaccatcgagactggcagatctgaacgaaggaagat

SEQ ID NO: 260 - DNA, 76674 bp, Xanthophyllomyces dendrorhous
  misc_feature (70405)..(70414): n is a, c, g, or t
  misc_feature (72002)..(72011): n is a, c, g, or t
tccagccccacgacttcgtcctctggccgcacatcccacgggacatactctgctcggtgatggtccttgccttcgccctcccatctccatccgtagtcgtcgatgccagatgaagacgatatgggtctcagcattccggcagacactccgatgccgtccgtactgagcgaccgggcgaactgtcgccgatcggtctcgaccttggatatatggaatgaccgcctctaccaagtgtcagagtcatcccggaagaactcctaaatcaccctgcggatataccccacatccgcgtcctccaatttgagctgggcccagagatcatagagagccatggtgtctacaaagacaaaggacgaccggtggtacgagggcggcaggagcgagaacaggcggaggccatgcccccggcgacgagtagtccgtcttgcagccgcatcttaggggccatgttcctcgaagatggtcagtatccggtacagagggcggagataggaccaccacgaggccttgatggccttgcctgtcagaggcaaacctccgaagatgtcatctgtgaggaagtcgaacaacactcggagatgagcctccatcaccgtgcgctggtcaggaaggaggagtttgagtagccagggtggggccaccaggatgcggcagcttgtagtggctcctcctctgtattatcttctctttcttctccctcttctcctcctcgaggagggggaggggacagttgctcccagagttgatgggagagggcagtgcgctgaggacggatagataggtcagataggtcggctaggtcagtcattgctgcagcctttcttcagatatctcctcagatgacttatcttccttacctgactaatactgatccggctctggatcacttcttcgacgtttgtctccagccaccaagagacgagccgggaagcccgatggggcatgttcaggacgacatggttctggcaagccgtggtccacgactgagctttggtgtcgatcattttgcccatgtatctatgacaacaacaaatcagtcagtccctgttcacagccagctgcatcactgtcatcaccaaatagatcactcactttgagtctgtggactagtgctcagcagggaaagaggcgtcccggatgtggttgatcccttcgttcagtgttggcgctccttagtgcagatttcctccgcgcgtgttgaaaccaacagcctggagatagagccgtattgtattggggagatttggtatctcccctccatacgcgcagacctttgacatgtggatactgagaaggtgagacgcgtcgaatgttatctttcctagccgggcaacggccgactcgatcgggccagccagtggcccaaaggcgagtaaagagccaaaacctattttcaccgtccgtgacaccatagggaccgctgacttggcgcggatttccaccctctgacgagggatgtaaaatgggcagaggtgatcagatcgccttgagtgcccaacttgactgcaggctgagcatgtggcagtagtagtattggcagcagtagcggtattggcagcagtagcagtagtgttagctgcgaggcgagactttgcccaggcctgagccgtcctcctgcgcttcatgtcgaacacaagaggagcggcactcctcaaggcaactgatgagtgttctgatatgagaaagtgttctaatatgaagggatgttctgatttgaaagagtgctctgatcgtctcgagttcgtggtgtcttataagctattgggattgatgtctgcttgtttgcaggaaatctcctttgaccggttcgactggctgccggtcatgatgaacgacctggtgaatgctttaccgtccacagacaaagataaagataaagacaaagacatgaatagacaaagagatagagagataaaggaatcgcgagacatagagtctctctactgtgtctgtgaacttgaagactccctctctcgtggcggctgaaaatgcttgagagtgataaaacagcaaattggagttggcaggattcgaacatgcgctccctgaactacgtagagccgctcttcccactgagctacaactcagatgttaatgtgaaggatgctcacatccaacacggcccctcaagcttcacgttgacttagtgttgctacttttgggctccagccacattacctaatcacctgtaacccagcgggcatttttacacaggctgatcgtggtctggagtgtctttgcgcttatccgggctcataacctgataaaatagggagctcttggtgttggattctatggtcacttagacaacaattgattctatccagttcttctgaatgtagaccctcgcaactaattctcccaagcaaattctctggtcctgaatctctgaatcagaattagtttttgagagaaccagaatcagattcagagattcaggaccagagaatttgcttgggagaattagttgcgagggtctacattcagaagaactggatagaatcaattgttgtctaagtgaccatagaatccaacaccaagagctccctattttatcagagagaacgtcatcagggcgagatgtcgatcgcttgtgtgcctgctcgagttctgccctgaactcaactggctgtgcctgcgaaattccctttgtcggctgaacacctgtcgaccgctgttcctgtttctttcctgtcaacgctcgttcctgtcgatgctcatcttctgctcctggctcatctgtgcgctcgaaagctctcccatatgagatcgtccttcgtgccatgttacctttcctttgtcttcatctcatctataaatatctcagctactgagacaaacactattgagcaaaattcatagacttgaagaaactcatctcaaaccctcaactgctggtcgatgttgtacacaatgttccgaatcaccctgcatacaagaaagaatcatacaaattaatgatgagcattaatgaacaattcgaacgtgcgaaaaagatttgtttcaatagggatactgacgccaggacgaggattctagataacgagatttggtacatgaagggagaataggttatgacatcatctcatcggctccatgatcatcaagagctcaaataaaacattcacttaccccccaccaataccattggacacccttgaaagtagctgtgaacagcccatacacggcgagcgcattcaacgatgtagcagcatctagagctgccgataatgttaaagtgtatttctccgaccacctagggctacagaaaagcgcaagtgtataccacaaatgaagacaagttcttggatttgtccgtcaacttgtaagcggataatataaaaagagagacgaactgatgtcgagcaattcgaacatgaaataaccatgataccattgctcctgtcaggataatattcgccggcctaagattcccaccaaattcgaaggtaattagtcaatgtcatcatcagagctatcaggttgatcgggagagttgagtaaggcaatgcaactcacaattgaggcaacaaagttgcacctgagcaaatgattgggaaaacaattttatcgaatcctctgcttggatatttcttgtgtaggtaatacatcaacactggaaccgctactccgatgggaaagcctaggtacagcacccaatatttccccgaaaaaaatctatcggaatttaatcaaaagtcacagcgagatgccttgttagaatagtaaaacttaatcgcaaagaggaagccaacgtgagagtgcagagtagacctaccttctaggagcaacaagaccccaaataattgaagcagaataaaacacagccgcttgccgtccactccattggcccgtggcttgtttagattatcattaatgggacgtgaacatcagagatcgtcaaagtgactcaagtgtttcttttttacttacgatcgacatcggttccatccaagaacggtcgtttggcatcaatgacatgaaccaacgtgacactagataaatgacgaggttgggattcttaagaaattgtgttatatcgcatgtagggagaggcattcaaaataacatacgtactagttcaccaaggcaccaatgacctgagacataacaatgttccaaaaacacaacgctttaaacctgatgaaagagtatagattcttcataacagaaaattttacacacagtccctagtactcttcaagacataaaatagggccaaataaatccagaagttctcgatatctcgcagagaaagatatgatcacgtagcaaagaacttactgagttttgaacatatcccggtaagatacctttaagtacaatgcgatcctgacaccgaagaatcaatgagaccaagtgcggacatcctagaagctacggacaaaagaaacgcacttgaggtcacttgtcaaatttaaggcttgcgacatagccatataaccgaagcatttactatacaacaatgcaaaaactgggttaggatatatacctattggtatgttcaaacgactgataaaccggaactaacaaaaagacattccctaagaattatcaagatttgagaatgttaattgagcaagtccagcaagttgtgattatgagtgcggaagcaatatgacaaagaagaatgatagaccaaccaacgggctttccaggctgaagcagcccatgacagaattcagtaagcacattcagaccgatggtttggccgctgacagcagagacaattccgattggaactacgaaaatctacgagactcgtgtaacctcttcagaaaaaactatgttccatgtaggattattctagaggagtcgcaactaaccacagcaatcccgagagcaagtaaaagtaaccaaagcggagtctgataacacatatattggtgtgggttagccttgccgttagagtctaaagacggatttagggaaatcactgatacctggaagacagggtaagtgagaaccaaggtagcggatgctataaagttcaccacaatcatggcgatataccagctttgtgggactgaaggatatgcacgcactactccgggcaattatatttgttatgattacagataacagattatgataagaatcatttaggttgtctagattgaagctgaccagtgaaagagcggtatttgcttactgagtcgattatgaatgtcatctctgcctgcaccacttggagatcctcgtttactccaagcgtctgctatttcatgtccgtagaacagatagacatgggtaaggatgctcgaaagcgacgcaaaagaaaatgcataagacagcgcaaagtatggggtgagtaacagcggctgagaagtttcccagacagtggtattgagttctaaggagggggtcaggagtgaggtgacgttgaatctgaaggtaacggtggaggaatataaaacacatgaagccgatcagacgtcgatttgatgctcaagacttattctaacagaaaaaggatatggctctgaccttgtgaaactggatgtgaataacccggctgagaccggagaggagaaattttgagcgtccctggcagtcgttaaattgcaaggctgatctctcgtcagatttgatccattactgatgaaaagatacatagttccttaccaaaaattagtgaaccacatgattggaacaattatccaggccatccccatcagccccccgaagtaattgagaaggctgaaccaaggggtgtacagtggcgaagtagctcctatcgacgaccaatctagcgaaaaatctacagcaacaatacatgtcaaatacgaatgatttaggccgaaagcgcacgtcagcagcaactaaccaagaaggccaattccctcatagcccgacccaagcattcggaggacccgtgtcgttgggttggacaacaaacacagcatgggaagcgaattgagagtaggaaaaaggaaggcagggaggaactgatgacaaaaccaccaactattaggccgccgctgtatctaaaacaataattgcgagagaacaaccgttacctgatacatgaatgtacaacctaagacgaccatgaaaaagttcagtcgggaggttgtcaagttggattttgagtgaagggtgtgatacagagacacgagcacgagggaatttggccaataacatgatggggctagccgaacagaaggtatgatatataccgttagctaacgaaccgactgatgaagtatgtgttgaggaatactaaattgctcgacagccagcgtaacaagctcgaagatagaactgaaatcgcatgtcttacgttccacgagaatcttcatgagtaaaccgctgaggccaaatccaatgagttgggtcgtcaacagcagagtggtgccagcgacagctccaacttccgttttatagtaaagagacaagatggccaagatgtcagaagcgtacgcagcggaacctcccgatgctgctaatacgccaactgagaagagatgatagcttatcgtgattaatctgataaccctgatgattgtgaaaaggagaaacttgatacagacttagaagatgttcctttatgttgaaagggccagggttgagggaaaagcccataagctttttccgagggaggtaggcggccatgaattttcctagaggatgactggcttgtgcgataagcgcataaatgaacgcgacgtcagattaagccaatacgcataggttagaacgcaaatgtacctaagatcacgaagtatgaagagaaagaaggtggattgcttttgaaatctgttgtcgttcgaggtatgaattgtgtgagattacttgcctctctcagatctgtacactaaaccgagaaaatgtttcttacagaacaactgggatgaagcggctcctagaatacagaacaccgacccaagaataaggactctgattgtcaacgcaggcaacgaaggatcgtccgtcgaaggcacgacctgaagaggatttagtgaacatcagaaaggggcagagaagattagtcgagacgatatgtagaatatgagtcagatgtgggaaatactcactttgctaatgagatcttctatgctttcgtctacattttttgtttcgtatgaacgctcctctgtaggacgtgattcctcatctcctccagaatcgtccaacggaagcattctgatcgattctccaacattgtcgacatcatcatcgtcgacttcttcttttccctcctggtccgttgaacgtagctcatctagacttggacaagatcgcacacgttcgtacattgtatgatagccggtctatccctaggttgcatctgttgcgattgatgaaatcaactgagatggaatggattgaatatgatgtgtggctgaaacagcacgtgtcacagctgtatgtcagtgtctgtcagggatgtaacctgagttacactcttgtcaaagatacgggttaagtatcatgtgtccccaagggtgggttacccttacaggctgttctttacatcaacctccgatgctttttgtctgtttaacagcatgcgctagtttctaaggttcatgcttcattctcttgaattctcgtgatctcgagcctctctaggttcgtcatatgtatatctttagtggcagaccaaatgcgcgaggggtcctgatatataacgaggacactatcgcgccttcttggataagagtttttctcaagctgagattcttgtcgaaatctcttatcccaagtacattgttaatagtctggtctgtttcagtcatcctaatcgccacagagtctaagtgccatctcgtgaaccaagcgattacacttggttacattctcaaacaccgagccttataccttacacgtatgcctgacatatccctgacaccttctctagatggtgacaccgcacgtactgggtcatcacgtgcctatcttgaaaaggggcacgcatgctgaaactcgtcacattcgtttcaatcctattctctgcctattcatcatatccttaacaacatcgctagaaattctgaacatatctgatggctcaacaacatgctgaaatcaatcaggccacattgaagcctagaccagtcgtcaaaccaaccaattcagtcacttttcaaactcagctagtcagggccaggatagacccaaccctccgttcgtaagaactttctgtctccccagctagacgtcacattaagcctaacacatacatcctatcataaccctgaatctatctctagctgtatctgacgttgttcgtcagctgtgtctttctttcggagtcaccgatcctccgtcctactgggaacttcgcgccaatgaaaacggcgagctccttacagatgaatccctctttcgtttcgttagggacaacatatctctcggtttgcttccctctacgctctctcaggttcaggcactcagggagacaattctatccgttgacactccttcaccagcattgaagcttgcactctttcagcttcaaaaacgtgtcaaagatccaaaattcgccgagacctttgtcgatcagggtgggctaaaggatattgtcagttcaataggtcaattggaggggaacaccttggcatatgctctgggcgcaatagagggtcttttggagttcacgtgcaaaaatgaacaggggaatcctgtggtagacagccaagtcatattgtgccacggttttgttcagatggtaggctcttgtatcaatctcttaacaagctgttcaaagctaacatctttgacgatcagatcacgggagttgtatcttcaagatcttctcccataaatatcactcgatcagcgacctctatccttcgatatcttgttcctataaactttcaagtagtttatagctctactcaatctcaccctctgcttatggatagagtagttgagaggctgaaaagcgaagaaggaggagaggtcttgcataggtaggtgaaatactccaatctgttttgatcatctactattgagtttcattcatataagcgctgcttactcttttgcacctcaagtttgctcctcatcaactccttgataagtatttcctcggaagggactaaaacatctgagattttgacagatctagataaacatgagatccaatcaataattgaagtaagtgctcgcccataacaggtactcaaataatttaaaactggctctgactacaagtatttttaatctttaaggatctaatgaaccgaccatgcggcgatgagatgagaaaagcgctactgggatatcgatgtacgccatgtagtcatcttacgaaccttggccaaacagctcatcatgacggattgtctttcattgcttgtgacctcagttaatatcgcctatgctatatcaaaatcaagccagtcctttgttgatacaacttacaatctctctcatcgactgttactccttcacatatgggactcgaccggcttaaccgatgtagagctcaaagtttggagtaaagacatcgttagaacaaagctcatatcggacgaggaagaactgaagtggtcagtcttaggactggacgtgtctcatagcgcaggtaggaacaaagtcatttggaagacaggaaagctaggtttggactatctggtacatcgatttgagctagtcatatcaatagaaaaaattcggagaagtacgttctctgacttgtctattgccatttcgtatatgacagcattggtttgctacaaacgatcgagcagcattcgcttcagtgggtacattggtcttcattctacctggccaatctcatatagtgtttgctaacagtattcggtcatatacagctcattcataagcaacttcgtgccaagccctcagagcgctgcccgattggccaagctaggtttgttctcctccaaactagcgcatctccactcttactaaactctgactagcttctcttatcgaaaaaagcaacgaaacacttgatcatctcctcgctcaattctccatccatgatatatcacccggtcaaaccatcacttcgttcgttcttcaattacgacatatctattctcttgcgctacaatttttccttcgaatgtgggaagaatcaaattcgatggtcgacgaaagagggggagaagatgattttcgacgggttagtgaggtcgtcaaattctggatcaaggagatcttcacggtaggcgcacagacaccgatgattcagagttcaggtcttcagagagcgaaaggaaaagactatagttgggtcgagaaaatgtttagagagtcagagtggagtgaattgagatcgaaaatgaggcaagttggtgaagaggagcgagaggtgttagacaatattgctatcaggtatttatcaatctcttcagattacgcccagtagtactttcaatgatacttcttggctaatttcatttcattttgatgatcgtcaacagagatttgacatcatcaagtcaatatcatcttctttttcattgttccgatgacacgctatgctcataaaatctcacttaacaccatcagttcttgagcagtgccagaatttcgtccaagagcagcgtatcaactgtctattgtaagtttccgcatttaagtatcatttgactgtgatttgtgtctaaaaaaccctctatctaatgtaaaatttcacgacatgtatatatacactcattgacaaatggccttcagggaaggagcgtggttcaagcacggagcactgaccggtccttacttccgagaacctactcgggatgttcccagaggatggacatttgtgcgcttggtacgatttctatatcttgatgtccctcctaccatgcatcggatatcatgctaacaaaagatatgatatggatgtgatacggcaggcaccgaacaagcatttcttagcttattgcgaaactcaacatcaattctcggctaagcccacgattgatgagctctccgaacgaagtacgtttcatttaataagaaaacgcttcttcgaaccggatggctgaacatgacaaacccatttggcttctctaaaacacagttgaccttaatcttgtccatgagatcgccactaagacggcatatccgatcatcagcgaaaccttcgatttggataacgggtcctcaaaaatagaaatttcgaagaggaccgtccctagcgatctcagtttctctttgcttgttggaaaaggaatctctgttttggagtctgtgtggttttcttcttacatgaacatggatggtctaatcaactgatgtctttcttcgtttctcctatacttcatttaacttctgtagcttggtggcgttgaaccgagctcagttttccgagtggacagatggcatcgggtaccttttgggacgttcccctccgactcagactcaggaaacgatggaattgatcaagcatctgactgaagtcgggctgaaggtttgttcaatatgttggatttttcttggcgtcctcaataacggatcaaaaattagattaaatgactgacggttcgaatctttccaaacgatgaaacactaagttgaggttgctggatatcacaggcgaagaggtcgaagtcccggatgaattgccaatcccagctcctccgagcaactacaacttcgttagtattggcataccggggatacctgaacgacctcatgacctaactaatacctgtcatttttgtagtactttgcggatccgatgtagctaatctgtcattctgttgaatctcgtaattgtatccatatcttatctatcactgttatcgctattatataccaagttattccgcatactaagtatctacccatacttagcttggttcttggccaatgctgaaaactatcatgaaaccttcctttgtttgcttgcttgctttggattgagttatgtccgagagaaagcttcaattgaggggcacatgggtattttgagaggggcgattgttgatcggttcgagggggtctaaagaacaggagaaacacttcagtactcaaacaaaggattgatacttcgttagacaaggcgtacatattattttctgaacaaaagtagaaggagagtcgtcttcatcgatgtcgtcgcggccgttcccattttgttgatctcgatagcccatatgacaaactccgcacgtggtttttagtgtttgtgaaaaaaagccgacgaatatcaatctgaacgcggacgcaaaatgagattatctcttccaatcgaagatcgtagtaagaacagctgccaaagcaatagcagccttagttaaacacattagatcgggaggatttgaggtcagtacaacgtgatgttcgtgcaaatgataccaagggaaaagggaggactcacgactgctaagcaacttcctgaaatctgctcggtgaaccatttacaaacgtcagtcattgatgtacatcgctcttctgatatacaaacaagcctgaagtgtacggacggcaaagagttctccatttgagaagggttcgaaagagcggttgcttccgtggttcgagagtcctgaagccatattgatgtaggtgatagtagcagtgatggtgacgataatagttataaatcgattaaggggcgcagtacatctgtccatttgagctcatctcacttcgtttcttctcgttcctctctctctctcctcttccatttaccatcacaatctttatctaggatgtctcaacagcaaacagttccttgtcaagtaagggtcgcctcttaccacggttgctcttgacatcacttgggacaaggcattgctaaatttaagactgatccatctcgttttagtataaaaccggaaagaccctcgggtcaggaacttatgctatcgtcaaggtgggtgcttatttgtcttcaagtttgccaaacggatagcattctctaatgataggcaactgttatctttggtcaaatgacgcatcggtcgtatccaggaagccgtccatatcgtcactggaaaggttgggcctctttctctcgagtagttctacaattgattgctgtggaatctccatcagttccaggacgtctaaagccgcaattctctttaccattggtcttgatcttgagaacaaacttgctgacacgtgaggtttatctaattcactcactgtatgtagtactacgcttgcaaggtatgtttatcatttacgctactcgtcaaatttggtcagatcgtccatgtataacgcctaacctcgctcaagtatcctttctcagatcatctcgaagaaggtctgtatcacaatcactttgcaatacattcttcaacagacttgaaaggtacttgcttatcttttgtattgcatattgtttttgttgaaataacagcttatggaaggtcgagagcatatggtgagttctttgatcgaaccgcaaatgactgttctcatgctaaagttctttcattgcacgcacaaggttcgcaatgaaatcgaggtcttgaagcgagtctcccaaggacaccccaacgtgcgtgacagattctttacagtactgcccatggagttcaaaggttgatagagagccggaaggccacgtatattgtatctttcactaatgaagattgtcggcctaatcgattatttcgagacccgaagcaatctctaccttgtattcgattgttagtaattcggttcgttgctatatatgtatagattgaggttggctaatctcggtggttcgacttctacatagtatgcaccggaggcgaactctttgatcgaatttgcgccaaaggaagctactacgaacggtcagttctctggtttcaatctgaccagaaaccaacatcatggtatcgaggctgatgccttctagtcaatttatttgacaaagtgatgctgcccatctagtttacgttgtgacgtctgccgtcaaatacctgcacaacgttgggattgtacaccgaggtatgtctgtcgaagtcctagcttctcgtatacaaagcgtgatgctcatgtgttgtgacccgcaatctcctctttccgcacccttagatctaaagcctgagaatctaatctttgctgacaaatcagaagagtcggatctgttgattgctgattttggtttgagtcgaataatgaaagaagagcaattcaatctgttgacgaccacgtgtggaacgccaggtgtggatccatttacattacgttggatttgattcattccaaaacatgttgcgcaatctggtggtactgatcttagtgtggatatggaattttgtcaggttatatggctccagaaatcttcaaaaagtccggacacggaaagcctgttgatgtaagttccgagtttgacacgctcttgcgattttgagaagatagtgaatttaactcattcactactctcttcaatgcggctcaagatatgggccatcggagtgatttcctagtaaggtttccctcaaaaagattgttaatttgtttcatcagcgctgactatcaacgttgtctgattatgacccgattcttcattagtttcttgtccgtccctgtcttgtcttaatgacgcgttcctagagagcatttataagcgatgtatcgttgagttgttgtattgttcctttttcaacaggttggccgggtatactccatttgatcgaaactcacagaccgaagagatgcaagctatcattcgagcagacttcagctttactccggccgaatagttagtctcatctacattctcttgccctttcgatggccgaaacctcagtctcaatactgtcctttgattgattctattcaacttaccatggtcatgatgaatagctggtccggtgtgtccgatgtggcgaaggacttcatcaaaaagtgtctgacagtcgatccggcacaacgactaacggccgaacaagctcttgagcatccttggttgagccaagaggctaagttgcacgtggccgatacatcggcggtcgatttattgccgagtacgttgtgcccatctgtgtctcggtaaagaggataaaagtgactaataaccatattttccgctgccgtccccttattcagatgtcaagagcaacatcaccatgaagcgaacgcgtgagctgattcggcatctttctctttaaaaactggacatatcgattgatcatcactcttgtttcggagttcatatcaactctagtcagaggtaccgtcaaagctatgatctttgcccagcgattgagcgctactcaggatcctgttgcacaagagatgcgaaccaggctcgattcgtacaaacgggaagccgaagaggtacgttgcttgatcactgtcctccgaagagaaatctcagctgatgtacatctcttcgcctctactctgatatacaggacgatcccagccaagtcctaaagcctcaatctgcttcggtctagttgactcttctttccgaataattcttttatttccctatatctcctcttgttttcggcaatgtttttttcatctgctttgtttcttcattccttgggtcgtctatcttttggtatatgatatgagagaacaaaaatttcaaaagaaatgttcaagtaacaggagctgaccctgaatataattggaatcagggcgtaaggaaagctctggcggacaaggccagaaaatgatcatctttctatgcgaccatcccgcatcccattcttgataatcagatcagccctctctcctccattataccttctcagcccccgagtagcaagcgtttgtattccaaggtcacatccaatcgtctacggtcaacgaagaaatatggcctccaatactgttttacccccagctgcagacgctcctccagctaccgttcctccctcgaagcaagagaccaacacggccgatcctaatactgccgtggatgttaaagttattaccgaaggagtaaagcaagcaaagattggaaaacagcagggagaaaagaaggctaagaaggagaaggctggcggatctggatccaaggaggttcgttcaagcttcatctcgactcttcctctctgtagatttttctctctctcttttcctctgggtacaacacgtcgtcgggatggcatgttccggctggctggctggctggctgtttcgagtcattctcggtggagattattgaagaactggcatgacaaatgtgtagagaaggttgtcgttctcaaatccgagtcatatgtctttctgcacactcttgacacactctgagctttcgttttgctgtaaagctgataatctaatttcaataattacgatagctcgaccctccaaacttcttcattggtccgcgaatggatttattcgagaaatggaagaagattcaggccgatcgaatcgcccgttcgtatttcgtttttgaacattacatcagactcgagaagttgtgttaagggttttctgatgatgttggaaatacgatcaaccgtaatgcaattgatgtacacagaggagcctcgagttcccataaccatcacccttcccgatggttccacccgccagggaacttcctgggagactactccattcgctattgcttccgacattgcgaaatctttgtctgagaaggttgtcgtcgccaaggttgacggtaacctttgggatcttacccggccgcttgagaaggattgcagccttcagcttatggactttgacgaccctaccggtgaagcgaaggctgttttctggcattctagcgctcacgtactgggagagacttgcgagaagcacctgccgggctgctgcctcggccacggacctcctatcgatgacggtttcttctacgatatgaaagtcgagaatgaccagtacgttggatttcagtttccatctattctctttcttaacaaaattgaatcagtgttatgcgcaagttaaatattaatactcgcaatacaccattaatctacatctcattcaggcctatcttgcctgctgactggcccgctttcgaaactacttttaagggtgccgttaaagagaagcaggctttcgaacgagtcgaaatgcctaaggaggccctcttggagatgttccacgtacgtttggttcttgtttcccatcaaatctcttgactgatacgaattgcatttggctatcattcaactatgtagtacaacaaatacaagtcccatttcatccaaactcaagttcctgatgggacctcttccactgtataccgatgtggtacgtcacgaaacatgcatatcaactctcttctctatttgagtctaacccttccctcttccgatttggaatttcgcttctttataggacctttgatcgatttctgtttgggacctcatattcctcacaccggtaagatcaaagccttctcggtcaccaaggcttcgtccgcctatttcttgggagatgccaagagcgattctctccagcgggtatacggaatcagtttcccggacagtaagcagatgactgagtacaagaaatggctcgaagaggctgagaagagaaaccacaagaagattggaaaggtatgtgcatttgtaattacaaagtcacaagaatgggttgctcacgaacaactcttggatggcgtctgccacccaccaggaccaggagttgttcaccttccatgaattaagtcccggaagcccgatcttccttcctcatggggttcgaatttacaacgctcttatggatctcattcgagaagagtaccgagaccgaaactaccaggagggtaagctcttatatagcagatatagagttttaagcgtctgtaatcaacagatatctagctaacctcgattcatcttcgacatacagttatctctcccaacatgttcaacgtcgatttatggaaacagtccggtcattacgccaattacaaggacgacatgttcctacttaacgtggacaaggaagagtttgctcttaagccgatgaactgccctggtcactgtctcatttttgactctcgaaaccgatcacacaaggagcttcccctccggatggctgagttcggagttcttcacagaaacgagtccagtggaagtctttctggtttgactcgagttcgacgattcgttcaggatgatgctcatatcttttgcactcctgatcaggtatgttactcaactttcaagcattgttgtgaaacacattgtacaagacttttgcagttactgatctcttcagttgtcttttctcattgttcctccgtgttatataattgtagattgagtctgaaattgcaaaccttttcgagttcattcacaaattttacaaccagtttgacatgaagcttaaattccgactctccactcgaaacccgaataagtatatgggagaccttgatgtctgggagaaggctgaggacactctgcggcgacagcttgaaaagttccagcctggagcctgggagattgctccagaagatgccgccgtaagcgatcgtctctgattatgcatcatcatcgagattagggagaaactaattaaaatcggcgtttgccttttgttctcatttatgtagttctacggacccaagattgatattgcctgcgctgacgctctgagacgggaacaccaagtcgcgactattcagcttgatttccagttgcccgagaagttcaagctcaagtattctgccggtgccggtggagagacctctcaggaggcgagacctgtcatggtatgcttttttttcccgcaattatattctgtttgacagtcaaagacatccctttttctttaacgtattcttaacgcgatgaattctgtaataatcgacatttccagattcaccgagccgtgactggaagtttggagagattcattgctatcttgaccgagcatttggtcggcaagtggccgttctggctctcgccccgacagattatggttattcccgttggtgtgaagtacaacgattatgccaagcaggtctccaagcgactctggaaggagggattctactcggaggtcgatgagagtggagagaccttgaacaaaaagattcgaaatgccgaggtcgctcagtggaactttactttggtggtcggtgagaaggaggaggagagtctgtccgtcaacgtccgaaacagagatgacgtcggtcagaaacagcgatcggaggtggtcgttcctctagacgagttggtttccaagcttcgatctcttaagttcgataggcgaatggataaccgattagagtagaggagctataagctccctcatctatcaaggatggcgagaagaagcgaaaagaaggagaagtagaagtagaagtagaagtagaaagggaaggattgaaagggtacgcagagaggtactctggttttttcctcttcagtcgagatgtttgtcagaaatggatttatgtgcctttggagtcaaaactgagttgtttacgtcggaggaaagtccgatcgagggacgaacaccttgtcaagtacatggcgggagacacaagtattatattccataaacatatataaccaatccagtttacaatcaaaaatgttgagaacgtgttcatcaagaaccctagagagtacgctataaacctaatgagacccaatcgacctgaccttcatttgtcgttgtgtatcctaatccgtcgttgaaatgaatcgatccttcttgcggctgcggatgctgatgccgatgctgatgctgagagtgttggggatgggtatgagattgattgtgatagccttcgaccggtcccagatctgacattgagtatccctgtccatgtgtcaattctgtcatattcgcactattacctcgatgatagactttttcgtccacgttcggaaagaccggtttgttggaatgttgttggtcgataccatgacgagaggtgaacgaagacggcgttgcgaatggagggggcgtgtttgaagtaggaaaggtgttgtccagatgagtgacattcaagacttgtcgaaggtactgatccaagtcgaacgagtttggtaaagtatctggcgtgggagatacctcgggtggggctgatgctggcaacgattggttggacgaagcaatagaagatgatgaacgagacgacggatggatgggtgagtctttcgataacgagtagattgatcgagaatgactctcagacggcgaacatcgattatcggcatagatgtttgtcgaaggtcgcaagtgagctagcttatcaggcgcgtttgaagttgtctgctcagttggtgacgtaggagtgaaagttgagtggttgaggttcgtagtatcagattgagacgcgatcgaggccaggatcgcgttaaaatccgtggagtaactgggagggtctatggatatattccccgtgctggctgcgaacaccatagaaggtgttggctcatgttgctgctgagttgacggctgaactaggttgaagttatgccctgtatttcccaaagtagccgctatggctagctccaaatccaaattaaactcaaacccgcatagaacatccaacccagactcgtctttttgaacgctaccgctctggtcgatcaactcattgccggttgcagacgacatgaaatctgacttgctgctagtttcagattcacctttaaatccagtgggctgatgcatacctggaaacatcgccgggtgatacatcgatagtctatgcgagtgatcgagtgaggagtgatttgtgtgtaacgggttcgagatcgatgaggatggtgtcgagcttgacagtgccctcccagacgagttggtcacttcttcgctgagagataagggttgattctcatacgcgtcgattgtcttcaagttcttttttgagcaacaacccccactatcttctgtctccagtttaacctgagaagacggcaggatactcgaaggagttgttgcgcattgagtttcggaacaacgagacgactgtcctgtcgacgtaggaaccgagtgacctgcaagagatgaagtgaatgagggtcgcatagtagaagatgcgaagggcatgatagatgtttgatccgtcatagcactgcggctcgatgaatgatcgttgatctcgtctggttttataggcgatgagagtgtggcagtcgtttggtgggctagactattgctttcgggtttgaatgaagcctcgaggcctgatgctgtgccttcacagaggcacttctcgcactgtacaatgaagtcgcgaaagaggagatcagtccccgggtagaagtgtttataaatcgaatcgagatacgcacacaaccacaacagtccttcatacagctacattcccccggcggacattggcactgtccatcacagcattccgttaagggttttttctctgatgcaaatgcatcttcgctgaattgggtattattaggcgtcgagattgtgtcaacagatctgagcatgaactgagaattggacgggtttgatggaggtagcatcgcgacagaagcagaaaacagatctgcaactgtcgtcagatttgcaggaagtgcaacagacgaggaacaattgaaacatctgcagacatgaaccgacgagcatttggaaaagtcagaagattgaaggaatggacatgagtacgaagacaacaggttatagccaatccaggaagctagcttacgatgaacatgtctccggacaatccacgtgggattcattatccacgtcctccggatgattcccatgctccttacaacttgggcatttacaatccttgccgcaagtacacgtgctcaccatcaacacatctccgatcgcgtcttcatatatcgctgacagactaggcaagccttcgacctccggatttatgtcagaacctgatgtccgatctccaccggccattctgtgacaggaagattcgttgttctccttgccgagcaggagtgatacggacgaggtctcctttcgagcacggacatagtttcctacgagttctttcagaccccgtctaagaatctcctctggactcgccaccctagaggctgaggatattgattctgcagaattccgtacttgaagccgattcacagaatgggatgatgactgaggatagggcgtgtaatatgatgcccgtgatagataattcggaagcggtctattggctagctgaccagatgacgaatacctggaagaagacgaagatggcgtatggttggaagacgaggaagcaataggctcatgtgttgctaacggtgaggggaagtaatctgcaaacggagcaggtagggtcatcggtgtaagcggtaagttggagtatgtggagagagcaggtgaagacgatgtggatggtgtggatggaagattgggttcatgagatgttggaggcgaaaacacagaggaacaacatccactgcctgagcctgaactagagttgagtgtcgacccactagggttgatactagaactatcgtttctggccacatgcttctctgtgaaacaatgacattcaccgccgactgaggaaaaagaagaatggatgtaaacttcacgaacagcagccggcgatgagtatgaagaattgagatatacctcgacataaacactgtttggctattgctttcactagaaaagtgcatatgacgtattggacagataaatccacgagtcaacatgatggatgtgtcttgggaacacataaagacattacactgacttctagcttttccctttcccagagagttgggaatggtcgactcatcttcctccttcttcagtccgccaacagaagacaaattttggacatcctttagcccgtttggaagagcaggagctgttaaagtgacatctttcttcttcttctttgcctgtcctttacccttggcggaactgacaactgattttaagagccagaagagacactatcagctataagcatacgccggtgaatgtaaaagatgaacacactgctggtggaggatccctcggcgatctgtgaaggatccaatatcaacggaccacgagcctcgcacatgcactttacatggacctgtttcttctttcgaaggtctcgacagtggctgcactgtgtcggcggtcgacctttcttcttgatctcgaacagtggacgatcggtgtgggcgcatgaggacgaacggtgacctacgaagagaaggagaaaagggagaagagtgtttacagacatgatcaatcgactgcaatacacgtccacactagacataactcaggaaacgttccggccagatagacaaatgagacgtacctttgatgcaagcttgactatatgatacaaagcatgaccacagtcaagatttcgatcagttgaattgagttcctcgataagcttgttgttctagccaagagagcaatccagtcacatcgtagaattggaagcgtaccatgcatatttgatctgtgccgatcataccgaggagtcaaccgaatataagcttagataacaacgtttcactggtttcccgaacaaacaaaagtcgacaagaagcaagaagactcacgtcgtttatgagctgcgagtgtaccaacaagagggcaaacagatagagaacagtcactcaagaggcccaggacttcctatcacgaagaaaagacaggttggagacttaccaccatcttgaatgcgagacccggctgttgagggaatatcgactttgtctttcgagcaatattctccagaagtccgaggcgaagtgtccgatcgctaagaatggaatcaaaaagagggatatagaatgatagataaggtggatatcttgaatgggaaaactttcctagtcatgcagacgtgacaaggatggaggacggagcagacaatatggagaagtatcttaccaagagtggtattattgaggcttttttctaatcgggaagaattatatatgaaagaggtcgatctcgttgccgtcgttagaaaacaatttctaggacgaacaagactggatggcaatcttcaaacagaagagacatacgagtcgatgtctagctctttgttttcagctttctttcttgcttcgatagagatgtcatttgtcgatattgtcaatacgatcaggatgtctctttcatcctcatttgcttctaatctgactccactgtttccggcggatactctgagcggcggccaaactgaggcctttttgcgagcttcatacaccaccaacaccacaatctcagttccgaatacactcataaccacatatccgggtctcccttggcgcttcttatgacaacccacatgatgttcaactcaactcgactcaacacattgtcatcgatagacaagataataaacaaaatgaaaacaaggcagaggcagagcacgtgataaggcaagattaaagtaaaaaaaaacacatcaaagaagaaagaacaggagttccacgggataacaacatatcaaaggcaagatttcatgtgaaagaaattagtggcggcaccatcgacgcctcgacaaattggccgtctacgaggatccaaggagcggggccctttcctcatctccgagaacggccttgacacctccggatctccactgtgaacgatgcatgatgagcaggtatatggtcaaatataaatcccaaatctaagtatggctatgattgaagggagacacgtacggtagtgaaaagagccttgacagagaagaaggtggcgagaatggcaaagaccaaagcggaccagtggatgaatttgctagaagtttggtgctgaaacagagaaagaccgttgccgaattagtctctagtgacgaggagatcggatttgagacgaaaggcaaaaaaaaaacttgtttacctggaagatggcccaaagaacccaggagatggtgagggctcctccaagatcaccctctcgagagctgaaggctatttgatttcatagggttattatcgtcagatgttgaattgacggcgataccaaaacgattgataaatgtgacgaaccatatccgacagcagaggtctcgaggaaaaacctgttgtaggaacggaagggcaggagttgaacatgaaaccaacaaatcttgtatttgaggacagtgatgtgtttgaaatatatataaaatgtgcttacaaggcaaggaagacaaagaccttggttccaacgcctgcatgatggtgagcctctcgtccaaaagcctggaaaccagagaggacgacaagaacgagagcccaagcatggtacaaagaatagggaaggtgaacgaaaagctcgtcatagacattaccacctcggtggttgacccggacggtgtagtagatggatgagacagtggcagaaacgcttttcgtcgaagcagaaagacatgagctcacaacttttggagagaatatcacatgaactggactcacagaatcgagaagatgaaagcggtgatataccatcctcgaactccgaagaaactgtacagcgaggtcaatgcgccaagcaaggcaaatcggattccgatgttgtcgatgatgacctcctttccggcatcagctgaatgaatgaccgacaatgacgttgatcagtatatgctgccttaacttgaccaaacgggtttctatgaatcatggtgatactcactccactggtagatgatgtatccgagcaacaagaggtggatcagggacctgtgatgtaagtatatgccaatcaaagggaaaagagaaggagactgtcagaagagatggctttttttttttaattaaaagaagaaaaagaggagaaggcaagagatattgtccagaatacaatatcccttccaaaatgagcttaccagatgtagaaagcgtaagcagcaggcgtgatgaaagtctcctttcctggctctcccgagaaagtgtagacattcgcaccgagattgacaatgtagacgagggtgttcaacacctatcatggacaggaacacatgcacggggcagaaaaagaaacagtaatgtggaatagatttcgatcagacgggatagaggctttcaatccaatgaacagaacagaaactaccttgaggagaagaccgtcagaaagagccatgttgagtaggtaggctgatgtgaggaggcgagataatggtggttgagagatgaatgtgcaatagaaagaggacgaagaagtagggcctatcaaatccccatggcgtatgaatttagtttgcccccgtcattgggacattgtcagccatagcatcagtctcagtgtcagcctgagcctcggtgacagtgacatcatcagcggcagtcatgtcgaacactaacattctcgccccctcattctcttctaggtgtagggctggacggactatgtagcgcgacgcaatacaatccctgttccgccaagtgtaagaacaaggagagagagcggagaagatgatcagtactcggcacgcctcgctgggacgctgtcatgagaaatgcaacaggcattcagcataggcgaatcccccggcatacgtttcaacactctttgatcgcccacgttctgctcctgctcgagaactcgccatggcacttggaacacactttcgacgtctagagctcacagatcttgcgaacccggagcaacgagaacgctttcagcttaaaagatagcgtctccacagggcctgaggtatgcacgcgaaaagatgagaaggaggcgccgttcccgaatgcccggaaggtacctggacgtcctttcaacagacgaaatgccagcttgtggtatccctgctcgctcatgatgtgtgcacatcagcggagacgtctccactctcgggcggcgtaaaatgtcgagatccaaggctaggaatgagaatgtgaggcgagagtagcgcggagataaacgagataggcaattccaaacgaaagaagatctgttggaagaaaccagagagaggcaatggggtaagagaggcaatctacagtgtcagtctggcagttttcacagtcagcgtgagtctgagagtgagagatacttatcacggagatctgttgacacttttacgatgtttttttatccacagctgctgtttccgagcgtctctgtttatcctcgcgaggtgcctctatggcttgaaagaaaatgactactgcgtgccatgttcaaccagaccgctagtgttcagagacatgtcgagccctcccgcggtcatcgagagaagcttccgacaacccgggtgagcagaactcctgaaagcaaaggcaactggtgagtttttcaatgcggaaacttgtcctcatcaccccgacttcattttatccttttaccagctgtcgggattgatgcctgcttctttgcagaaaatcttcttggtcggttcggctgttgaaggtcatgatgagtgacctgatcaagactctacaactcatgtacaaagcaatgaacaggcaaagagaagaggagataaaggaataaagatgattttctcaatatagacacgtgcagctgatctctgcaggcttcgtatggacctcaatatcaggtacacaacatgatctttcgcatgtatatgatagtaaggctcaagcttgatgagaacagaagataagaaattaaagagcggatgaagcaacagcttgtgggtagtgatacaagcgcaagaacacgggttactcaacctgcatccacgacgattagtgctatcgcagaatgatgtatatgttaaatacatcaaatcgctccctcgtccccagcaaaccgaacgtccgcattctcttctagccagatcatccagtctttcaagtacgagcttccgttgctgactgttcccgaatctcctatgactacaaattgccgttttgccctggtcatcgacacgttgatccgtcgttcgtctgacagaaaaccgacctctctctaaagatgcgtcacagagccgatcagcccatttgatgacgcgcgtgttcttccttatcacgcaaagaactataaagcttaccttttcgttactccgaacaagacttaagattacaacctctcgctcttgtccctgcagcgagtccactgtgccaatcaacaaatttggatattctgttttgagaagactcgaaagaagggaaacctgagcctgataagctgctagtatgccaatatcctcaggcccaacaccaagtgtgatctggttactcaacagaggagagatttcaaattatgtgatgcaaatgaattcatcatcaaagactgttctatagactgaccaaaagtgaagtctcatacgcacaagtctcctgacgtagcgctgcacgagatcggcctcattctcattcaacttgcttccttctccgtccgaggactttccattccctgatccatcatctcgttcatagaactcacatccgttgctatcaaagaacacaacaggatgatccaaaaattcgacgtcgtcctctgataggtctggtaagtttggaagcgaagagagcgttcgattggaaacagattgatgcgaaaccaaaagagatgaatatagtgctttagatgcatattcagcgatacgatgattcattctgatatgccgaaaagtgaaacatcagtccacagtttgaagtcttgaggaatatccgaaacgggacgaacctgtattgaacagtcaatatcttcttaattcctggtccataaagattttccagcctcataaacaacgttgttgccaatgagcgcaaaggtttcaactcagtctcctggatctcagttgcagttgattcagtcaagtttttgacgagctcctgatctggatgaatctcaagttcgtctatctcctcttccttgtcatcattcaaagacgttccatgcagatcaagtttggccgctttaccctctagtgtgatttggttgccctctttgctcagatcggtcctggtcttctttttgggtgcttggtcggtctgcttcacaatctttcgatgagttgtttctgagagtacagtcggtcccaactgacaggggtctcctgccagaatcaacttctttgcttttagaatagggattagacaaacagcctctagcgcttgtgttgcctacaacaaatgagtgtattgatcagagatcgttcgctgaagatcgaacaaatcaagggatgaaacctaacaaacctcgtcgatgatgactacatcaaagtcttgaccgaacagctgcctcgatccggctgtatgacaagtggcaagcacaatctagaaaacgagcatgagatcgaacggcatgcatcaggtgctgctgtacgatggatgcagaacaatgtagacgacaattgagcccacctctgttgtagaaagcacgttccgaacgacacctgcttctcttttccggaatctgccatcatgtgtttatgtcagtcaaccttcagatttggcagacatgtgctgcatcagactgactcttttcgcagctctctgacatcgctatacatcgcgaatctctcctttccttttacgcttcctttttcttttcgacccttagagagtctgtctagatgaccatctagttccttcttgacatccttgaccacttcgccgctagatgaatgagcggtctgatagtccagcgtagtgggcaacaaaatagggaggatacgagcagggtgtccaattcgggttatggattggggcggaaagagcggtgacaatctgaggagcagattatctgatgccgatcatcaacaaagacgtaaatcagctgtgtataccaacacaacgatcgacgaatagtgcaagatgactaaccaactgagaggttagaagcgccgcaaacgagaacccgctttttttctactctgattaattgacggatgatttccacgagggtaaacgtcttgcccgttcctgggggtccatgaatgcaggccacctctacaagcatgaaaagagaaactatagtcagtggtcgttcaaattcatttgaggagtacctacagacgagatattcgatcagcaagacaaaccgttactctctaacgcaaaccgcacggcttctttctgactttgatttaaagactcatcaaacaaattgatttcgcctatcggagttgatgtgggaggagacagaccgaaactattatcgatgtcacaaaatgagaagaggaatcagattggtttagatcaagtgcgcggcgctgcataacctgtcaaaaagcttcaaagtggttcctacagtgttttgagtaatggaacagaattatattctggacgtggtccacgcacataattgctgaatggagaagttcgaaactcttgaactttctcgctcattcgctcatcgagctcatcctccgctccttctggagcgtttataggctgttctatcaagttttccccgatagtctgtgtagtggtgggcgcgttctccaacgtttcttcgctgaccgaattagaggatgaaacatcgattatgttggtagaagttgtagtttcagaaggggtaggtttgattgttgtatcagatgtagaggctggtccatctgcttggatgagccgcctgactttatctaaagctttccccatcctataaagatgaatcgaagacaaagatatatcagtatggaaatgaaacattggtcgggtaatttgaaggttcctacctatcgaaagttcctgtagcggcagtcttgatgctgtgtattggaccggaccaatattgaatcagatcagatcaaaatggtcaaattagacaacataactcgtattcactaacagtcgacatctttccggaatctctaaatcatcgccatctctaaccgacacggctaatatcacgatggtttccgttaccttgtaaatgattccttcaacttctttcccttcttcttctgcaggtttcttcgaagtcttgcccttccgaacggtctcttgaggaacgatcttggcgggatctccgtttcgaaacccatgagagggtaattttggatctgtatgaaaagcagaaggcctatgtaggctaactagactgttcgcacgcgatgtaagattataagaagtgtaagtacgaaagcaccatcctacttacccaagaggcaaaatgcaaaggggctaacgatttgcctcccaacccgatgttcacaccagataccccgagtcctactctcagccaaagtagccttctcaattcattagaacaaagtaattactgaatgaagcaaagaggtttgtagagaaggggcttgccattgattgctaatcctttttgtgcaagaacctcccatgagcaagaagtcgagagtaaagccgttcgggcttgatctgtttcgagctccttgtctagaagatgggacaaccggtcgaggtattgacctagtgttgcactcgaaggtggtcgaactttataaagactgggcacaaaagcaggagaagatgatgacatcggagttttcgtcaaagctgttggtcggtcggagatgtttacgagcaaggaatgatcgccaaaaagcgtgaaggatgatgacgcgcgttgtaaactcaagtcttgcattttgtggtatctgcagctatttcaatctactcttctatcaattcttctgagttctcttcaatgattattcaagaattcaatcacatgagaagacactatgattatataaatttaattaaaaaaaactaatcctacagttgactgatccgcgaaaggaatgaacattgactaaaataatacagaggaaaacacggatatgataatgatctacaacagatgggtaacgtatgcttttagagggagacggaaagcttcacctgaacactcggcaaacagtaatgtatatatgtgtgacggctagctttttgtgatagctatccttccttttggcaagaccactgtacgcctaggtttcatgaccaactcttctgttttaaatgtcgaggtcactgaatccttctcctctccagctctctgcggggagacgaaagacgtagtcctcttcacagcacgcacatctttggcttcagactttgttttatctgcactctcctttccacagtttttagaactctgggtagacgagattcgttcccttggtgatcgaccttgattttgaacctcttcctccttcaaatcttgcttcaacgatgtgatcaacttgacccatttcctatcatctccatcccactcttcgtggaacaactgcttaagtcgattgacaatgagagtagcagagtgaacgtctgccgctgcgtactctattgcttcctggctcaatggtttcgtccaattagaggttcgaatcgcgcttttggggaggtagcgagtgatataatagtttgtcaagttttgaagggagatgatctgtcatgaaagaaccagccagtgtttgataaaacaaagcaaaaagtttagtacaatgatcgtttcttcacaatatataaagtgagagagcaaactaacagttttcccaggtcctgtccttattgggtctacactccttgccaagtgtgaaatgtcgacgaatcctctaacaaagaccccaaaatcccttttgagctttaacgcatcgcctctgatatttactccgaccttgattctatttggatcgctcagaatggagagtaagcgaggcggaattttgtagtacatggcagaaatctgacagagcacgattatatggccgtcaccaatctgcaggagggccgtcttacgttcgcagccttttcgatacgagactggccattccatgtcaaatgataaagggactctgcggatatattgagcaatcgtcagctaaggaggagcgggaacgaaattcgtgacaaacatcatgaatgactcactccagtttgaaacagcctactagatcgtcaacctctcctggggatactgaatagattatactgggagctctcccaaaatcactgctcttgatgtcgaacaccggatggtcctctggatcaaagttgatagcctcattcatatttgatgaagtcctcttcagcaaggcgctagtactctgtgttctgccaagagcttttcttctgctcttatcatattttcgagtgacagttgagaacgtcgtcaagaattggttcaatgaatcgcttgttgagcggccgatgggctgcctagaaggttgcaggttgaatgttggtcgagaaagctcattgtacggcttgattgggctcgatgccaggcgagattcagaagaagtataaacaggaattgctcgaggtcgcgtgattggtgaacttgggctagaatgggtgagatcgatcacgaagtccgttcttgagaagggatgatagtgatcggaaagacaaaacaaggaatgagcctgtcgatcgagcctttttggaggacgaaaaaacagtaaaatacagagagaagagaccaacaaggagactcactgcgtgctaaaggagcttccagggatcatgacgattgagatatcagtgtgaagaaaaggaggaagaggattctttaaaagggagtgagagtgtatagtggccacaaggtggcaaaggaatgagggcgggtaaaggatcggatttgttaccatgacgacacagtaaagagatcttatctcgttcagaccatccagacttcaaacaagcatcaatccatccatccatccaacgtcaacggtcatgtcgtcaaatacaagtgcagaaacaagtctggatgaacaaaacaccgccttatttgttcaattccagtcctatgacttcgataacgacatagaattctcgacaaaagtacttcctttattgtcaaagttagaatcaaacgggatcgggacagatgtacaagatcttctgttgaaggctaaggcccgatatttatccaggtagttttcctatttgcatgcttgatttctatgcctgaaatatgtgtttgatcgcttatcatctcttttcaattagaaaacaaaatatcatcatcgatattccgacgtacaataactggctcgcatcaccccttgctgtgacctctgatataaccctaacacctgacaaggaaataactgctaatggaagtgacaacttctcaatcgtgacgccaaccgtccacaacttcatcgcgtctcccgttccttctgaaggtcaaccacccatagcgcctcttcctttgcaagagcttgctaaactgatcgcgcagggacgagtggatgaaatccctgtgttgcatgtcgaagagagattccacaccgttcgtgctttgccctcatatgtttaaatctcaaaaagtctcgaagcttacgcggatgattttcatactaaacccaaataggctccggaaaaaacagaagtcactgtgccagttctcaagccctgggaacgtgttcaaaagcagtcctgaccaggtatcgagaattctgtactgttgacagaacgaatgttgtaggtatgcgtacaaaacatatgaattaaagagaaagaacaaatggatcgaaaccagcgcaaaatcggatgacgaaaatcaacaagaaaagaggaaagaggtacgcatgtgagatcgaatgcagacagacaatgaaaagcaaaaaggagaggtgagatgtacgacccaaggccgatacctatctagttctcgggtatacggaagatcgtgatttctgaacgaattcaataatagcggcactgaatatgtcagcgattgcggagaagactcagtgtaatgatgtgcaagaattaagatacttgccgttttgtttgaaataccgtctattctcctcgtcaatcaaaactagatttaagaaatacctggctgaaaactttttgttgacatctctgaatgtcggtgtgagttcgaatcctccaaggaaaagtcggatgggaattgtttctcctaaatgaatgagtaaatgaagaggaatggcgaaacacatcaattacgcgtttgaggttatttgcgtccgtcttcacgtgtgaacgaacctctaacaggagctccgtccatgatctttgattagaaaagatccgcagacagaagaaagtagaataagtcactgattaggcaacacgagcagcgataagtagtatgaagaagtctagaattacctcaaatttggtgattgtctcgctttcattgtacagattagggggcgcgcctgtggtctccttccgaatgatagacagctccatgtgtttaattttgattcggaccagcaagaagtagatcttgccgacgatcacatctttgagatggtacctaacgtatccatcacgcaggtggatatattgtattcgatacgtcaggacccaaccacgctcgtgtcctttttctttcctatcattaatagagagagaaaaggataggacatactttgacttgttgtactcgaattcaatatgcagacaatcctcgattccaacttccatcttgatcgagttattcgagtccggtggcatcctgtatgagtgcacccaaatatctttctctttgacaacatccgccattcgtcgagagattgttactcgaaggaagtatctgatagcacgtaggtcaaatcttgtgttagtaaccttgtgtggttagttgaacgaggtgtatgtttcaagagaagacacgaagccaggacggacctcagcttgacattgatgccttggtaggactcgtactgcttttcgacgttcttgaaattgaagttgaatgtctgcgcctgacgcatctctcctggagaagcaagctcctgagacaacgataagaattcatagtgatttcctcgatcatagaacctaagaatggatgaaggaaagaaaaagtggtcagaattttgtatcgagtcgtttattgaactagcttagccataacgtacatttctagcagataagacgaagagatcgtgagagaagagagtatttcagatcaagctctcatttcagactaagactgggtattcatgaggctcacctatcgatccaacctgaagaacgtcggtcccaatcagtccatacacaaacccatgcgattagcctcgtttgaccaatgtgttatcctgataactccatcctgctatctatccgaccaatcccatacatctgtgttcgactaggggactcacaaactcgactttgatcccctcatgaatcagcttcttcccgtctttcactctgactgtgacctgcccgccaacggcttcgccatcgaagtatactggagagagttctttttcgtccttctcgagcttgatctcaacctgcttccgctcagattcggacgaaagtcggatgtcgacatctattggttgagcaaacgagaagaaagatgccatctgaatctcacgaggcgtatgcttgagctcaacaggtggtgaaaagctagagagaaggatgaagtaagaaagcacgaggaataatcaagatggaaggatcggtagatggccaaaagcgaagaacggccgctgagagaagccacgatgactgtcactcgtgtggcggtgttggctgcgcggaatgcacagcttccccaacttctaattacccatgttggtagtcagtacagtacattttatgtctggtgtacagtctatctatagatacagcggtggtatttctgcaactctgtacccgtccgtaactctgatcccactcttggttgagttactcctcctttctgacgattttctgagtgtctcgcgtctttgtcggtacgtttgcgcgagccgatttaggctttgggttcggctttgctcccggaccaggcttgaagtatccgtccaacgtattcttttgcccttgcgccttcctctccttttccttttctcttttgatcgcctcatcagatttgaccccaatctccatcacttccattaacactctaaattcttcgtctccgatgattcctccggatgcttctcgatgccctctggcataatccccaccaacgcgatctatccaaccgggacttacggcttcgcactgcggcttgtacgtattgaggatctcgatcagattcggggttgatgaatcagagggcgaagaagcagaggaagctttcgatttgggaactctgcatgaaaaatgtgtttttccaggagtatacaagtcgtttgtacactgtggcgggtatcgaagacagacaggagatgattaggcatctaaattcgcaaggatttcgtcaatatcttacttaaattggtcacgtaccatgaccaagacaaggtctttcgcagttttcaacgtcccagcccacctagtagcaatcagcggatggacttggtaaccactatggatagcgatcacggcgattcggccatctttgctgaattttggccctgcgctctgccagcgagcggtctcggctgtcgtgcgggctcgacaatctaatagataaggagcagatataatgtctgagaggctggttgcgttgaacatgacgtcccacgctttctccacatcaaagtctggcgttcttcgggctagctcattttggtcatttgaaggaagaacgaatgagaagatgaaagacgacaacaagacatgcaccaacattggacttacgagcattcaacatagagacaactttagacaacttggactttgtgcttttcttttcgacttcggccaaccaactaggccagggctcatccttcccaaacttgacagtacctgctcccagatctccatatactcctatcaatgctgactcaccctgagtatccttcacggcgtcgtccaactcacaacagagcatgtaggttaacatggagcttgttgcgacaggctctgatttacaagcgctaaggatcgctgcttcatctggaaacatatctgagtaatgatggtcgatgatcagacattttgttgtcggaccgggaaggagcggagggccagcacgagacccttgatcaagcgcgatcactctggaataggactgagctagagaagggggtaagctgtgaacgttggctcctttaggaagaaaaaagatttcaggggtcggaaaagaggatgaggttgactccgagcgggaagccatcataagtagtgttctataaaggatcaaggtggatgataaaccgtccgcatctttgtccggaataaggacgactgtatgcatgtgtgtgtgcaataataaggatacttagtctaaatagatcgagagagtgcacttgaactggataatcctactcacctcgatgacttccttgtacgcaatccctaaggaaactcttggcccgttccatgctttccctcggagcgggccagtcagcataaggcgaaagtttgattgacttgtttggacttgccgagacggacacgctgttgaacgaaggggaggctgaacgttttgacatcatttgggccaaactcttgaacatgtgtcgtatgtatggtgtacgatgctgaagcaaggcgcaagtcagtacgttcgatcgagatcgtcgcactgtgggtgcgtcattgttttgtcgcttagtcatcagagtcatctgcggcgttgaccgaaacgcatcatcgaattgcatgaggcgagctgtggtgacttgtaagggtcaagacatgcgagaatcgtctgtgtatgctatgagctgtacatctgggtccagatacattgaagaagagtagatggcggtggtggcactggcgatgagatgtctgagagaggctaggtcaagaaagtagagtacggaagtgaacaagaaacaggaggagaaagcaaggggaagaggaatgaagcgttctaggccactaggccaacgagccggttcgatctcacccgcctcttctgtttcctttgatgggttacatcatataaagaccctttcgagatggaaatgttcttcttcttccttctttcgccaccgttgaagtctatccttccttcattcaagactttctcacccaaaagatttatagccccaacacatgtccgctagtacaatcaagaccctggtgtgtacatgttcttcggtctacaatcgggatcagtgcaatacatgttattctgatgcttgctgtgctcttgaaaactgtctttcggtcacctggtcacccatgttctctagaacgtggtctctcttattccgttcgccatcgcccatctttactttggagtaagtcggccggtgacacggaattttcttgccacagatcaattgcttatcttactttgtctcattcatctcttcagtacaaagcatctatcgggtttgatcactatgtacacccttctccgattctgtccatcggcaaatgggcttggctcggtttccaaggacaagctctacttgtcattctattccagatttaccagttctgtcagttgatgcatctctgatccctgtattggttacctacaaatcaactgaccttgtacaatatgttctacagttgactctgcgctgcctgtagtggcaggtgtgatcggctcccgatacgctgtcgcttctcttgttcaaatcctcgccattctcgtctgggtggtaagccatgcacttttgccgtttgtctcttatcatcttctgtatagcttctgactgcgtttcaaacaatattcttgtacaccttacagcgaacggccaactacctcgccgccttcatcctcagcgcccttctctggcttctcgtgctttcgatctaccttgatgtccagcgaaagcacgtctcccggtcgttcttcgatcttttcgctgttcaaggtctcttttcattctggctcgtttgggtaagctgcagggttcctctaatacgtcattcttgagtacatgctaaggtttgccataaaactttttagtccacctaccttacgattttcatcggttctcaagccttcaacctagtccatggaaacatccacagaagcaccgtctggacctcgatcttcatcctgtgagtcggcttagcagattatatttgacatgaattcatcagctgataaacgttgttgtttctagtgcgctctttgccgccatctccatcggctcagccatcaccagtgatagccgaccagccggtgacttcaatcactctttcggaactttctgggttactcttggagttttcactgctgtccgacatcagcacaagctccgatcgctcgcttgggtgtctggcctcctcgccgttctcaccggtcttgtcttcgtctactcttcgtacactgctgtgagtttccaacatacatctcccttgtcttttttatgcatcacatagactaaacctactttacattcctgcaaaatctactttcactcagtaccaagcctaccaggctcgaatcttcttggtcgaagacgatgaagctgctgacgaacgacgagctctcctctcctccaatgcctaaatacatcacatgtccattcggatcatcctcttgcttaatttctgtattttgttgaaacctctttatcttctatatgaactgctttgttttgatttatcttttgcttgaatccattgttattactgctgttatcgattctattgatgctcagtaatccgctgtgattacccaagtttcatgatcatcggagagagaaaacgcgcgcgtcatgaaagtatcgatcggctacgcccgaccatagacttccatctctatcgttctacatcaaccttccagaccgtcaatgtagaggtatatacacatgccatcaactcgaaaagttccccgatccgataaaccgttcgaggcaccaacattatactcgtgctaccttcttcgacctgtctatgccaggtctagacggacttatgtcagttgtcttcctagcacatcgctattcttcttacctgtctctgctccatggtcttgattacttggcggctcaaatctcaagtgacgggaaccagcctggaagcaagcggcatgaaagccgatcgtttgtataacataaatttagtttactgatcatccgatttaaaaattgacatcacaggttggttcaacgcctcatccgatgcggaggctcagacaacataaccgagaagctttaggaggtgctgtaagatgtttctatgcaccctcttgaatggccctattgttcttgtccctcggccagaactatcactgaacataaactccttttgaaaaacatttacttattggtcggcgtgatttcaggcatatacaagaaaatggggaccatggaatatggaaatgctcgtgtatggatttcccagtaaacattctgctcttcaggtgggtgcatttgtctcgattgagtcaagatctctcctctctgctcatgtcgtgaaggatttactgatgagttcattgtggcgatcggtcgacggaaatagtttgagtgggcttggcaacatccagagtgagtccttgtttggtacactcataggttgctgtcatactgagttacactacatctctgcctcaagacgctcccgattcctccgtccacctcccgttgctctttctccaaaatatacctccaccggcaaactcaagatttccaaaccttctcttcaagcaccttacttccctcaggacccgacctctaatgaaccgctgacgaaagtaagggtggtgaagaagatgttgagccttcccccttggaacaggcttccacttcacgtccggttattctctagcgaagctgtgagactttggttagacaaagagcctggaaataaatctctcaaatcaaaatggatgaagtttagtcaggtcgaaataaagaggaaagggttcgaagtcgtttcggacttggcgggtgttcatggagatagaggtctcaggcaactgggaacaaagggacttgatgatggaacaggattaatcgatgttgatgattgtgtgtataagctttttctcggctctactttcaaactgcatctgatccagctcgggcctgacgcttttcgttctgcattatcactgaaagataaatttggtgtagcgcattgggaaaaatataaactcttatcagatgaagcctcgatatcccgtcaatcagcttgcacactctgccctcttccgatattcctctcccagcctcttacatacgcactctgcgtctcttccggtcttcctacttgtctatctacagcgcatctcacgtgcctctcctcccacttcttgacttcgcccgagtctacttcttccgctcatcctgttcatccggtcgaagggaaaatattaattcctcaatggggaacatgccctgggggatgcggatgggaaggagaatggggagatgtcgtgagaggctgttggacaaggaaaagaggggctgaaggtacatttgatgagagggaaaagaagaacagggagaataaagcgccagccagcgaggaagatgaagaaagtgatgaagatagggaggagaatagcgaagatggactcgatgatatggctgacgaggccgaagattaagtcctcataagtcatcgccggaataacgtatgtgcttcttatattcatattaattctttatgccgtaactcatacatgcgtctcgatctgatcgatcatatgaaccgaacagtgaatttccggttttgatccaatccatccatacacacgtacttttcaagtatcatacgcttcctcaatataaaaatgtcagagcttggcggctcaaattgaagcgagctctaactcatggaagacaaccaagtcttcattatcaacatgaccgtcgtcaaggaaggaggtggctgaaggcacagatttggatgatattctgaccatcttttatcatataactcataaacttcagtcagacagctcatcttgatccatcataaacttcttcgactgatggcatacagaatagaactgtttctttagaatgaaataaattgaagaatcaaaagaaaagagaccgaggtaatattatttcaagtaatccgccgaagtcgtcctacaagtcaagtcgagatagttgtgaaggcttagtctgaatggattgggacatagatatacccgaaaagagaagagacttggcttaccccaccgcgtagatttcgccaaatcgttttagcgcaaggatgacaactaccaagaaggaaccgggttgttctcaattaattcttcatctcttgaatatatcaaagcaaaaattactgacgttcaacatcaatagtgatttgcaaagcctctgatgacaccagcaaaacaaacagttaaacgtcagcatggtacaatctaacaagcgagatatgataaattcgactaaaactgaccttcctcgtttccttctgagcgctgacgtttgacttcgttcagcaatacgtgcgccacgattcgccaggagatctatattacgattgttttcattttcacagcattcatatgttgcaacgtcaacttctcttgtgcttgttcttgcataaggaaagacaagaagcgaacaaaggggacatgactgaccaccatgactaaactaagtctactgaaatccacatgcgcgaccatatgaaggatttttactactgaccgggcggacgaaacagcttgagcccatgcactgggttcgaaatccgatcgctcttggtagatcaaggcaaacgcgctatccagaaattttttacttcaattttcatgaacagaagatagaggaacagagatagaagaaacaaagacaagcgtgatcaaagtttgcatacgtatgaatcccggtatgtatcaggacagtttccgggtcaatcccccatgtctgaccggactgctcgcttgggttgtcagaggttgagcaaactggagagacctggttcaaaccccatgatggtagccctccaaggctgattcgtttcattcggcaaaaaaaagacattagtcgatgaccagtcgagaaccgtagtgatgtacgtagcgtcaggggaggatcgggcacacaacacgtacactatttgagcgggatttgattgatgagccggaagagacttgacaaatttaatgagcgcattctgaagccgtacaatctcagttggtacaggtttgggttcatcagcgtcaagatcatttcctggtacgtcatccgaaacgccggttgtcatgttgaaggaggcaactgagttggctgaaggtgtggccgagccaagagggtgcgacacgcaataagcgaggtaaccatctcggacagaaggctgaatgaattcatcttccagtcgggacgcctcattcaagaagaaagttgcaatatagaaacatgatgcgctcctgagtgtatcatatgctgtagaatcagttaaatgtaaaggtcctgaaagaattgaaacgtcaaaaaatggcacaaacaggtctccgacgagagtcgtctgagaatcatcgaacaagtcatacaacgccgtgttaggctgattgttgacaagattaatctggaaaacaaggagatataacggcaagttagagaacccaactcaacacaggtcacatcaatgcgaggaatgtttacatcagcatatctgtacaacggtaatgggaagggagtttcgatttccgtccagtgcatcgcctatgaatatacaacaatggaccaaagtaaataagacactgtgttccataccaataaggcgtcaatattgactaactgggggagatccattgcttgttgaccccactctatccatagtctggtcagtggtataaagaacaagaattcagagaaagacgccgtatgatctcattctgtgaggcggcgcacggaacgaagccttggcaaagaagataaaatagaagagaacatacccatgctatccagaacaactgaataaactctccgagttcaacaaaatccttgggagatcgaaagcgtctacttctgcctttgtatgattttctatcaaagcatcgagagctgggttttggatgttgatttgacatcgatgagaacggaaaggtaattctttgaagattgacgatagagcagaggcgcatcgcaagctgggtttgatgaagcacatgcgatgcatgttgatgaacgacgaagatgagcgaagacaacaatttgaaaaacaataagggaagcattcagaaaagagtaaaataacgaacccccccaaagacccaagctggtcgaaatcgcgctcgggaatctatcgtgtatcaattccggaatagtatggcattcagcatcgatgtgagcgggataatcagggagattttagaattcttggagatatgctgacatgatgaggaacttaacacgatcgcagtcctgatcaagtcaatcattcgatgatcgacactattcacggcattgtctaactttttctgtgcgatctcaaaaaatagatcgtccaatgctctgactgcctcatcagaggaaaacaaactagcgcaataatactattgccgcacaagagaaacacatcagcatcaacattcatgttgcgtcaaactctgacaaaactctatccaaagcctctatcgagagacaagaagtatatagggagaagcccagatcctgcaggaattacgaaccattgcaaagaggaatgcgggatgtggttgatccttgggatcactttcttgaagggaactaagtcacaacgatcgacagcgtccccgagccaatcataatgatatggagaattgaatcagaacccaatctaacagtcttcttgttttgttttgataaatgaactcgaggcggagagaggactatggatacagaccttctgaatctatcgatgttcatgtcgaattggaatactgccatcctagagaagaacaagtcaagaagtggggtttggatatgttcgggaagttcctcataaatcagcacatgtgctctcaaggccgttacgcgatcctctagaggtgctgaggatggcgaatgaagtaaggacccctgcatagaagaaagcgagggagtggataacggctgggaagaatcggcgctcaaacgatgatttgggttgatctgcatggaggcaaagagttcaggaactatcgagcgagattccgatggaaagattgattctgttgtagtgctttgtgctattggaatggtttcaaacgcccagggatcgagtgcaagatttgtattttctgtctcttcaatgagttggttgagcacatctacgggaaagtagtctgcctgaacgacagactcggtggctgtccattcagcggaaggagccttgcggtcgatgagatttgatgtatcaactccaaaagtagagctcgttccccacaactcttcgaaagcttgggagaaggcttcttgttcgtcgcgctttgcttgccgaccagggcgagatacctctgaaatgccatccgatttgacctggctggaggatgcataaggaaacgttgtttaagtccttcgactggggattggatttgctggtttatcttgattggtatggtcaggtgccagttgagcaagcatagattcaagttgaactggtgcagatgagcgagagacgacgatagtgtccacgatcagcgattcaagctctgctgttgtgaaattgacttggcagcgagaagaggcagaacactgaacctacgaattttgtcctctagctttttgacatgagttctcggtttttgaggaacgtcgtatacgcatttttgggagttctaaggaatcgcagaggtagttaaaccaagttagagaagctgagaaaggatagcttcatccatgcgtgagctatgaaacgcagaacatgaaaactgcgttctcttacctttaaacaaagagcacagtttggtctctcgcccgtactgatgaaggatcatagagatcagacaagatgcactcgattcgtgatgcaaaatgaagataacataccatttcttgagagtaataaagaagaaggaccatcggcctgattagcctcatcatcagaaacgaagagcacacacgtacatgcaggtttcgtctgatgaaacatagagatggacctacaagctttctcttcctgccatatatcaaatgaatcaccccagatcagttagatgagatacgccatgatgaattgtctgagagacaagcaacgggtggaaggactgacctgcaaatttgacatctaagggcaaaaagatggatcgttggggaacaggtcgagcgatgtgtcgatcgatgcaaaattcgtcagataagcgatttgttcgaatatcaggcagaattttgaaagaacgaaaaaataaaaagctctgaagaagcgatatgtgacatgaacgatcttacgctgcacctcgtttgagaacttttggagctgtgaccggctccgaggacatgatgatctggataaaagcgtcagaacctggaaggaaagtaagtatatggccagatgatagctcagatggtgttgcaggtcactcgaatgaatgataaccatcaacagactatcaatattttccccgtttggtgatcgagccaagcttactctggcctgactactgaagattgaatcattacttagattttggttcaaaagtaggacaacatgttcggcaatcacatcgcatccatccccaacagagttgctagcataccaatctcctctctcagatctctcgtaagaacccacccaacgtcttcggtcgataggatcttgccgttcatccggcccgcccgtctctttctccggacattcgccttcccccggcctggctctgggtagtcacccgggcttggaggctgccaagataaacaccggctccgtgggcttacttggaatgaacaaatcaaatattgtaagtacatcgaagcgccgttatctaagtatctgggacgcgccttgttttgctttctttatttccggttcctctttcttgatcatctctttcgtctctactacacaccttgtttcttgttgccagtaaaaacagttgagacagttcagttggcatccttggaggacacacatcttgcagtaatccaatcctgctatgtcaggcatcgacgagactccttcgaggtaagtatcatcggaagcgtcctattgtcgcctcgaaggcatttgtgctaaccgtactcaccaaatactttggtctccgttcctcaggccaagagtcgatcaatcatactctcatgaacttccttctctaccaaccatgcggcctgttgattctgacggcgaggaggaatacaccgatgaaatgagcgagtctgtgagtggatcctcagtaatccaccagatgtcctacatgattctcattaagcgcactctactctgttctatctatctattttatcgtggttctcaatcataggaccctaatttggatctgtcctactcatattccatcccaacgggcacaccttcgacacaatccggcataaactcgtcaagcaccgtcacaccgtccacatttcctacaccccatggctatgctcgctcctcccttgcctcttccggagctgctacgccgtcatccgtcgcgtctacccgagacactccactcgccagatatgctatgaagaatccgtatgctcaggaaacacctcgacaagccccgtcaacgcctctctccaatggcaatactcctttttcatccaccccggcctcttatcaatctgccagatctagaacgtcgattggctcagcaaacagaagtcttcgctcgagcttgaattcaacagcttctcccaggagtagattctctcgacccagtcccagaagacaagcttctccgctccgtgatcgaagtttggcatcaaagtatgacctctccggaatatctgcagctacaccttcgatggcctcggagagtatgtcttcgattcgacaagaggattcgttcatggacgagcagtctttgcctctgtcgtcgagggaagatcagctgaacgatcactcgcttttggaagatcaggctcagctgataggcatccaagaagagggcaattcttttgcaagtttcagccgaactgcggaagtgacggacggaagaacaaatcgaagctccaatgacgacacccggaaccaggaagtcgcagaaggagtggaagcaactgacgcgtcaattgacctcgaaaatcagacacacaatgacggcgaaggagagtcaaagtttgatgaagtgacggaaggagagcaacatggtaacgcgactgaggaggaagattctgctatcgaaggacaatcgagcaacacctcattcgatacttcgatggggctcaactccaaatgtagactaccctcagctgagctttctctcgttcttgaagctgaagaggaagaagaagaagaggaatcaaagcaggcaggctcaaccaagtcactggtggatgctcctacacctgatgtggttgtacgtgttcttagctattttcagttaactctttatattgctaacactgatcgatcggtgatttatcgtgatgcttaggcgcgaacctcatacgttcagttgggcctccggcgctcaaggtctgcggctcctcgaccagaactcttatcatcacccatgtcgtctgccacctcggccacctccgaatcacgagtgtcgactcccaatggcgcatctcaaaactctcaacaactcgatgtcaatctcatttcgattcctttccaatctgatggagacatttccgaagatagcctgacaggagagccgcgaagcatgctcagcgatgtctatcactccccgctcaaggacgccaccaacatcagcttctccactcgtgctgaaaccgactacagaacatctcctgagaccggtactccctatcgacgtcctttgattaaagaatttaccatcccaattgccgatttgactccagcagccacatctaaaatccctcgacctgccctcgatacacctagaatcatgatggctaccccactcccgtcgtcgaacgcagaccgaagaaccagcctcgtgctctccaccttgagctcctccatcacccgaccgaaagtccgaggaacgccccatactcgccggtcgtttgtaggatcgggctcgttaagaaattcgacgttggcgctgaacgcatcgcgtgcgatgtctgaaacgccgacttcgtctacccatatgctcagcttacctggaaacagcacaggtctcgaagaagattcttcgtttgtctcggtcgaatcggcagaagatctcacaaacctccatcgcgccaatacttctttgcccgtgtcggaaaacccgtccaggcaaattggcgtcaagcttcacaaacaccttcacgagctaaacactcaacagcatgttctcatcagcagtttacaggatgagaacgaggacttgagggatcagttagaggctgcacaagccatgcttgcttcagctcagatgaagaacaacttggaatccaacgatgagagcggtcgaagcgagacttcgatggccccggtttctttggaagaattggatgaactcaagcagctcttgtacgagaaagatgaagaaatcaaaagacttcaccagagaaaggaggaggcggatcaacgagacgccgaagtggatgaagaacttgctatccttcgacaacaaatcgagcttctttctcagcaagaactcagtcaggccgccgctgttgcccttcctccatcaataccatccagtccggaaccttctccttctattcggacacacgcctcgctcgaaaacctattgtctgctaaaaccgcggaagtagagtccatccgagtcgagctagccgaggtcaaggctacggctgagcgccatattcaagatttcggccgaaagacggagcaccttgagtcagaaatcatggacattcttgtggagaatgaggccgagctgaagcttgctcagtcggagaagaacgatctgaaagatgctttggtgaaagccaaagaagaaaaccaaaagacgatagaatttcttgaagaagaaatcaattcagtacgggccgagaaagatgtagaattgaaaaagttggtcgacatgcaggcccatctggattccacgctcgaaacggtcaccgaaaaagatcagatcatcgtttcactccgaacggctgcgttgaacaccagctctgacggacgggtcatgcagctcgaacttgagctttcagcagcccaggataaatgtatccagctcggagaggaggttcgacagctacaggctcaggtttcacaatcttccactcagctcaagtcatctgaagaatttttcgaatccatcactggcaaactgatggcagctgaatcaagactggctactgtgcaggaagacgcaactcgcatcgaagaagagctctctaccaacaaaaaacgtctccaggaagcggaggagaaaatcacgacccttgtagatcaattggctcagcaacagaggaatgctgccgaacgaggccaagaccatcagggagaacttctttcacttggtgacaagcttgctgcagccgttgctcttcaagaacaacagtcagccaaacaaacagaactggaatcgtcccattccgaagctttgagccagctcaaaactacatactctgaattaatcacctcgctcgaggacgcggtagccaaggccgatactcaggctgattcatatgtccaacaaatctcttctttgcaagcacaagtcagtgagctcgaagatcaaaccacgagccgagctcgtacgatcccattgccaccctcttcgcctggtccctctgccgatgattccaaaatctacgccagtggaatcgaaacatctttcatcaccggggatgaggtcgtcagtcagcttaaggctcaactatttgatgcgaataaggagcttagccgaatgaaggcagacatggcttcctcgccgtatcgtcgagcggcgttggatcacaagaacttacgtattcaagtcttggaatctctcaataccaacctggattctcatttgggcgctatgagaaaccagtatcgaaagctttccatcggttctttccgatcagccaactcgtcaatcgcgaataactcgattatgtcagttcaaacacctagaaacatcggatctcttcgaaaggtaagttcacacccatcaaagtctcgattcgagcttggtcctcagctatgtttctttccgtccgactcatttaatattgtccttgccatctatcagatgccttggctggacagtccctctcccgcctccaccttcaaggaagcctttgaaatcgagcgcctgcagtccgaattggatcatctgaatgagctcattgatctcaatgttgccaaactcaaggattccggaaagcaacagctctcgctgtcagatgaactgtcgagtaccaaggatcaactcacaaaagcacaatctgagtttgagagcgagaaaaagaaggctgaaggccttctttgggagaacgagcagcttcagcttcaaactcaaaacctgttgtccaaacaatcttctgattctgtgtaagtttgtctacttcttcttcttgaacatcgacatctgcacgccgctgactcttacgctttatacaaatgtagactttcaattcaaattacctccttgcaagctactgtgtctcggacaaaagaggaacttcttgccgttgaacagtcgcgtgatgcagaccggcagtctttcaagtcgaaacaccaggcattacaaaaaaacctgaacggtctcgaagctggattagaacgtaaagaacgagctctcaaagaagctatcaatgctcgaagattgctggaagaggtaggtcttctttgtcttctcttgaacaacagttatccacgaccgccttgttttagcgtttgttgacctattttcttttctttctcgtagaacttggccgaacagcaaattgggtctcagaagcttgagcaagatatcaaaaagatcaagaatcagagacgagaagagtctgaaagtctggcagcggcggaggccgctcgactgaagcttgagagcgaagtcaagcgacttgagcgagtaagtatgattttacttagttgaaattaaagattggagcagcgtgggaaaaacaaatattatctctgactgtatgtgtttcttgattaggatgtcaatgtggcccatagtgatctagaacacgccacccagcatgcagagcacctcactggaatcatcggtcggaaagatgcaagcccggttgatctgatcactgcagaaaaagagaaggcctcgctgagaaatgatatcagaaggcttaatcaagtaagttttcaccgattcggaagatcttaccacctagttggaaaaacactgacatgcatgagcgaaaacaggagctgtccaatgctcgactggatcttgaggattcccagcaagacgccaatttggtacgaaagaccctggagtcgaagcagtccatcatggctagtgaaattgaacgtcttgagaagacaagaatagaactggataccaaggttaggcactcgaccaaggtaagtgaattgtcgtcgtgtatatataacttttcacatttggtcctgtctaatcaacgatactcccgcctaaacattcgtcatccaaagcacgttgctgacgccgagcgcgagatcagcgacttgaagcaaacgttgaacagtatgttccaggatcatgatttgttctacatatatttcagctgttcatccgttcccttgactcccacatcattctctagatgcccgcgttgaagggactatctccgcccagcaggtcactcaagatcttcaaaatcttcgtcgacaaaagactctgcaagatgagaagcttcgagatgcagagatcgctttgagcgaagtcgagaacgttggttttttgtcaacattgtcctctgcccccttaatttgatcggaaattctaatcgtgcaaactcttctcttttagcaatgtatcgttcttaaggcgcaattgactgcatctaaagcaactacctcgaccctccaagaaacgctgacgcaacaacaatcggttcttgcttcgcaaacccaggatctcgcacagtaccggcttcaatcccaacaaattgaggcagaacgagagaccgtgaagcgcgagattgtcagcttagaaaaagagcttcaacgagcgaagcgagatacgcgctgcttgaaggatgagatctcgtctctccggagtgagcaaagcgcaagctcgagggcagagaaggacgtatctggcaagacaaatgaagagatggcggggaagctgaggttagcagagagcaagttgaaatcgctggaagctagtcagaagaacttggagcagagatacacatcagttgattcggagcttcgagtgactaaatctgagtaagttcaatcctgttgcctaaacgatcagtgtattggatgactcactgtatcatctgatctgcaatagtttaagcaatctgacagcctaccgacttcaagctgatgaagaggctcgacgtctcgattcagacttacgaaccgcattaaccgagtacgtatttgaagcttctatcctgtttcgatcctcacgttcaacatgggctgatcagttggacgtcctcataacggtttaccagtctgagcaatctcaaatatcgacattcgaaggaatctaagggattactagttgacattcgatacttgaagcagaagtttaccagggagaattctttccgagaagatttatcacttcagaaggagtatctcctcatcttgattggtcaactcagtcgacagtaagtgatagtttctctctttaaagtttgatgatcagctatggagcggttgccttaacttgcctatattttcgtggttgtcagacaatctcgagtgtacgctgcgatttctcagatgggttgtccagacgaaaaaccggtcattcgaaagcgacggacactcaagtcaacagttcatgctgtcatcttgatcatccgtactagaaactttgctactcaatggcgaaaggagagtgaggttaaggttgctttgatgcacgcctatgagcgcgtcgtgtcggaacgagctgctcggacagctatcggtactggtccttcaaaaccattgcgatgagtttgtgcaggctcgccggtatgtggcgtcctcatcaatacacttcttgctaggtcttcttcattcttacttggtttcctgagggaggctccatctgcattgtacattacttagttgctaacaacctgaacgtgagacaatggtcatttttctcaatataccctctcgacttccaaatcataactttctcaccactaatttctttcgataccgttcatagttctatatatgttctttctcaagtttaatttcattcgtttcactatcactgcgactaaaatcgcctgccgccgaacccaagacggtatccagcaaatgatccagcgcaccttcgaagcgcgatgtgaatacagattgtcagatgaattgcattgattatatattatattgaaacggatgatagagatatcttctcctgtaaaggacgagaaaccaagatctaagccttgttttctggttccttcacctccacttcgcccttatcgttcagactcattctgtaaagctcaacctcttcctcatcatcctcgccatctttgtcctctactcccaccggctgcttctcatcccgatcttccttgttcgcctcaggctccttgtcgtcgcctaacaacattctaccaaccaaccacacggctacctcgtttcgctccatcatctcggcctctccaacagccgtgtgacccgaggagttcttgatgtctattaatttgtctccaggagaagaagggtgaagaataagagcttttacgatgggaaggtgaccattgagagaggcccaatgaagggcggttgagccacttgagttttggagagagaattgagtgggaggaaggagaggtaaaaggtaattcaacaaatctgtgacgcaccggcccaatgatgtcgtaaaatttagcaaggacactttcaacttgtacacaacgcagaaatcgtcttgacagatcacaacaagaacgaaccgatatgaccgtttccagacaccatatgtaagcagccacaacccctatcgtctcgagcgtctgccagagcgttgatgccatactgagagacaaaagactggacctcttccagctctccgtatcggcacgagagcaagatatcctcgagctcctcctccgctggtttcgatggaatgttctgattctcggttgagcccattatgtctttgagtgaggacgaaagggtatatgctctgtgtgtatctgtgggatgatggtgaaactcgtaaaatcgagaaaattcaaaattatcagaaatctattgcttactgcgcatttcgatagtccgggcgtttcacctcgtcttcataaagatcaccatcaccatcacgacctattggaacctccgaaatggcaccacttttgactttggcaacgtatgtttaatatggtatctgcttaagatcccgtaggtacagatggcatgattgacgatttatctcggtggatttcttcccaattagatggtaagtgttcatcagactgttactaggcgggatccgaacagaattctgacagcctacattcggtaattgctagctcgctaaatcaatgggcgctcgactttgaggtagattcgtcttcattatgcatatcaatacatgcacatgctaacttttcttcaataacttactcatcgtcataagggaaacaaagctcgaatcctcgaatctatccgaattgccaaacagcgaggggcgaaacttcgagtcggaccagaattggaaatttcgttcgtaaagactttcatctgttcttgatcaatgatactagtgggttgtagctcataagctgctgtttgatggcttcacgcttcaaaaattagtggatatggttgtcttgatcactttctagagggtgagtcttttcgttcacgaacgaagttcgtatgatatgttgaatcagcctttggttctcaatatttgcacataaaacgttactccaacaggcgacactatgatgcactcctgggaggtcttagcagatatcattgactctgaagatgctcaagacatcgtctgcgacgtcggaatgttagtcaacttttatatcttccaaactcaagtctgagcttaatccgtcattgctgggttttcatttcttcaggcccatgactcacaagaacgtgatctacaatgtccgagtcatctttcacaaccgaaagattctccttataagacctaagatgtggatggccaataatggaaattacagagagctgagatatttcacgtcttggtcaaagcatcgggtaactgaggatcacgttcttccaactcaactaagaaagattacaggccaggttagtaattccctctcgaccgaacgatgtgacgtatgagaacttaggttaaacccctacactctctttttggcagactagcgttcagtttggagatgctgttgtagccaccttagatacttgcattggagtcgaactttgcgaagaactcttcacccctgcctcgtatgtatacaatcagccttttacacgcctcccctaatactcacatacatatgttgtccttgtgtcttgaatagtcctcacatcttgatgggtctagatggcgttgaaattttcactaactcaagtggcagtcatcatgagcttcggaagctcaacacacgtgtggagctaatcaaggaggcgacctataaagtgagccctatcgtcgatgtcgatatgtccgttcgatccttccttgaactgatcttactttctatgttctattcgagctctaggttggcggaatatatctctatgctaaccagcaagggtgcgacggtgatcggctctactatgacggatctgcaatgatcgttctcaatggagtcgttcttgcgcagggaacccaattctctcttaacgatgtcgaagttgtcaccgccacggttgatcttgatgccgtccgagcccatcgggcggtgagtagtcgaagtcaccaagctgctcaggcagagagatatcaaagaatcaatgttgactgggaactgggccaaggagtattgtctgctcatgagactgaggagatcgaggttagatatcacttgcccgaagaagaaatcgcgtatgtcacatcatttctccagattaattatggtcaaacttttcctatataaaaaactaactaatacgctacgtgtacgcaattatgtgtataagattgggcccagcctgctggttgtgggactatttacgccgatcaagggttcaaggatatttccttccgttaagtggtggaattgacagttgtgcgacggcaattatcgtccattctatgtgccgtctagtcgtcgaagcctgtgatagaggaggtgattttcttccccctttctctcaacgctttgtatgtcactgattttgagtctcttcattgttcattgcagaccaacaggttatttctgatgctcgtcgaatcgctggagaacccgaagattcaacttacatcccttcggatcataaagaatttgccggtcgcatcttccatacgtgttttatgggcacagagaattcaagcaaagatacaaggcagcgtgcgaaggagcttgcgagcgacattggaaggtctgtatcactcttgtttctttcttctttcccgagttaatttgatgattagacgatgccatcaaactaaccagacttaccattctatggtattttgcataaatagttaccacgtcgatctcaatatggacacggttgtaagcgctgtgacgagtttgttcggactcgtcaccggggtgaagcctaaattcaaagtctacggaggaagtaatgctgaaaacttggctcttcagaacattcaagttcgtgctgactttcttttacttctgagagaaggatttgttgctgattccacatacgaacacatctgaaatcatgtttgataggctcggctgcgaatggtactagcatatatgtttgctcaactcttgccatttgtgagaggtcgacagggtggactgcttgttttgggtagtgcaaatgtagatgagaggtccgttcactatcatccagatgctgccgttgtacattacttatctttgtccttcggatcgcactttgtcggtcgctgaaaccctagtcttcgaggttatttgactaaatatgagtgagaccttcgaccatatgactcttctgctttaattggaatactgacgaaatgtatcgtttattcagttgctcgagtgcagacgtgaaccccattggaggaatttcaaagacggatctaaagcgatttatcgaatggggatccgagaaattcgatctaccgattctagacaggttcgctcgcatcagttcatgactcttttatctttacggcaaaccctgacgcgttgagatatcctgcccaatgctagttttttgacggctacaccaaccgcagagttggagcctataactgaaaattatgttcaagcggatgaggtgagtgtctccacctttcgtcttagagctgtgaatacacaccgacaccttgcggagttttgttcatacaggccgatatgggaatgacatataatgaactctccatctacggacgactacgaaaaattcaaaaatgtggaccgtacagtatgtttgtcaagttggtccaggagtggggaggtaagctttctccgactgaggtgagtcttttcattcatatagaagaccgggtttaaaaccctgtgctcctgtgttgacctcccttttctgtgctttaaatgattcaagatcgcggacaaggtcaagctattctactttgagtatgctcggaacaggcacaagatgacgactctcacgccttcgtaccatgctgtacgtttgatctttccgcatttttttttcattattgcaagcgctgttcaaaacttaggagtatatcatgtgttttctgctacaaactgtaggaatcttattcgccagatgacaaccgtgagtcaattctttttctctctcctttctgttactttcacaatcaattgagccccatatattccttcattctctacttggtttccaacttcaggtttcgatctgcggccgtttttgtactcatccagattcccctggcagttcaaaaagattgatgccttagcagcgtcgctcccaaaccgagctggattgtccacagaagggggcaaagtcaagaaggactgatttgcgtggttgtcgatctacttgattatgtttccttctcttgatagaatgtttatgggattatgtgacgttgcacgatctgttcccggatatatgagagaagcgtacttggcgtgctgactaagcgaaagaatcactatccgctaaacgtatctgaaccatccgtacatcaacccccacccatttagccacatccatcatcctcatctagtatcgatatcaccatgtcttctcctccaggcgtccttcgatcagtactatcttctcctacgactacgccttcatccatctcattttctgatcaggctcctccctctcagttaaacaacccctcgggagtcgggacatcggcatcaacggtagcaagtgggggtacacgaggaggcacgtctttctcagatgatagatccaaccgacctttcaagtcgtcaagtaggcgaagcttaagtttccagcgatcaaggaccgtcagctctggggaaggagggaatgaaaagtcgtaccgtaacagaggtcagtcttgatgggctcttcttcttgtgtcattattcgtgcctcatatctttagtccaagtcgggatatcgcttgcatcgaatgatgcattcaaagagagccactatgtacacgcgccgcgctatctgatgacggccaagattcacgtctattgatgctctgtgttcactcatactcatcgccatcttacatctggatgcccacatgtcttccatcttctagtcggattcgatacctttgacgactgccacgatgatggtctgttttcattcactctacaaagtcagtataagcgttgtccattcaaatgacaacaaccagtttgcctaatcaacaaatcaaatccgtgattttttgcccatctccctgtttctcatttcgttgtacagcacaatctgaaggttatcatcgatcacgagagtctcggacatttctcgtagcggtctcgcgagatgaatctggatcggaggctttggactggctcatggaaaatttgttagaaggtaagttgatgcgtctttacttgatccttgtcttttacatcggaaaccatcgtctcaaccagtgtattttgggtgtgaggaacagacggggatgagatggtagcactacgagtcatcgaatgggacgagacggagcgagcttcctcggagaaaaaagaagatctccgagaggaagcccgagagcttcagcgactgattttagagaagaacgacgatggagacgagcgcaagatatcaattatcgttgaattcgtcgccgggagaaaaaccgaatcgattatgcgtttagtcgcactctatcgaccggactcgctcatcgttggtaccaggggctcgcgagggaagctggctgagtggggagctgctcttggagcgccaggcatgggctctgtctcccgatattgcatctcccattctgctgttcccgtcattgtggtccgaccggaggcaaaggtgaagaagagtatggctaagagggagaaagatccgaagcgtaagagctatctcgctttgctcggaacatcgggcactgctggtaccaatctcagccggtctcgctcggctggaggactcgcgtagatctttgctctgttcttcgatatcacctgacagatattgaattttcatctatacatctatcggattcgtgttggtcaaaatgctttcgcagctacacgttgaaggcagttcatctatactgtcacatccgctcgttcaaaataccttcgtaatgtttcttgttttctcaatagtgcaatttgtttccatagaacggtgccgatcatcacttctgcgttttgtatatcccattatttgtgtttgttcagtcacttcatggtccagactcaccacgccaacgctcagtctgctttcaagatatacaaatttatactattgatctgttatgttaatcggatatatctagagaaagcaagaattgttggagacatttgtacgcgtgcaagattaaaaggcaccaaaaaattcacgcgtatcttcgttgacgactttgctcggctgttcttcttctatctttgaccttttttcaacccatcttttcagctgaactcatcatgtcttccgatagcgagcaagatggactcgacctcgatggaatattcgttgtaagattttcggttctcgtgctgtcgcgtgatctttgtctgaatatgttcgctcttcaggggctggatgtcgatatacctaaccaacctcgtacatctgatttgtatttgacccccctacacattgacttcaatcttcctgttggttgatggtcacaggagcctcctcgaccggcctctcctccaccgactttctcgacgtactcaccgcccgaacctctccaaacgggcccatcatcgatatcaatccgcttagttggctcacatccgctctggggtatgtctcgtttcgttcttctcctcaccctatctttcgcttttttctccttttgtcaacatatgtgaaactcgagacacagaaggaattgatgtcagtcctgatctatactttattaaaaaaataaaaaaggtcagcacctttggaattcagctcgggtcttcactagtttcgtggtcgagaatgcggaggagtttattcagggaaggaacgttctcgagcttggagcggccggaggtatgttccttctatcgtcattctccttccaataacgctcagagtttggaggaagaagagttcaagctaacaattatatatttttgtttggccacttcgttctggttagctttgcccggagtcgtcgccgccctttcaggagccaagaaggtgaatttcaatcctcttcatagcttctctgtctaatcaagtcaaccaatgatgctgacgaagatttgatactcatgaataaccgtgcatatttctttctccccctcagacggtcatcactgattatcctgataaagctttgatggacaacatctcatttaacgttgaggccaacgttcctttgccttttagagagaacgttcacgttctcgttcgtcgcctcctctctcataacataagttccatgaaattgacaattactgatcaacctaactctgcgctcataccatagggccatacctggggaacagaagtggactctcttctggcttgcttgcctgaaggtgaaaagtttgatacgctcatactttccgatctggtacgttattggctattctttagtccctttacatcaaatgcatcacccttcacaccctgacctttttgtctctgtattaatgggaatttaaaaataaaaaaggtgttcaatcatactcaacataaagcgcttctcaaatcatgcgctcaaacctccagtcttacgtctcgcttactcgtgttctacactcatcaccgacctcatttcgccgatcgagacctagtcttctttgatctcgccagagaggatggttgggaatgcgaagagattgttacagaatggactggaccgatgttcgagaccgatccgggagatgaaaaagtggtcagtatgattttggctactgtattcaagctcaagtcctgatgccttcttctctgtcatgtacatttttcgactggaatgcatcacaacatagcggggaaccgtacacggatgggtttgcaaacgaagcagtcaagattcatagaacagacccaaaagaaaatacaaagaaatgatcttgaaaacacacataggtgtacagggtacaaatgagattttcatacagaaagtgaagaaaacgcaggattaaccggattggtcattcaagaacagtgatcactccggatgatccaactctctttttcctcagatggaagagaggcagtataagtcgaaagtttatcgagcaattctgagggtgaccagatatcaagatcgccttctactcgggaggatcgatggcagaccttcgcatgacgcctattaagtaacgaaatcgaaatgatagcaaatggcgacagaatcagctttttgttgggtatgattctgatcgttttcttttttgtttagttaaacgtaccaccaaaagatctcgggaacttgaacagtcacatcctgttataccacaataaatatcagatgcttgaacagctacaacaaaaatggacagtgatctcaccttgacaccttctacgggtatccatcctttgcatttgtctaaaacgagttaaaggtttacagacataaattttacacaaaatatgctgatatcagcttcattttgttctgaaacacaatgttggcaaagaaaatagctgacggcatagcccttcggtgatattcgacttctcatcgggtcttttgagatgtcgttgagatgtccggaatctaagcagatacattcacagagcggcacacgaagtggaatattagcctgtttcagcgtgaaacaagaagacagaattgcccacgcacttgattggaggagagaacggaagtccggttaccggcgatattccgtgagcaaagaggagatgatagctttttgaagtaatggaataatttcacatcgtcagctgcaatgtggaaacagaacacaagattagcgcatgcttacttgtatgctgacacctgatggtatgcgaaacacaaaaggaggctgatgttcagggcaatttttgactcttatcaatcagcttcttttcaacctgaccttggttttgagagcgactagatcctctccatcctccacgcaaatcggacaaacaccgaatttcttgctggtttttgtggacaaaacatacagtcaaataagaatatgtttttccttcaaaattatacaaacgtaccttccaagaccctgaacccatcgaggtgtataaagatccaacatcccacgtggaaggaaattgaaggtagctgaccgagacataggcgcgctaggtgttgggacaggaagaccgagattcttacacgtttcagcgggaagagcggaaggaacagtgactgaggttacaaaagcagatgtagctcagctgttgttcttagccttcagatcgacgagcagcgggaagggagaaaggactcacattgtcgatacattgctttgaactcatccctgatttccaatccgggagggaatgttctgaaagttcttgatttagaggtacgttgaactgacaaagagtctaacgatggattatatggtgacgatggtggggatgatgtataggcctcgttttctggctcgggagaaggggacaaagatgaaagtctagaagatattggtgaagatgaagctcggagctcagttcttggagtcgaaactttagtgggagtagtgtctacgtcagacaactggcgggctgtatgtaaaaatcctgaggtttgattctcaggtgtagaatcggacggatctggccccaaacgggccgaagaactacggacatgcgaggtgagtctcattacagggacgtgtttttcggcagctcggcttcggagatgtggaagcctgtatggggaaaagcgagaggttcgaagtggccgatattcagaagaagaaaagacgtcgtcggcacgtctgataggtctcaacgatctccttgtaacgttcgatgtggacaagatccagtgtttctgtgcactgattcctggagatgaacatgggacgctggaagagaggggtggcagaaaattgctctcttgtggggatgacatggacgaaactgagtcacatggcgaagctaagtctgactctctgcttcggaggtttcgagttccagatggactgggctcggatcgctttctctttcccagacaatgtgtgctgacaggggtttgaggccgtttgagtgcgaataccggtaggtgttgctgttcactagagtcgttcgatgaaggctgcgacgtttgaggggaaggcaggtgcttttgtttgcaaggaggtgtttgagaagctctccatcggtctcccatagccaaaagagcatgtcgttttcctcgagtgatatctagattagatagggttctggtggcagcgcttaagacaacgtcaggatcttcatcaacttccaaaatcggcgcatgctcatggttactgtaacgtgaattaatgtgtcccaatggatactttcggatgatattaggtgtagtcgtttgaagttcagcctccttctttgggttggaaagctttagaatgattcgcttttgtctcggaggaggactatttattggagaagagggaccttgacgatacagagaagggcttgaaaggatgggatttgactgtctgcgagagattgatggcaaaggaatagtgaatgaatgtttggttttttccatggcaggtgattcatataattcgtgtggagaacgatttttttccaaggatgtgactttgtcctagatgacaggtgaaaatccaaagtttcttcttttaggccatccaggcacagggatctatgcgcggtaataccatgagaattcaaacgtacttgaaaagatacagggaagaccatgtttgttgcgacgcactcggtcgtatcccaatccagatgctgcttccaatggccctcaccttgagaaaacccaacatcagcccaagcagatcctggttcagaattctgctcccgactcgacgggctgagtggcgctattcttccgcctgtgtctcgtccattgcctcgagttcgatcgaaaccggacacgccgactcgctcacttcgaggggatgagccctgtggaaatggggagagattgaggtatcgaaacgggtctgaaggatatcgcgttataggggctggagaatgcaaaacttcgccgggagaactaggatttggagtttgataaggagctgatgtgtcaaacagatacatcttgggtagaggaaaaagaggacggtttagatcaaacagatcacttttcaaaagagaaggaatgaggaaagaatgggtgcacaagataaaaggctcagatagaaaagtagatggcgaccaagagacgaaaagagaccagatgaagaaacgaaagaagaaagggaagaagagacaacgaagagacaatggagagatggctctttttcctgtcagtcagtcaatcaatcaggcacacggtcgaccgtcactcaggaacgagagatgctctgtcagcccctgaattgacctttgatcagccgaagcagccttgttcacttgaccgttcatcaagtggggtcaacttttgtcttcgagcatctcaagactaagatatcgaaacggattgacaagtcacacaatctgaaagaaggttcatagggttgataaatggaacgctcgtgaagatgaaaggatgatagttcgtggtcagttggcggtaatgaatatgaaaaaattaaggaaatcatcaaaatattcaatgcgctcatcaatctccaagcgtcccttccttatttctttctgacaacaaagattctctcatcatcaccatctttattcttgagtatgcagtcttcagattcgattcccggaccttccaaaccagaggctaagtcggtcatctactgtcaaggtatgctctttcattctcttttcttgtgatgtaacatactgatgtaaatttccgtaaaagtttgcacttggcctatcgagtactgcgaattttcgcctagttcctccaagtgtaagacctggcttcaagacaaccattctgatttgttcgaaagatactactctgctggtacgtttaatttctcacttccagatcccctgagctacaaatccaagtttgatctcatgtgatttgggcttattgaaacacttctcaaaaaaacttcagatgcattgcagaagaaaatgggtacactttcggtagagggtgaaaagaagttggagcaggacgtggagaagcaagagaagaaggcgagaaaaaaggccgagaaagaagaagagaataagaaggtccgtccgcgctcttcagtccaagttctctgtatagcatgctgaatacgcaacccttacatctggtaaatgatcaaacaggctcttaaggtgggttcttatacaactagttataatgttgcctctctttgttggctatctcacccaaacctcttactttctccatctttgtcttgatcatttctccaggtcactatcaagcgaattgaaagaaataagcggaagtacgtgaccaccgtccagggtcttgagttctttggtaagtagagtacttctcgtagttctgttcttcactcttccttctttctcacaccacctcattgggtcacaggcattgacctcaagaaggccgccaagctgtttgcacaaaagtttgctactggatcaagtgtgaccaagaacccgcagggacaggatgacattactgttcagggtgacgtgacggaagagattgtcagttctttttatttatatgtcttgatggtctttgtcataccattttactaaaacacctgtttctctccttctctttcgattaccaacctttctcgcatacaacacacagtctgatattttgacatctccctctggcaaagaggccgcgatctttggaaaagatggtcttcctgaaaagtcgatttcaaaagtcgaagagaagccaaagaaaaaggctgaagtggttatttaaaagcttccatgacggtcatggcttcaaaactgtcaatcttcatggcagagttgagaatgcgtagataaaaatgatgtggatgactcgctcgatgacaaaacttcaaagaattcgagttcataagttattacagacacgtggctggcccacaaggcggagtgtattgccttcccccagagaatgctgcatacgttcagtctctgggcttaccgaagcagctagagatctgtcttttgctgaggcaagatctctccttgtttgagctgttcaagctcaataccgagatgaaagagaacggcccaatggttggtgatatagacttcccaacaacagggataatgaccttcgctacaagaaattcaggcgcattgaagacctctagtacgtgatactcatatttgagcatcacatgatatcttaccaatcctctctcctttattgttatttcatagtgaacaactaggagaattgggatacttcttgaagcggctgactaagcaataagccgagccgcatgccgaggcatggccgaatccacagaagatgaccgattgggggaacctagcctcaaatatataaagctactcaatctgaggatcaaacttcttgccttctcatcccttcgaatctacttcgcgccatagcaagtgaactaaatctaacacaaatatcaatatgtctttcagcgtgcttcagatcgttatcgatcatcccggacggtcggctggactcgctttgggtctcatcggcttggccgtgttcgtcgactggttccatctggctcctcgaagatcgcctctgtacaacttaccaggttcgacctgtcgtctgtggccgagatagcgctgactgtgaccgctcgagactgactgcctgcctgccttgtctcttgtcggatgctctccgacttgtcgtcttgtcatgagcaaacaggtccgaggctagagagctatctctatgggaacgcgaaggacatcatcaagtgagcttggcgatcagccaatcacttgctgcccataccatatggcctgataccgggcggcgatagctattgatgtgtgctgacgtgttgtgctgacgtgttgtggtgtctgttgtgatgtctgttgtggtgaacaggctagaagtaggcgtcgcacatagccatctggaggcggtctatggaccgacgtttgtgtacaggggtatgctcggccagcctaggctgtactctgctgatccgaaggtgttcaaccagtgcgctctctctgtgactgctgaggcggtggtccgactgctagtggctggttgctgactgtcgacttctggttgctgactgctgtccactgtttactgtccactgcctgctgtccactgtctgacgacggacgatggctggatgtggtgaacggaatagtctgatgagccaggcgtacgactatccgaagccttggcacatccgaaaggtcttgggctccatcgtcggtgatggactgctgagctctgagggtcagtccgtgctctcttgtgagactggcagcgctctcggctctgcctggtcgagcgctcggtggggaggagagaagctgatgctatccgctcttgctttgcgtgctttgtccccacaggcgagacccatcgacggcagcgccggatcatccttcctgcgttctctgcccaggcgatccgggagctctttccgatctttcttgacaaggcgatggagctgacggagaagatgacggaggaggcggcgaagaaggacgggccgacggacggatccgaggcggaaggagaaaaggctgggccgtcgaggctggtatctgaaggggtggatgtgatgttctggatcgtacgtatcgatctttgtctgatgttgcttctctgtctcgactgatgaactgatgaacggactgatgaacggatgggcctgtctgtagggccgcgcgatgctggatgtcatcggtctggccggtgagtgcacgcttgatgttccgctccatatgttctgccgctagagacgacgccggacaggacactgaccccgacgatggctgtctcacgatgtgctgccgatcccatgatgcaccgtctgtctagggttcgactacgactttgactcgatcgagaaagagtcgaacgagctttctatcgnnnnnnnnnncttacaagacgatgtttgacggcctgtctggacagtcgacactaggcgtccttcaggatctgtttcctgtgctaaactacatcgtacgttttgtcccatctcagaggcatctctgccgggctctgtctgactgtgtttagctgagtctggctgagtctggctgagtctggctgagtctggctgagtctggctgagtctggctgagtctggctgagtctggctgagccaagctctcccggggctggatctgtcgtgatgggtgtccgtccactgtatgtgcacgatgctgaccggtgttccatgtgactggctttgatgtagagaaccgagcgtcaggccatccgagaacgagcgatgatgactgtgaaccgttatggaagggtctgtctctttgctgtctctgtctgagtcttggtgtgttctatcgatctcatgtgtgctgtttatgtgtgctgttcatacacacatgtctatctctggacgtctgtctgacggtcgacacaggacatcctcgctcggaagaagaaagccgttctcgatctctcggttggtgtcgatggcgggaagggccttgggaaagcagacgtccaggggaaggacatcttgagctctctaggtctgtccgcatggggtgtttgtgtgatgttcgtgaggtgttatgtgcctccttccgagcgagctgacctcttctctgtctcttctctgtgtcttccttgtgtcttccttgtgtcttccttgtgtcttctttctgctcggctttcctttctgtcgctggcacctgtagtacgggcgaacatggctaccgatctggctgagcagaaccgactgggtgatgaggaagtgctcgcgcagatctctacgctcctcctagctgggtttgagtacgtcctatgctggtgtcttgtgatatctcgttctcatggtcaagtacatacgctcacacctacacgcccataccggtacactcgctggtggatctctttacttctcttgcatcttaggacatcttcgactgctctgacctggatgctccactcgttgtcgactcggccagagatacaaaacaagctgagggatgaactgctcaaggtggagacgagcgagcctagtctgtatggtctctgtgtctatctgatcgtgatgtgaggacgtagcgggatgctggtcggagctagccgtcggtctggaccgactgatcaagacgctcactcacccacccactcccttccttagtcgtctactacctcagtcattcactaactcactcgtttactaccttactcctatgctcgctcatccgcccggccgatggtctttctcgtgtgcagagacgagctgaacgctctgccatacctgaatgcggtaagtgatctaccgagtgcgcctggtggcatgtgtgacgagctgagctcatctgtctgtgttcttctgcgctcatcgtcgttcgtcttcgtcgttcttcgtcgttcggtctgtctagtttgtgaaagagagtcttcgtttcaccccgcccgctccgggcacgatgcgagtggccgccaaagatgatgtacgtgtgtctgctgtgtctgctgtgtctgctgtgtcnnnnnnnnnntgtctgctgtgtctgctgtgtccccggtttctctgacagactgacgaatgcaactgatcggttcggtctttccacggtctgtgctcacttggcctagatcatctctctgagcgagcccatcaagggccgggatggcaagctgatgacagagatatatgtgccaaaggggacgacgatgtttgtccgtgagtagagcagccgtccgctggatgtacacgctgtccgtctggctgatgagatatgtgtggatttgtcgtgcgtcggacacagcgatcatgcgtatcaaccgtgccgctcatatgtacggcaaggatgatgctgacatcttcaggtcagtcggggctttctctgttgcgactcagcctggtctggtctggtctggtctggtctttcctagcctggcttggatcgccgtgtctcagtgtcgaggcgttgacctgttgctaatctcttggctcgtcgtgggaaacgctctagaccggaacgatggctagagccgatgccacgatcggtgatggaccttgatgtgccctatggtcaccaagcgacgtgtgagtacagagcctgctctgtctgtcgtggcgtcttttgactgtcgctgatgagcgctgacatcgctgccggtcgaccgggtcctactagtcctgggaggtcctcggggatgcatgtgagtccagtcggtcagatgaggtgggctacatgggccgtaggccgtatgggctgtacgagctgacgcgcgctctgtttcttctgtcctcgaagcggctaccggtttgctcttgctgagatcaaggcgtttctgtttgtcatcctccgccagttgacgttcgagagcgtcgtcccggcgatcgactatgagcatcgggcaaacatggtacaaagaccgagggtgaagggcaagaaggaggaagggttccatatgaagctccaagtgcgatcggtcaaggactgaggaagcggactgtgttgcctacctccatctgtcataagttattacgttctgatacatatatagcaacctcttgctttcctgagattatatgcccatgtggaattcagaatatgtagatacatgagtaaaaaaataatttgacccgaaggtctccactctgatcgaatcgtgtcatccttatgcaggggcaatgctaatcttctctgtattgtattcgatattattgatgtcctggttgcccaggacgaaaagagctttaagactgcacagtatggaggtgcaactttcgttgaaacatagatttctgatcttatttgtattttgttggaaattcagtagtcttgacataatttcagttgtgagttattatctccccctacggcaacactctcagatttctctttgcgcggactcccaagactctcccgctgaagagatacagatttctagctgggtttcctgtcctttttttttcctggtttctcagtgcatcttattgagacacctggatggtgtgtatgtaattttgggaaatcagtggggacttagttgaaaacgaatgccaaaacgaagagtctattttcacccacttatttcggtagatattcagcaatgctagggttaatatactattataacttgttcatttacggtcgcgtagctggggcttgacaatgtgccgagagagttctcgaaacgagataccaatacacaccagggcacgagattgaacatcatggtggctatgagacgacgactcggagtttgtttgtttcctttcaaaacaacccttttgagatattctcgtcaacgttttcttcttgatggcttttgcaatgacctgagctcacaactctggatcaaacaaaatacaaatacaacgttgttctcccagtcagacaattttctttatatcttcggaagggattcgaagatgatatggaatagaggaaatatgggatgaaatgaacaagactatctgcaataagcagacgccaaatcaaagtgacacaatacatgaatattcttgaagctcgaaattcttctgctaactttactcaagatggcgatcaaaacaatgtgataacacaaagtcacgattcttatgttatacgtggttcagatatctagtgttgccaagaaggcgatcgctccaaatctcgttagtcccagtatggttagccagtcggccaacaaccagtcatgacacttgatgacaagcgcagataacgaacaggaaatagaaaacgattgatatataaacgaattggcttcttcctacaacgcattcccaaatctttcaccatccttcctccacatgccatagaaccttgcgtgagcaatttttgtccctatcctttactcttgagcagcaactccaaggactcgaatagtcctgtcggcaccactaagcacaatctcctttccaaatggtccgaatctaacatcagttaactcgcctgcgttctggtcgtacagcaaagtctcctcccaggtcttgttcttgaacacccgaagatcagttccagcgcaagccaagaactgcccagatggatcaaatcgaagggacgagattttgcctcctccgggagctccagcggttgggaggtcgatggaatgaagaagcgagagctttcgaagatcaaagattccaattgaggatgatgcagcattggcgacggcaagatggtaaccgttctccgagaacgagagtgctgggatggcaaccccggactcgtttgagatcgttgctgcaagcgatgacttatcacgaacatcccagattcgaacagcgccatcgatggtggctcctccatgaagaagaccatcaggatggacggcgaatgaggaatacgaataagaaccctcatcagcggataaagcctcaaaggtctggacagtggaacccttctcgatgtcatgcaaagcccaggtggcatccatcgaggcggaggcaacaaatcccttggaaggatggagagcaagcccagtgatgtccttagtatgggcggcgagtgagttactcaacgaccagttgccctccccaccctccgaccaaaatttaacttttccatcagctccagaggagacggcaatcttagaagcaccttcttcctctcggaacaaaacctgggtgaccttcttggtgtgacctttgagggtagcagcaactttgttcgaaactcgatcatagatttgaacgactttgtcgtttccaccagtgagggccagatttccatcagcagagatatcaagagcagaaattccaggaggcttcgtcgagtgaagggaaggaactgtggcagtctcagtgtaggtcgaaagaacatcagctgcgatgtaaccagatgggatcttgcgctttttacgggtcgacgagaggctagtggttgaatcaaatagacgacgcgtcagccaaaattccaaccaggtactgtcaataatccgatccaaagaaacttacgacttgtgagtagcctcaaccttggctttagcatcagcagaaagctcatttggcgaagaagcctcagcagtgtccatatccacatctccagcagcgggaggagcgatacccagtgtggcttgcacagacccgagggccctataatattaattgggtcatgtcagatgagttcttcacagaggatcacacgtaagaaagtgaagagaaacccactctcgagcctggtcccgctccttcacaagtcgagcgacgacacgcaaactggcatcctctcggtaaagagcgtgagccaattcttgtcttgtcgattgatactgggtttttaaggctagagactcaagcatcaaagcatcccattccgactggagggaatgaagaagggaagggatagaggtggcagcggaaggacggggggcgggaacgttgggacctatggtgaacgaacgatgaattacgatcgcacatattcattcgtttttactttcattagttcacggcgtattctggcaggtggaagaaaatataccattcctacatccatattacttagagagatacaaaaagaacaaactcactagctttcacttcgacgagatcttctttgctcagggactccccagaaatggggtctcggccgttctcatctacaagtacgtgtcgcgaaaaaaaaaacatttaagccaccggaaaggaagcggttcattcttctcgtcagattctgaatgttttttttcggctacgctaattatgtagaagagagttgaaggcgatcaaataacataaaagaaaaagactaacctatgtacttttcaatgagacttttctcatacagatggcccgacttattcgagatcactgggttgataggaggcgttcccgagactgaagacgaaccgccaaaaaaaacgagagttgatgaggaaaaaaacgaaacaaagcctaaacgcattcggcgtgtatttctattagctaaagtgtcactcactagcacaaaagaacatgacgaagctggatggaacgaagagggatatggatcgaagaaagttagaaggtgaacaggcggcgagagatttcctgggctgagcccactcagacttgaatttaactaagtgataaatgagatatatgatattgttgaattcatatatatcatttgatgacagtcagggtcattcaacatcgaagaagggaaggaatcaggtacgcgcataacgaagtataattataaaccaaacatcattatagat

SEQ ID NO: 261 - DNA, 357 bp, Xanthophyllomyces dendrorhous
gtggcatgtgtgacgagctgagctcatctgtctgtgttcttctgcgctcatcgtcgttcgtcttcgtcgttcggtctgtctagtttgtgaaagagagtcttcgtttcaccccgcccgctccgggcacgatgcgagtggccgccaaagacgatgtacgtgtgtctgctgtgtctgctgtgtctgctgtgtctgctgtgtccccggtttctctgacagactgacgaatgcaactgatcggttcggtctttccacggtctgtgctcacttggcctagatcatctctctgagcgagcccatcaagggccgggatggcaagctgatgacagagatatatgtgccaaaggggacgacgatgtt

SEQ ID NO: 262 - DNA, 51777 bp, Xanthophyllomyces dendrorhous
tctcttggctcgtcgtgggaaacgctctagaccggaacgatggctagagccgatgccacgatcggtgatggaccttgatgtgccctatggtcaccaagcgacgtgtgagtacagagcctgctctgtctgtcgtggcgtcttttgactgtcgctgatgagcgctgacatcgctgccggtcgaccgggtcctactagtcctgggaggtcctcggggatgcatgtgagtccagtcggtcagatgaggtgggctacatgggccgtaggccgtatgggctgtacgagctgacgcgcgctctgtttcttctgtcctcgaagcggctaccggtttgctcttgctgagatcaaggcgtttctgtttgtcatcctccgccagttgacgttcgagagcgtcgtcccggcgatcgactatgagcatcgggcaaacatggtacaaagaccgagggtgaagggcaagaaggaggaagggttccatatgaagctccaagtgcgatcggtcaaggactgaggaagcggactgtgttgcctgccgctatcttatgctatgttatcgagtcatcattgtctttgcgcttatatcactcgaaacccatgagcgtccctggctctgtgtgttagatttcattacttcatctcagcttgtcactttccgactggccgcccatgctttcgccctctccctcctcctcctcttagcttcttcttctgctgccgaatctttatcctcttctcctattcggaccttgtcctccttactgctctcatctaaggaccgaatttcgtcattttccctcatctttccaggtcccttcctctcagatcctgatgatgacgcgtcgctatcatcgtcttcatcacttccatacccacccaacaaccctagtcctcctttgctgacaccatcaacagacacaacaggaggagggggctttttggctgccgctttgaatgcctcccatcgtttacgccaacgtcctctgaagaaagcgaaacgaggatctgagccgtggttggtaagaatccgaagttcgagcacattaggattcggagatgcctgaagcgactttgatgtgtgttccatcaggattgctatcgattctggaggctttttgtatgatgaaggaggatggacagacatcgacaaagacgataggatgagggaccgaaggctcaaatgagagatagaggagcttcttacctcttcatcgctcagaccccaaacatcttctatttgaccctcaagaagtccatccttcttccgttcatcttccagagcagccaaccgaccacccctgagtgcgtcgagctttcgtctcttcttatcatgttcatagttttcaccttctgaaccagagaagaagaaagtatcttctgcatcggacggcaggtctgaccaaccggctgttgaagatgatgctgagggggaggagggtggtcgtggttgggaggatgaggagtgaaaggcgggaaggatatggagataagaaaacctataatggaagaagggttgtggatgacaaggatcgaatgaattggtcaagagcgagaaccaatgtcagtcaaaagtcgacatctgtgcaatgaggtagaagaaggagtacgtcaaagcccattcttttgactgaagacgggtgaaggtcagtagggttcttgtatcccttcatattagattgttgcacatcttcatttccagaaacaacccttctagtgatacaggaacgccatcatctatatcatcgagagagagaaataactgaaccaaaccgaagagcaagaagaaggcaagaccgtacctgtcagcccatattccctcgtccgaagcagccgcttcatctatgagaaccttcagaagcttgccagtagaccgaccctgtgggtcgaccacctggcgggcgtcgacatcacgcgctagagctggattgtttaatatctcggcctcatatccctgaatggatagctcgttcaactcatttgatctgtcgggggaggaaggaggagaagacgaccggtgtctatgggttgaagggttgtagactgggtattgaggatgagaagatgtagacggtgtgtgttcggtctgcgcctggtgaagtctatcctgaacttgacgcttcgtccgtttctttgaaatctttgctcgtgaaaccatccagccagagagtatgtgagtgtgcacgaccgtatgaacgtaagtgtcagtggatggcaaaggtgagtctatggggaaggttgaaggtgaaacgatgctaacaactttgctagggttaaatagcaagatccatgccgtcctgcttgtctaggatcagtagtcactctaacactaactgttctatcgtgttctgttctctactcaaacgacagggtgaagaggctgacgaacggagttcaactctaggcatgcttcaaacatgttgttttgtatgcttataactactcagctagctgtatatgctgttggcttgtagacttgagtagctaacgatctgacgtaatcgtgcagtctctttcagctttttggttcttttgtcttgttcaaacatagaacaaaaggaacatccgatcaaacatcttgcattcattagataactcagtgtttgtcggatgcctcttttgtgtctttgagtatgtgctctttgtggggaacaaaagaacgccgagaatggaatctctattcaggattcttgacttgatttcatcgacaacctaccaccatcatcaccatcactacttctctagttgaactctataacgtgcgccatgggatctgactgggatcccttaaagtctgggcccattccggagccttcctcaatatttctcacctcgctctggtccaagcatgatctggataccattcacgagaaacccaatggagagctattatcaccaccgttatcggccagacctagaatcagcccggacgccccgcctgcaatagaatggacatccccaaagccaggggtttctcttctgtacaagtattgttccagttgggactatctgctcctaattactccagccgtcattttatccgcagcctcgggtgttctcacgccgttcatgacagtcatcatcggttcttccttcaacgcctttgcttccttccctaccgaccatgctttttcgacaaaggccgagagagatcagctcaagagcgacatctccaaagcctcatttatactggtcgggatgggcgttggcttcatcctcttgaatgcgctgatggcagggttatggattatcataggagaacgaatggcccgtcgattaagaaatgaagttttcacaaagatcggctccagagacatgacctggtttgatcttggaatgggtgtccatgatggtggcgacgagaacgtcaagggaaaccaggaagccatcggcgctgctggtctcatggcgaagtttacgaggtgcactcgttttctttctttctcaggtatagaggcctccgcttatatcaactttgtgcgcttatcatcaaatcagagaaacagatgaggtccgaattgctacttctcaaaacgttggacttgttgtcggagacgttttcactatcatcacctctctcatccttgctctcatgaaatcttggaatctcaccctcgtcatcctgtctgccgtaccggtggtcattatttgtcaaggcgtcgttcaacacatctcctttcccttactctcaagtgagcgccgaatttttgctgccgcctcgacaagatcagaacgagcaacatcatctattgcgaccgtcaaggcattcaatgccgagaagaaagaagccgacgacttcttcagcgtcatcaacaatggcaaaaaggtcactgctcgaatcatcttcgtctgggggactaatcttggactctcggcctttgttctaaacaccatgtttgtcgccgggttctggtacggatcagaacttgttcgtcaaggaggaatccaatctggggacgttattaccgtcttttttgccacagtccttgcctcgagcagtcttcaaactatcatgcccaggttcgagtccatccaaaaaggtatgggcgccatggtttctctccaggtgcttataaatcctccaccaatacagtcaaaactcgtgaacggagacatcgttagcagtatatacagccaaggctcagcagatagatcttccatgatctcttcagccctcccttctgcttcgtactctatcatggctaacgctcgacctatccctggccggagaagacaccggagaactgccacgcttactcagatccgtccggcaaaatgtcacggagaattcattctgcgacacgtctcattcttctatccctctcgacctcaatcccttgccttgtcggacgtaacactctttctgccctcgggtgaattcacattcattgtgggtggctctggatctggaaaatccactatcgctcagcttcttcttcagttgtacaaaccgacaggggggtcaatccatatggacgatcaagataccaacgtactcgaccccggttggatgagagagaatattgcttcagtccaacagggctgcgtgttgtttgacctgactgtacacgagaacgtcgctatcggtctagcaggttcaaagtcgagacgaccagaagatgccactagagaggaggttatcgaggcctgtagaagagcgctcattcatgaatttataaccgatctcccagatggatatgatacaagactcgggacctcaggcgccagtttgagtggaggtcagaagcaacgtatagcgatcgctcgagccgtgttgagggatccccctgttttgatacttggcatgtctgttcatccattctgtttctttttgttctgtctgctgacaaaatatgctttggctcttgcgaacttctgctttccactgtcactcacctagacgaggccacttctgccctcgatcttactgccagagttctcgtgttcgaggcaatccgttcctggcgaaagaaccgaacaactattgtaattacacacgacctatctcagatcgaaccagataattttgtgtatgtcgtccagaatggttccgttgtcgaagaaggcttccgatcagatctcgaccggtcgaatcaagctttcagcaaaatgttacatgaacagcagaaagcgccattatggacggggccagacgagattgatgaatgggatgacccagagaatgtgatggatgtccttcaagccacaacaactgagcaagagactccgttcactggtttcaacataactggagccattcagccgatcccgggcaccatcaaacgtcagacttatcaacaaggcgcatatcttgacattattgccgattatacggataagcctcgattgacccggcagttctcttctttgatttccaacggcggtcccttgaattgtgaccaccgtcaatcaagcaataacctccctattgaaggtgttctcaatttcccagatggtctcaggaaagtttcaccgtctggtaactctttctccaatagagtcagagatactatctacgatacattcccggatgagttttccattccggctgttgaaccaaccgtgttttcaccttcgggttcatgcgatgagacaatttcgtgggctcatcaagaaacaccttatccgacgagagctatcaacaagtaccctcaacatccgtcccttaaccgaatgaatggtcggctcaattcatttaaccttctggcaggagaatcaaccacagatctcgaacgtcagggtgagatcgccactcgtggtcgggccggtttactctatcctggctctcggatcgaccgtcgacggaacaacctctattcttctggactccacgggccggacgacggcgctttgaagagcgaggtgataccggaaaagacccctgggatactcgccgtcatatggttatgtgtcaaatcttgccctctcaaaccccttcttgctctcggcttcgtcgcttctgtaggacaaggagcgatcacacctatctggtcgaactatctatccacattgatggcgctcgtcgctcaaggtggaggcaatcccagtaaactccaacgagactcgttggtcgttctaggtctttcggtggcaaacgggttgagcattggtttatccatgatcgcgctcgacattgtttccaatcagtgggcatgcgacatgagggacaaatgtttccgacagatcatggctcaacagaaatcatggtttgatcaaacggagaacagtccgtccgctctaagtcaaacgctcatcaaagacgcggatgacatgttggcgattgttagtgatattccaggaaagttcgtcacttctgttgtgatgataggcatgggtatcatttgggcggcgatcgtgggatggaagttaactttggtgggggtagccgtcattccagtgcttctggtatctgtgggtgtccaattcaagttattgaacaggattgaattgagaaataaacggacgagggaagaaatagcaaagatcttttatgaggtttgttctctcttacactcattcttcttcttacctcaattgagctgccaccttgctgacatcgctcggcatatgatttttctctcagacggtctccaacatccgtgctatcagagcaatgtcactcgagtctatcttcatcgaaaagttcaatatcgcactagagaatgcttacactaccggtcttaaaggggcttggatccaaggagttggaaacggattgatgaatggcttagtgtactttgtcgaaggtaaacgaaacttatcagttaagcctcacccattcatatctttcctgtttgcctgaccatgctatactttacaacattgtagccttactgttttacgtcatcgccgtcttcatgtgcgacggaagctacacctacgctactgctctccgagtcttctctctcgtcgtattctctttgacgtttggagctcaaatgctgtcttttcgtgcgtttggttactatatctatatattcatcctatgtcttgagtcagttgatcttatcttctttctcttggtctatatagtccccaccgtggccaaagcaaagcaagctgcacttgacttccagggacttgtcgctcgatcttctgcggtgaccgaagagggcaaaggaagccttcgaccaaagatcactggccaaattactttttctgatgtcagattcgcttatccgactcgaccagaagccgatgttctctctggtatctctttcgatatcgatcccggggaatgcgtagctatcgttggcgcttctggctctgggaaatcaactatcgccgcgcttcttcaaaagctgtacgaacccggcagtgggtcgattcatctggacagacacgctctagcagaagcagaggcaagatggatcagagaacatatttctatcgtttctcaaattcctgctttgtttgatatgacggtcaccgagaacgtcgcatacggaactcatcagctaccattttccgaggtcgagcgcgcatgcaaggcggctcaagttcacgatttcatccttagtcttccccaaggttacgaaacaaacctgggtgaaaacgcatcattgatatctggtggtcaggctcaacgactccagatcgctcgagcactcgtgaaacgagcggatatattgatactggatgaatgtacgtccgccctagattcggaaaatcaggcggcagtcctagagacgatcatgagagtcagaatggatcgaacggttatcatgatcactcacaagctaccggcgatgatggcgtgttcgaggatcctggttgttagaggcggtagcattgcagaagacgggacgtttgatgagctagtccggaagcgtggggtatttgcagaactcgccagaggcggagagtgggagtaatttcatcatttcatcatcatcattaatttatatatatcttgttctgtccgttttcttcatgtgtactatgggtttgctaggtttcgttccttttctcatatgattgattgagcctttctgtcatctctctgtcgactctctttatacaatgtcgtctttctatagagatgcgctacaataggcgtatgaaatcccttaacatccgctgatgctcatgatttttcctctccggtcgagagaaagaaagcatgtagaaaacagggatggtatatacgggacccagatgggaacataaacgaaacatgacaagagtgaaatatgtgaatgtgtcccgcgatgattgaccagaagtaggaggaaagggcaaggatgaagtgaatatagaggatgatacgggatgtagatgaacagtcaggaacaagaggtagatgggtagacaaggaataagaaaagagacaagaacaatgaccaaagcgacgaggccaccacgtctacttgccctttccagcgccagccggtcccttctttccttcgaacccacctctcgacttgtgtccaccgccgctcggcttgcttccacccttcttgtaatccttcttgtctcctttcggtttgattcccttcttggcattctttcgggcttccaggcgggacgagatgttttctgatcgtttcttttgtttgatagcttgagttgtcttgagtttttcttttcggtcggacctgtttcgtatcaaagaaagaacgcgcaacaagacagacagaaagttgtatggaattgatttcatatcaatttcaatgaacaacgagagaatgagataaaaaatccaaaactcaccactcgccagcacttttgctcttctccttctccttgcgcttaacggccttcttgagtctactctcatcgtccctgactttaccgccctcagctctctccaccgcgacatcccatctggcggactcttccttttgtgctctgacgtctgccggaagatcggcaagtttggcctttgcagccgtaaggacggacagtgcctgggtggggttagaaggcaacggcttggactttcgaccaccactgacggtgcttccaaaagtcgacggaagtttgaactgcgagaacgacacagaggatgcaggagcggtcggcttgatatctgggaccaagagttgggtctgtggtgttaagtataaatcgatatgagtatcgtttggtatatacactcaattttaaagggtacaaagaaggaaattaacgagacagacacacacctttccgggcttgaccgacggatctgcattcttcttcccttcggctgtcttacccttcttgacagcggccggagcttcttccttcctcctttcctcctttcttgcctttcgtctgttatctctcaatgctcctctcctcgccctagcttcctccaaaagttgctccttgctagcgacttcatcacctccgtcttctcctccaccagaagcccttgcagcgagaggatcagagtttggacctgtgcgctgaggctgccgtcggttctgcatggatgcaattcgggcggtgagtttctctcgaagggttgataccgaggttggagcgatcggacgaagggtggagggatcgaagggagcagcgtctatctgaggagagtccacagtagacgaggtgatttcagcaccgggcgcctgagaagcaaggatttctggaagagacaggttgtttgccgggtcaagctggaaaaagtttagacgagtgaaggtatggaacaaaagcattaaatatgacctttagtttgaaataccggacaagccccaacacatgcactttaaagacaacaaacgcaccttgtccttcttggccttcttgcttctctccttgagctcttgtttaggaagagcgctttttcgcttgttcttcatgtatttgttatcatgctgttccggtcgtacaatcatgccgtccggacaaaatgatgcgtgtaagtaaaatgtggttgaggtcataagtatacagaaacgggaaaggaggttgatgtacctcttcgtcggtcttttcttccctgatgtagtgtttggcaggaatcaagctgaggagttgctcaaaagccgagttatgagcctcgagtgaggcgagaagtgtagcagccatcgatggcaggtgtgggagcaaggatctgggaggacaaagtgtacgaagtgaacgtccgaagttttacgccgacctagatccttctgggaaaggaatttttcgattctgcgttcgctccttgttactctggctgtgcacggatgtacacgttcgttcagagcgattatgcacgtgacaaattggccacaaatcatcctcaatcaattaaataccgccaaaacacttgcttcgtcacaacagcaacaagagcatataaaattcagacgaatataaactaaggaaacccatgtacttgagagagagagtgcatcgagagctgtagtcaaagtcaagagcagatcaaacacggtactgggcgacgacagtatattctgtacatcgggtatgggcatcatcaatctaagtttcattccgtcttatgtcttcatgtcttacatcgactctctcaccagaacagtccaactatacatatcgctgcataaccaagactccgggagaaagagaagaatgtacgcgcaaaatagggactatcccttgatggtcttggttacaacgagtgtaacctatctttgttaacatacccgtgaccaattcgcggttcctcttcctcagcctatgggcttctgtttctttcggtatacatcctaacctttccatcttaagactcaaacaaccattgggagagaaaggtcgattgatatcttctatcatctttcttcatagtatacacacatacacacacatacacacacatatacctgaatacgctcatccatccacccacctacccgttgataatgcttcgatcaaggtcgcacaatattctcagacggtcgttcgatccatctttcagtccagccaggcttttctcttcttctctcatccgtaaggcagatgtgacattgacgatcgatggaatcagtgtacgtattcatttcggtattttgtgttcttactactggaaattcctccttgatactgatactcactcttgacatactcatatcacttaggtcaccgttcctcaaggtgcgatcagccaccccacgggggaagagtgaccatctcttcccctttcaaagaaacgcttcttactggtcgaagaatcagccagccctgactctcctttcttcctctcttcccttttcgatcttcgtatcctgaaacactcaggttctactatccttcaagctgccgaggctgctggaacaaccattcctcgtttctgttaccatggtaagcagttgattcttttcttctatctgtggtaacgcgatcagaacgaagcaaagagaaacgcgacgctatcgatccagcgatttttgtccatcacgatctggccatactcacaccttcccttctgtaatctacctcacgatcacagatcgactatctattgctggtaactgccggtacgttttggtcctatgaaaccgtctttgctgtgcatctcctacggaggactcggtaattttcccgatgtctaatctcaagctaaactcttgctttccgtctatccctccctgacactgatttacagaatgtgtctcgttgaggtcaagccaggccctcctaagcctcaagcctcctgtgccatgcccgctctcaacggccagcaggtcttcaccaacaccaacactgttcacaaggcccggttagttccgatctttctgccctctcacatgtgcatctcccactcactaacctcgttcgccttcgtctatctcgtccgtcctgttgttatacgccatcagagagggtgtcatggagttcctactcgctaaccatccgctagattgccctgtatgcgatcagggtggagagtgtgatctccaggatcaatcgatgcgttatggatcggatcgaacaaggattcatgagatcaccggaaagcgagcggttgagaacaaggatcttggacctctagtcaagacttgtacgcctccttttgtctgttcctctcttcacattggttcgctgattgactaatcaatattactaataaacagccatgaacagatgtattcagtgcactcgatgcgtaaggttcgccaatgaggtggccggagtggaagaccttggaacaactggtcgaggaaacgacctgcaaattggaatgtatgttgagaaggtcatggattctgagatgtctgggaacatcatcgacctttgccgtaagtgacgttcctttgcccgatactctcccgcccccctctgttgggctcgaattgaccttttgctttctctttacttctatacactgccatacactttcaatcacaacctgatctcagccgttggagctcttacttccaagccatactctttccaatctcgaccttgggaactcaaaaagaccgagtctgtggatgtgctcgatgctgttggatcaaacatccggattgattctcgaggtgtccaggtgatgcgcgttcagcctagaatcaacgatgaagttaatgaagagtggatcaacgacaagactcgatatgccaatgatggccttcgcttccagcgattgaccatccctttgatcaagcgaggcgataggttcgaacctgctggttgggctgacgccctacaggccgtcagcgagggcctggaacgaagcggagccaaaggtgatgagatcaaggctgttgctggacatctggccgacaccgaatcggtaagtgctagtcatgtgtgttgcctgccatgatcgacctgtttatcatcctgatcacattgttatgtttagatggtcgccctcaaggatctgttgaaccgactggggtctgagaatctcaccctcgatcagcccctcggagaccaacctcctgtccatggagtagacatccgatcaaactatttatttaacagtacgatcgctgagctcgataacgccgatgccgttctctttgttggcacgaaccctcgacacgaggccgctatcatcaacacccgattgcgaaaatcatacctgcacaatcccgtcacatttggactgatcgggcctaaggtcgatttgacttatgagtacgagcacattggagagtctactgtcgatctggtcaaattcctcggttctgcggcgaatgacaaggatgccgggtttaagtcgctctttggaaaggccaaaaaacctttgatcatcctgggaagtggaatcgccgagatggacggtggatcggctgtctatgaggcaatcggagcgttcgttggaaagaacaaggatagattcgtgaccgacgagtggaagggagtctctgtcttgcaaagagtcagtctcattctttctttttttcctctacctcagtctcttcatctgagcggaaattgattggtagtgtttctcttttcatgatacccttataggctgcctcccgagcggctgcttacgatatgggtttcaccccgacaactgctgcttccaaggtgacccctaagttcgtctacctccttaacgcggacgagatcgacggatcatccatcccgaaggatgctttcgttgtgtaccaaggccaccatggagacgttggagctcagttcgcagatgtctgcttgcctggtgctgcctacacagaaaaagcaacgacctgggtaaacaccgaaggaagggctcagcttggtagagctgctgtacctcctccaggcgcgtctagggaggattggaagatcattcgagcaatctctgaggtcgttggttctccccttccctacgaggatctgttagctcttcgggatcgaatgtgggatgtatcgcccaccttggtcagatatgactatgtcgagcgaccatcaaacgaaatctcccaccttggatttgccgatctggcaaagcggctgaaaggaagcaagactcaggccggacagaactttgagttgcccgtcaaaaacttttatatgaccgacgtcgtttccagaagctcggtgactatggctcaatgtagccgagcgttccatgacaagtcgtaccaaatctcgctggaccctgatgccgagcagcgaggttcttctcacactgctcaaccccacgcttgagcgggcgtctccttcagatgaatctctcatctctacacttctcgaactactcttctactcttgttgcctttgaatatttgcccgttgtaaacttctttcttctgtttgtcttccactgttcttgatattcgtttgtaactcttcttcttttgtgattatactttgttgtcattctttcctgtttatctcatattgttctttgatttatcttgtaaaatcaagacagacgtttcatgttcctcatcatctcatcggctgctctcttttgtctgatcggttgagaaagaactatgtaacgatctcatgatatacatctgtgttgcgcaaactgtttggaagttttggatattatgcggaaccgaaagtgaaacatactcggcacgtggctttcctcattttcatataatctcgtttaggtttatcatcatcgtcatctctcatctcatcataccatcgaagaagaggcatcttgctaaacaacacacttgatcgacctttcccaggccgaaaccaatcagtcactgtgtctcgactcaaatcacttgacgagcaggatatgctcctcacggcgtcatcttcttccccatcgccaataatatcaacgccgctacggaaatcatcggctcaagttctggtagaacaagaaccttcatcaccaggcacatcatcagtggatgaggaaagggatgcaagcgacttgaagataacaacagcaacatggtcggggaaaaaacaactcttggcttggtggagttattcatttgcagctgaatgtttcgcagctgtcgccatggtatgtatacattctcatgatatgttcgtgtctctatgtacagagccaactgatatgattttcggggtgtattcggatggaaagtcagtgttcatcccagttacactggaacaatccgcacgggaagcagggttccaggctggagatccaacgaagccttgtgttcttcacttgaacaacaccgtctcagcaatggatgctgttatcgccttagaggaagcttcttgtaaagctaggttcttcggggttgttgatattgagcctgcttcgttcaggtctgttctttgctctttgccctatcatatactcctttcaacagaagctgacgagttgcgcattgatacagcctctacacatactctttcgcagcaatccttcaaacaatatccgtcatcaccatgggatccatagcgaatcatccttcccgccgaaaacttctgcttctctcttttgcagctctagggtccttgagctcgatgttgtttcccttgatctcgaatcctaacgctctcagcatactagctatactagctattgcttcctttgcttgttcgtgggtttgttcgaactcgtacataccggatttgggaatggcaggcccagaagtgataagagccagagagacgtgggaggaagagctaaggagggctcaggttgagagagaggagggtggagatctaggtaccggtttgatgatgcctgggctagaattctcaagaggggtcgagcctttgcgaggaccaactgatcggagacaggacctggtgggtcaaacgaagcgcatggtagaagaaagtgactcagagcacgagcaggagggtgaaggggaagaagagatggtctccgcgccgttattgcctgatcaggcactcatagcctcgatggaaactcaacgattatcaaccctccgcgcagattatctccggaccctatcaatctacgtttctcagatatcactcagaggaattgcgattggatacaccggcggcgtcctcgttcttatacctgcctttctcatagtcactgctttagatgggtcaacaagatcattgagattggcagttgggctttcgggagcactttggtgtttggccacaggaccagccgcggtctggttgggcacaattagagggtggaagaagaggggagaccgcggatggaaggacgaggttgtggaaggctggagaggattaggaagaatgatcagcattgaagagatcaaacggttaagaaacacgttttggttcctcttagcttggatgtttttgagcgatggtcagttgatcgtccagtcacaggaaaccggacaaagccattgaactcatatgctcatcaccgccgtttcttcattttgcgttatagcggccaccacattttcatcgaccgcgatcatgtatgtcagccgtctcgcttccgacggccctgatcttgtacactgattccatccatcttctctttgagacctttctagttttgccaaaacatcacttcacatgtcttcctcagcagtgacaatcgttgcttttctcgctcagataacaggtatcttcggtggtttatccgcacccttcatacaagctcgacttggttggacaaataaacgatgtctgatcatactagtctcattgatggcttgtttaccggtctatgggtgcctcggacttctgaatgggacaagagctgtgggaggaatcaggacaccaggggaaatgtatgtcgtagctacattgtttgggcttgtattcggtccagtgagttccattgcgctttaatttcttttcactctatctattctgtagcgcagcctgatgatagattaacaaaaaaaataacaaaaagtttcaaagttttgcaaggacggtgttttctgagatgatccctccgggtcaagaagcccgatggtttggtctgtactccataaccgataaatcctcttctttctttggggtaagtgcttctatctgttcttcctcggactttcaggccataacgctaatctgcctttgcctgactctcgatggttcgaaagcctttcgtggtaggactgatcgcagacgccacaggtgaaatccgatatggattcatctttctacttcttatcctgatcttacctctcccagtgctgatctaccgagtggacgttccagctggaagagaggatgctaagcagtataaccagcaccacgagtagtacaaacagatcgaacaaggaggcggtgtaatacactccttctgcatgttgtaaaatcgttactttgattaaatttcgaaatatatgacaatagagacagtctgtttatcttccttccatgttcgcttgttcaggagcagagaaaagagcgcacaaaagaggacagaggtcaaaaagcaaaagcttatctataatctagatcccaggagctgcgtccttcttacatgttcaatccagtagacagatcgcttgccaatctgtgaacaccaaccccaaatatacacgtacacgcgggagcgaacagaataaggagaaacaggcaaaggatagagatcagcattcaatctcgtaacgaattgaacacgatacctcccaacacgacgaccaatgctccgacgaccgtcactccggctagtggatacctgccttgcggttccaccgccggcgcctgcccttttacttcttttctcttcttcttcaacgacgacgatggcgacaatttggaggatgaagaggatgaaggggcaggcgctttattcgaccgaaggcttggcttggtgccggtcgggggcagttcagaagtaggtttgactaaccccatagtaacgaatctgtttgcatatgcgttcatcgttatcgtcgttgtagaaacaggggtaagcgacataaatagaattgtttgaacggtatcgacacatcaaaaagagaagacgagaatactgaccctctgatatagaaagcatgcaggttcgactcgatttctcgctcgtgtcctttcggaacaccatcaagagtaaacgtagctgtgaaatatagattgttatgtaacttttgtcaggcaaggtgacaaatacttaacaaatcaagaaggaacatccataccagtagtagaatcagatccctgatttaactcaatagtaagaacaccgagatgatcttggcgttcaggaagagtattcaataaagatatcagctaatcaactgaggcatgattgagcaaaagtggccaacgcacctttgggccaagtaggagaattcaaaccccagttgaggacaagtttcttaggtttgtcagccgaaacaacagttccattgacagaaccggagaacatcgagaaaggagcagagggagtggccgaaaattgagcagctgagcgagaccaggtgggaatctattcaacatttccgatcagatatgtattagcgactgatttggaaaagacttgtacggcagtaggatggtttctcgatgatatcggatcaacgaaccttgctctccacagtcagcaaatcccaaagatcggcagcgctgatcctcaagctggactccaccttgacaacgctcgtgttgatcttcttgactgcgccagtaacagacacaggctctgatttggacacgctggatactggagtggctggagttgatgccggcgcgctagcggcaggcgaaacgtccttactatcgacggcgaggagatcctttccgtgcacctcaactaaagtcgtttggaatgtcgcaaagacagtcttgagagcttcaggaaggatctttcgggtcgactggtaggctggggtagaagaactcgaagacgagaaatcgaacttttgtcgttgattttatcgttgtatgaaagtaggcatcaccagattgtgagccatcaatcctaaaaatatcgataggagaaggttgacatgttgataaacacccacaacgtagtccgagattccgtcaatagcctcgtgagacacctcagggattcgcacacttccagaaaggtcggttccgtcagccagtctgcctgaagttgtaagaacaatccgaaatgagaagcaatttcatgcaaatcagtcttgtttcaaaagggtcaacgcagtgtcgagatacgcctacctgccctgtgtaaaacaatcaaaccatatttatgaggtcaatttgagcagaaatataagaatgcgcatcaaaaatcaacttaccagtcaagcttcatgtcgagatcatagatggtgatgactctaaccacaataaataagattggtatcagtatctgaatccaccgaacgcacataattcagacgaaatacgcacttggactttcgctgaccgaccgtcacatcaccatcgatgctggatacgctagtgatagtgacttcgagtccaagactgtcatcagtagctttgacgtttgcaaggttagttcggaactagtagatttcgatatggtgggcaagatcccgcgacgatcagcaagtgcatatgcgtcgatagaccagttggagattgggaaactcagttgcgcagggaactcacccattcataagcccacttgtcgacattcttttgctatagaaagtctcatccgatatgaaagaataacatgaaagtcctttgagtacggtgcataaactgtatagcgatacgggcaaggcaccaattgattatgaacaggataattcaaatcttaccctccagtgccagttttttaggcctgcagagagctgagcgggttgagacatgactggctggggtttgagtgctgtcagaagctttcaaacaaatagaacagaagcaaactagtgcttatggaggagagaagtagagtaggaaatctagagagaagaggtagagatggtggtttggtcaaaaaaaaggagacaagagaaaagcggatttctttcgcgaacattcgaaagctgtgcagattcacgtgatcttcgattttgtaggaaatgtctctttctttacagtctataggtgatctgcagtggggatcatggaataatgatacatggagtagtagaataaagggatcaatgatgggcgatcttgaggggaaggttgaatgggaagaggataggaagctccttctttagtggtcgacaaaagaacaactgcgtccatgacagattgcaaagtaaaaggacaacgcaatggattcgatcctggtctcgacatatgatgccagataactcttcaagtttactttcgttttttgtctttcgacgaagaagctgatcgcagactatccgccccaaaccgcttcttgttcatctctcgttgtctcaataacttcttcgtccccttcaacaaagtcttctttccgctcttgtttttaggtcgttgaggggcaggaggaccttttggcttttccgaagcagtactcgccggaccatttgtaggagcaataaagggagtatcggatggaaagagggatagctcgttggttgcttgaggcgtctcgagcgcgaagtcatcctcaatgacagtcacaacggcgtgttgttcttctccatccgaaaattcctcttctaaaggctcagaagggaaggtggagggtcccgcctcggcattggcttgtgtggacaaggcaaacataacgtacggtcagctacatacaatttcatcgcgggtcagcaaaagacgagaattctcacaagatggctctagtccatatgcacgctcaacaatctccagattctcttgagctcttttttttctctcttgtcgaagctgtcaaggcgcaagtaagatatgtcataagtgccatggctcattgaaagtgatcgaaccaaatggaagaaaactcacttcacgcttttcctcccttctctcattcttctctcgttcgatcgccttctcacgctttgccgctatcttcgcctgctttcgcttgctgaaacctgtcaagaactcgctgtgtatattaatccggaggaacaagcacaagattagataaacatgcgactatggacaagaaagaatgcatagaagaacgaacgctcgagcttcatcatcgaacacgaccttctcaacctctgcctcctttccggcgtttcttctcttttttttaatatacgccgctccttctgacagcaatgacgcgttggatctctttgaaggtgccatgtcgatggatttatatgtgttggctgggtgaatgtgagccatttgggccaagaccagaagcggcaaatgtccaaatctcctaggaaatttgtggtcacgtgtgtggcgacttttaaaagcggtactgattcttcattttcttgcctagtctttctcaccaattcggataggctcaccatacttgcttctttcatctctcctgtttgaatcggatgagcaacactgtagacgcatctcgagcgggaatagcccggatcaagcccgagtctgttcaagattctttgtttgagtttcttttgagtagttctccagctaaatccatcttatctacttattttacccaggtttctcttgactcgaagttctgctcctgttgaagttccagatgatgacgctgctgagaacaccggcaaacaagctgggaagaggactcttcgagaagacggtactgagactctccaatctggtgaggaaggcggggagcgagacagcaagatggccagaggggaaaataacacgcggggtggtcgaggcggaaagaagaaggggggtcagaacaaaaaccgaaaattcaaaagtatgacggacgacattcaaatctgcaacaacatcgctgtggatagagagtgctcgtttggcgaaaggcaagttcctttttcataggttgatgtcgtctcacgcgtttgcaatatcttaatcttcaactttgtcaatcccacgaatattgtgggctcaaattcaaacagttgccgaaggtcccataacttaccgctataccttgctagcaagcctgctgatctagtctttcctgagatgagctacgttgaaacgtcttctccattcctcagcatcccggacaatgccacgatctactgtcctacattcaacgagctcgggttttgccctcaaggctacaagtgtcggttcttgaaggctcacatcaccaagcccgcgctctcgcctactgctgagaaaacaaccgaaactttgaacgcagagacagagagtttggaggagaaatttgtaggcaagcttgtatttgatgaggaacgtaaaacccaaaccgaacaggaaggaggaaagtggagggagaagaactggatcagacccgatttacaatcgcaactgagaagcaatgctgttcgtcctctgttcaacatctcttccgaagcattcatggaggagaatgacagtctcattcaaatctgcaacgtcttgtactatgtgactctaatgcttgatcgaaaccttagtatcctttccctatctccgaggcctacctgtccaccctcgaaggagaccacaagcttccaaagccaaagaaggggaaagtcaatatttccatccctgcgcccgcccagagcgaggaagaggctatgaacggcaacaacgaggagactgctacggaacaagagagcagaattgaagctgataaggacttagtggatgttcccgatcgaccgcaggagaaaagaagactagactggacgggcaaaacttacttggtcagttcatccgacttttgctattctgaagtttgcactttccttgagacgtcaactaattccatcagtcctggctgtctgtgaaccatctgtcttcttaggcccctctgactacgactggcaatcttcctttcaggcgactctgcgtctctctgggagcggatataacatgtagtgagatggttcgttatgacaacgcatctcacgatctgagtatagaacgaacgttctgtcagcttatctcaagtcaacatgtttcttgatagggtcttgcaacttccttcctggatggaggaaagggtgaatgggcactcactagacgacacaactctgaaaagatgtttggtctgcaagtttgcggtagtaaggtcagtttttccatatgcctttcatgaacaaacacatatccttgctgatagaatcatacttctatctgtgtgacagcctgttcaattggtccctactgcggtgcgtttcatcctcggtctaccgactgtttgaccaaattcacgtttcattattgtatccgtggcttatgtattatactttcatggctcttataggaagtccttgccaaagagtgcccagacgtagactttgtcgacgtcaatcttgggtgtcctatcgacctagttttcaacaagggagcaggtgagactgtcatcctcctgaatcctcatctatcatcgatgaaatttctatctatctaactaacggcatcaattttcctctggtcatacaggaagcgctcttttcgaaaagcctaccaagttgggacagatactagtggggatgagcaaagctctcggatctatccctcttacggtcaagatggtttgttttcactgtcatgcttctcccaatcttgacttacttgaaactgaatgatatatacattctgtgaacagagaactggtatcaaggataacaagaacacagctcacaacatgatccctagatttgctaccgagtggggtgttagtgccatgactgtgagtttactaattttgattcaaagcacaggatcatcggcagtactgatattttctgtccaatcgaagcttcacgggcgatctcgacaacaacgatagtatgttacagcttaacatgctttaatagtttgactattgagagcaatgaaaacttattcggatgaggaactgtataacatctttaaagctcgaaattggccgattggtcttatatcaaggattgcaccgagacgctccggcaatctgtcgccgacgcgaactgtacgtttctccccgcatatcatttacccgactattagttgtatcgcgtgcttgagatctcaacgagttgactcattttgttttggatctatacctttataaactcatatagtgccacccattccgatctttggaaatggagactgctatagcgctgctcagtactatgattcgattgagcagactggagtcgacggtgtgatgatcgctcgaggagctttgacaaagcgtatgtcctttgaagccctttcaacacctgaaatttcagtgccattatgagatagggtgacgtatggaactgacttgtcaccttgacgaatcccctttgttctgtgtgcatggtttaatttgaattatagcttggatcttcacgttagtccttttgtctatttgtcgaggttcttatatgaatcttatctgaccgacttattgactgacatttgatttgttacatgtgacagggagatcaaagaacgacgagagtgggatatcagtagtagggaacgattggagttcattcgacaggcaagtcttcatgcatttatatcgacttgggttttgcgtcagatactgactgtaagatgtgtcacctgaattctcttacagtttgctgagtttggtctggtaggtagttgacaactctgaagcgtgatgattcatattctcaccgatactacttttctcttcgctcattcccagagtcattggggatctgatacgactggtataaacactactcgacgattcctctgtgaatcgttatcattcacgtttgtctcggttttcgtttctcatctgaagatttaagaccgtcactgattcgttcgagatgattcacaactgtaaaacatcgttcagccatcgatacatccctcttggtctattggaggttcccgcaaggatgaacgatcgacctcctccgttccaaggtagggacgagttggaaactcttcttggaagcacagaatctaaggtttgtttcaaagtgctcctcgtcttttgttatctgaaaatcaataggctaagcgtgcggcttcgattctcttgtgtcttactacctttcaccaccaggattgggtcaaaatctcagagatgttccttggaccttgtccgccagacttttctttccttgcaaaacataagagcaattcttatggaaacgccgaagagggtaacggttgataccgtgtctttctgtttaggttgaattaagggagggaacaagacgattgaatgagttttgtgttgaattattcttatcattatcatacagcttgcacttcttgttgaaagtataagttcaagagtgatgggttatcgtttgtctgaatgaaatgacgctcgacaaaaaacgaagtagacaggattcgaacctgcgcgcccagagggcacttcctgaacttgctgatatagcagggaagcatcgtaaccacttgattactactccttggatgaacaaaatcgagaaacgaatcatcataccaggtattatagatggtattgagttcttaccaggtttagatctcatagaaaacaactgtttcagtgtggataccgagctatgtaactgaagttcatacatatatctacccctcattgattctctaattctgtctcataaaaagtggacattcatcgttgttaaatgggataacattcagagttgaaagtgctgtgaggcgattcaggtctggactatgattcaagttcaaatgcgacgaccgtaccatgaacgtaagagaacgaggatagacacttcaagataagataactctgaaacctcacgcgtcgacgcgtcaagccgggtcgcgatcgccatgacgcttttgatatgatccacacctcgactaccatacacttcctctcctctactctcttttcctttcccagttcttcttttccttcttccctttgtataacgtttattcttccagcgtaacatcctcttctgtattctttcccacatcaacttctccgtttgcagcgcaaacgcacgacttaaccatagtccatcaacacgattatccacagaaatgacttgtgttgtgccttgcaaagatgtcgatgtatctgagagtgatcttgctggcaagatcactctatatggtgaaagtgagcaatgtctagcacagcttggtgtttaaatcatcgggttgacttcttgattttttgcttacatcacagatacgtcaattcgacctaaagagtctagcgattcatcagacgcgtcttcttattctttcacctgccctattccagcccgtcacacatcctcgatcaatatcgttgatgttgacgacaacgatgatgaggatgatataggtagctgggacgatcgccagtttggggtgtttcgcaagcttccgtttcttggagtgcccgatgatttgaagccagtgatttcaaacccgatcgatattcctaaagatcaatttcttcgagctatgcccgcttcatcagattcgactatcctcgaaaatattgtcataggtggacccaaggtctcagtgacaacttgttcttccatctcaaacgatatttctggcgggccagagttctcaatggtggacgagactaacgaggttttggacgacgagttgaactttacgagcggttctctgccttccccgagcttcaacggatgcgctcaagtaccaagcgtctctgtgatatgcttggacagtgattcaagatgtccagtgacggacactagagaacgttcgggcgagaaagaggtcgaagggcgtccctgttggttggatatttccctggacaacggcgacatcagcgctggcggtgatacgagaattgatgttgcagagaaggttgtcatgatcaaaccatcggatccccttcaaggaatatcatcactgtcaaacacttctaaatatatctccaaacgatttggatcctctggatctccctgtaacaatcccttctcttctcctgccgttcccactacaactgctagaaatgagagtcttgggtcgtcttcctccttgaatctcaataccctcaatcgatcgactccgagtcttacagccgacctttcctcttctttcttctcctccccttctttggccgacttgaccaatccgaatagtcctctgatcgatgtggacgatcaatctcattccagtccgctcaaatcatctcgaaggaatattctcttcacaaatgtcaaaaaggtggatatggtaccacctgctcctttgcctccgccaacggtcagcactgttcaagattccgatagcgaactcgaattcggcactgaacccgatgtcgactctattgtcaacgtcccgttcagtcagtctcgtcgtgttccattcccttactcggctccgcgctcgtctctcggtaatcgctcagtcgcgtccctttcttatccaaagaaacctgagccatcaatcgattcgatttttggtgtccccaagttggatgacaaaatcgcttgcgctacagataactcggattctagaatgaagtggatggatagaacagtacctagagctcctcgatggagtaaacggcgcaagatgacttttggagattcagatatagactcgccaactgcccgaaaacatcgtctgaggcaagaagaatatggaaatctcgagttgaacttcacagcttggcatggaaaactcaagcacgaagttcgggatttaaagtccactccccctagtaggatcgatctggcgaacaacaaatccaggttcgacgctgattgttcgatccaaccaacaaattctttgacaacaaagtctagtcttatctgtccatcacctcagatgaatcgacctcgcaaaaggctagcttcaccctcatcgcccgcttgcgcaagtgtatcatcgcccttgacgcaggcctgtctggcaaaggagaagaaccggtcatctcaagccgaagcttctctcagaaggggtgtgttcgattcatattcagaacgagataattcaccaagaacttccgaggcggaccaaatagaagaagaagagaaaatggaagaagaggaggaacagattcttgttgacaagagtctgcctctacctccgccttcttcgtcccctacgccctgcacaccttcactctcagctgtcagcgtgttctctttagcgtcttgtctatcttgtaccccttctggaatcaaatcctctcttccacctgcttccatcatccaatcgagcgcgaaccccatcgagtttgaaaatgacaatcaaacatcagaggacgaggattcgccttttatgggaagacttttcacatgtgcatataccaggagcgtctctcctgatacttcttggatgaagcaacgacagctctcagtggatgtcccggatgatgaggatcctttagcttgcgtggacgtttggtagaactttcaacttctcttttcattttcttccttgttatttctttgtcatgtcaagttggactgggctagaatacgagtgtctgtattttcttccctcatgaaaggttgcaccacgcgcgggatgcgtttctgtgcacctcaagacccctatctggtatatgtgtccttcttcgctatataaatgaatgttatctaacttcacgaccggcttaaaaaatgtcttaatcagaaaccagtgtagacatgcaatcatggaaggggtatctgataaaatatgatcctatatcaagtttgaagcagtatggatgggggagaaatcccattaacggttatgtatggtcatcggagaaacatgctaagaaaaagggggtattgagatgctatgaggtaaacactggatacagttgagggataatatggcaatgaaccgatctggaagaaagaatataatgagaaaagaggaagaaagcatagtttgcgcaagtcagagtggtagcaggccacccgattcttcgagaagatcagagacgtgaaccgctcgtcgagagacgatgtatgattgggtcgcggttgttttgaaatccatctcgatctggtcaagatcaaggcaaataaaattggatataagctcttactgaagagattcatttcgatctagttgtagacgtacacttaggagctgatctgcgttccacaagcgtgaagtacaggcttccagagattgataaagagtctgtataaaagtctcagtaagacggttccttggaaatctatatcagcagatatgagattgatctgatgcactcaccccgatagagttgcactgtagaagcgtggtttggttggctttgaggacagctagagcacatcggaagaagaaatcgaaaccctcgacaaagaaaacgtcccctgtgcagccgaagaaataacgctctttagtccatcagtatcactagcgagaagatacagaagctgataatgtactgacaaactcgaaacaaagtctaaccgccagaaaaaattgggatgatcagtaggcgtgtgtattgatatatgggtcaatcaagaactaacctcaacgggcactgtgataccatgtgtcaaaccactcagttagtggcttttgcctgacgatacaagagatgaaggatatacaaaaactcacagcaatcagtgaaaagagataagaaccatccgaaggagacagcagcaactacaaaaattcacgcgaacaaacagaccaaaatcagacaggtcaatatcaaaaaaggtgttattattctgaccttcaactcccagttcggtcagatgaatatctagttgaggtagttcttgtttgaggagatcttgaaggacccgctggtcagcccgagaacctggaaaccccaagcagaggaggcggatgagtgaaaactctaacgaagtttggatcgagaaagaaacccagaactgacacaatagtgaaggagagtagtaatccggaggcataagccgctcaaccatgcataagaatacccagaagctgttgaaagatctttagatatcagcctggatgatgtttttttcaaaagcccggtatgacagtccaacttacgcttcctcctcgcgttggtaaacaagaagcaaagtagctgccaacatctgtagacaagaatcagccagttatgcattagttcccaacaagtgattaggctatgatgattctacagtaaactccagtcttacattcataccctggcagtatccaaccgacatattgtgcctaagggttggttttgtacggtggtttaagatttgtcagaatattagtctaagcgcaaagactaagttaggaagacccaccaggcatatgcagtaagtagtctacgaagtttcgccactccgggcccatcccctccaaagaaaacgttcaagggctggatgacgatcatagaaatatacaaaatttcagcgcatgttctgcttatcattgttccgcaaatgtaacacaaggaagacgggaaaacgtcacactgaccaatgttcggaccacgtctttctcgatctcggccagaacagtagagtctacgccttctttttccgcttgggtcagaagatcgttgtaatctcctggtgccatgacttcctgtgcgccactacactccatccaaattttgggccgataagcaattgggattccacccctaaccaactttgcaaactcctttctttcttccttccctgttttcccatgatttcccatttgggcaaacccaatttccgtccatttggtgtcgtccccttttccagccgccattgagctagactctcttcgtctcctcaggtatgcatcccaagcggctgtctgatttgcctgttgctgttcatgaacagttttctgttgattgaggaggagttggatagtcttgcgcccagtcagatgaagaccttgtcgaggagcagacgagccatctacttgaggaacatcagccttgacgtgaagtttttgtgaaccattcacggctcgaactggagaaggattgagagagactgaggtatgggatttatgtttgcctttggcgcccgcgctcggcttagagaatgtaggagacatcgtgatatctggttcagttcctgtcgaaaccactgatacaccggatgcagcggagactgtagaagagtctttgttgaaagaaagagtggctaggtctttctctgaaataggacggctaggtgatgaatttttcactctgatattttgttccacccaatcgtcttcttcttcaggctcggcattaggggcggtggctggtaagccggcaaaacacgccggagcaggtgcccctgcttcgcttgcttccctcaacatgttgatgtttcgaacatctatacgttaaacaaagataggaaacccagacacgcttcgttagttaagaatgagaggtcaagaaagcgtgtaactcgtaccatagataaagccgtatcggtctaaaatcccggtttgcgattcataagcatattcagtcaagtatcttcatctaaacggaggggcagtaaacctgcgacgaaggcaagactcaccagttaaaggctccaagccggtatcaaaccttgaagccgtgccgctcctctttttcttcgagttttttctggaggcatgcaagaacaatcgtagttccgatcgattggacaacaaagtcggcggtctcaattctgtaggttcgatcgcctcgagctctacagagggtacattgggtgatgtccctgttttcactctcgtaaccggcccttcagctgtcaaactatacggattggaagatctattcgtactatggttcttgtctgcagaggaagcgaagaatccagttgaagggatggattttgccgatgtctttgacggatagggatatgcagcggagctcaatgctctgcttaacattgacgaggcagccaccaaaggttgtccggaagagattgatgtacctttatctttgacgacgagagtagatggttgggagggaggaatgaatggtgaaaaatttgaggggacagaagactctctccgcgatcgagtcgtctggttggatggtcgtctctgttcagacacggtgatcccttggttccttgcattggaaacgagttcgaaagccaagtgagatatcaagggtgaaacagaatgcgggtctgaaaacaaagaagctgcctcggtcgataagagcctagttgataaaaatagcgctcggaagtgagagggaatgactcgataaggttgctcgccgggtgtcgtttcatccgatgttgaggacgactcctccagaaagcctgatctactgtcagaatttaacggaggagatcgatcgagtggtgagagataccctttcatacttccttttgatgataccgacgagggcgccgccttttttcttgttgattgtccttccgatgaagagctctgtttatccgttatggatccagaacctggccggtctctctccttcgctggacggctccacatagatcctataccgagccactcgctaaacgttgactgagctcgctttcgactatgtttcttcatcgaagttggactagatgatcgttgatcggttgaatgcatggttgtatttgacttcgtgggtgtgctttctccgatattatgtttcctacctctagagacacttcggttgggtaccgagtgaggggattcagaggagcttgatggagcggatagtatagaagtaaaagaggcgagagtagatatagagtttcctcgaggttttgttctcgagcgcgtaggtggaagggagacagtttcagtagaaagcttcttgacaggttcgatagagtcattcagtgggggtagagaagatgaacgcgtgggcgtctctaggtaggttaatgggcttgttgagagagacgttgacagcgcttcatgtagatcgtaatgtagtgaatcgtactgttgagataaagatatatgttatcgagtcgatatttgacaaatactcgagaacaggacgacctacctgatcatcatccatcgctttgattggtccaccttgcggccttgccctcgtttccttttccgcacgctgtacctctagcttccacaacctccatccgatccgagccaacaccttcatcgggtgttctttgtctgtcggactgggtgggaacaggggcttttcattcccccctttgaatcctgtaggcaggctggcctggccatcttgattgaacgatgactcccagatgacaagcgcgttagttagctcgtcatcagccatcaaatcgtaccgtgcattcagtacttcttcctcctctctggacaagatcgaggggattcgactcgttgacgatgacgacggccgagtggccatcgaggatgaaattggatctatagaccgagcgagatcaggtgtggaagaggatggatgagacaatggtgactgattgatagaaaccactagaggatctttgtcttctttcggacggcgttggctcagggtagagggttttgaaggaatgcttggtcggtgggcaagcgacgactgtgaaggaaatgacccaggacttcgaagaggcatgtgcgaataaaatcctggagagcttggttgggacgacggggcggtagcagcagaggtggaaataaagttattccaagacggagtagtatcatcagaaggagaaggagaggggaagccaaaagcgctgtgtctggctgtcaacaaaacgggttgtagtgactgagagagttcttccgtttgtttctttagatcaaagtatgaagccggaccagccgtggatgaatctagcgatgtatggacagaagagggtgtatcagtgttctgtttgttcaagatcaagaccactccgttcttgcacacacctgaccgaccgtatccgttgacatcctgaggatagctcgactgtactcttttcgacttgtaatttggtcggatcgaaggtacgagtgagagcgggtgatgtagaggtagagcctctattgggagagacccagtcgtcgcacccacttcatcgggctccatatcagagtgacaacgacagcagatggcttttgttccttataagcgaatctgtccacgagtgaatgtatgagagattgaaagtaccaaaagaaacggaacaagaaggtgagggttgatgattgatggcggaaacacaggcagatgttgtttcccatctggtcaccctcgtcatcacctgcattgagtgaataagatcagagaaccgttcgtcaaagcgctcaccgcacaagggacaatcaagtacacagtaaccggagcacgggagctcaatgattcaagagctgctttgtatgagagttcattttatgttcatgaacaatgtcgatcgtgtgtagacaagcgacaactgagaagacgtatgggtagtatggatagtggcttcaaactcgagatactccttatgtgttcgcaacattaaacacttccaggcatgtatagccatacaagatatcatcttgtgagaagtgaagcattctgatctgatgtagaaagaatcaagcacactagatgcccagtgacacagaggtcaaaggttgaagagattaacgatcaaatcaagactcctttcttcgtctgaccgatcatcccattctggtctatcgattggtagcatccacctcatttggacctcagctagacctcaagaaggtttttacaattgatatattgcctttcaaggtcaagacatgtgtatgtactgttctttggccgtgaaaattgacttcttgatgttgcagcagcttatacacttggtacattctcgtttttctagcctcagatcttatatcaaatccgatatcaccttctcactctgagctagaggcaaagccaaagccagatacagagccagcatcagcgctagaatcaaactttgaaaacccagtctcttcaactaccactgcatcaactcctgaattcatcacaccttctacgtcctcctccacagcagaagtcgcagtagaggccagccggaaacgctcgaaatgggaagaccaggcggctagagaggatgagctcgcgatcaaaattcgaaagaaaaacaaactcgccgcccaagagagaaggaggagagagcgaagtgcagaagagagggagagagaaagcagattgggttcgtgttcttccctgttatcgttctgccctcgctcctgtgttaaactcatgcgtcggctcgtttgtgtctcattgcttcgatacatcctcccagcggctccgtcaacatcgaacacgtcctctcaatatgccctgtcttccgttcccccggcaactacgaaaccgtcaactcctcgttctcgtgaagtcccgaccatatcgacccgctctgcatatgttcccagccggtcatcccatccatctatccagtcatgtcggtcggtatacgagtatgaacggttaaaccatatcgaggaaggctcatatggtgtcgtcttccgagcaagagagaaaaccacaggcgaaattgtggcgatcaagaagctcaagctggatgaagagaagaacgggtttccaatcaccagtctcagggaggttatggcgctcatggtgtgtaggcacgagaacgtagttggagtcagagagattgttgtgggggacacattgacccagtcagtaattcatctggtattgcctctcttgctcgccattgatcttgttccgttgaccgacatgacgtatatgtggcaaatccaaacaaacgaaacatcagaatctttatcgtcatggacttcatagaacacgacctaaaatcgcttctctcgatcatgccagccccgtttgtccaatctgaggtcaaaacgctcctccatcaactcctctcagccactgcacactgtcataccaactggatccttcatcgggacctgaagacatccaatctgcttatgaataaccgagggatgatcaaggttgccgatttcggtcttgctagaaaatttggagaacctctgggtgatatgacgcagttggttgttacgctttggtataggtaggttatatcattcaagttgcacgctcaagagaaactgaattaatctttgtgttctgcgtccctactatctcttcctctcatcctggctgggacacaagatcgcctgaattattgttaggaaagacagactactctaccgctgtagacatgtggtcgataggctgtattttcgcggagcttatgctcaaaacacccctgttccaaggcaagggagaaattgagcaaattggtcaaatcttgaaattacttggataccccaacgaagatacctggcctggttggtcgacgttgcctctggccaaaactatcaacttttctggcccttcgttcgtctctgcttgcgcatctactgtgtcttgactttctctttgattcactattatacctgttcttcttgttcaatgcagatcttcctctttgccgagcaagttccgtcatctaaccgaaacagggcttgatttactaagccaactgctctattacgacccggaacgtcgaatttctgccgaagaagctatgagacatccttactttctgttcgtacccagctttgccttctcatcctgatatttcggttgtgtccgatctgtgacgaaactttattgagacttttcgtttgttgttttggccggtgtccatcgcgattgtgttgttttgtttttcttgtagggaagcaccgttaccgaaacacccttctttgttttcgtccttcccttcgcaagccgctggagaaaggtacgtattcttaagctcaactcgaatgtttggttctatatcgacgctgataaacctttgtcaatgtttgatcgaaattcttagacgccaaaaaccgtttgaaagtccttcagctccgaatcatcggcacgaaagggattaatgaacatttttttccctgactttactcgatcctagacgatttgtataagagatatgaaaaatagaaagcaagctgcatatatgttcataatctattatagaaaccctccgaccagtctctctccctccctagaaaggcaacgtcgggttctcaattgttttgtgggtgtatactttcttaccctcttcagccgatccaaagtctaaagagacatgtccgttatcagctttgcttcgcgcgaggtacttgtaactgtcaagtccacatcgataatatccgtcagttagcgaacagtcaatcgctatttcagatgtatagaagaaacaagggcaaagggacatacatgcataggccttctaagcccacaggtcctctggcatgagtctttcccgtactgatcccaacttctgttccaaatccgtatctgaatccatcggcaaatctggtcgaggcattccagtacacaccagcagcatcgcatcctctcatgaaagcctttgcgatcacttcgttctcggtcacaatcgtttcggtgtgcttggagccgtgttcggcaatatgattgattgcttcggtcacgttgtcgacggttttaacggacagtgtaggtgacagatgttcgatatagtaggtttccgggatggagctatgaatttgagacgtgtgggaagcgagaacagaggagtggagatgttctcgagtggattcatcgagataaagcgtgatgttattggaaagaaggttggcagagagagtaggccaaaggctggtaagcagagaacggtgaatgaggagggtctcaagagcgttacatgcggccggatagctcaactgttgttatgttttttttttcagttgatgaaggcgcacacataagtacttatggccgatgttgaatatagaagaaaaagacagacctttgaatcgagtaccaccctttcagccttagcagcatcagcactctcatccaaataagcatggcacagtccatcagcgtgtcccattaccggaatcttcgtctgacccttgatgctcctcaccagctcggctccacctcggggcatgacaaggtcgatgaatttatcctgagaaagaagggttgaaatctcggatctggtagagaccgtctggatgaacgtaggaggaaaaggagtgctagaaagagctttctgaatcagttgagaaagaatagaggtcgtatgcaaggtttctttcccgggcttgagaatggcggcatttcctgtaaggatagaggcagcagagagaatttggtagaatagcttcatgagtactccaagtcacttccgaaacggatagagcattaacttaccgctcttcagagccaaggaagcaatgttgacgacaacctcaggtctggcctcaaatataacaagtaagactccgatagggcaagtcactctataaagctctagtccgtcgtcaagctcctttgcgtaggtgatctggtccgtcgggcagggaagctgggcgacgtcaagaataccctgaagcatcgaatcaaacttggaagatgactgcaaagataatctggagaacatggacttggatatgtttccggactcgactagaggtgatgcagcctgttatcataacataatgagtcagcttgcattcgcgtttggttgaccgtcaaaaaaggctcacatcgaggtccttctggtttgcagatagaacatcgtccttgttgtcaatcaggatctgacgaattttgagcagcgcactatctcgctcgctagaatcaatcagctgtgatgcctggtaagcggctcgagcatctctggcaacggtctctgctgggttggacattgaggaatatgattgatgatacggaagattgtgagtgtataaagagcaagaagtaaaggtaaaaaagaacatgaggaatggttagggttggggtagtcaccgatgagtcagacgctgacacgtgacgtctgcacgtgactggtcgggtcggataatcgcgtcgcgcgtcgcgtggaattttcatccaaccgatcacacctctatcattgagctctaccaaatctatcctgtttctttctcctctccatatcagctgcattgctctatctacagggacacatcaacatatccataacatctcaatcaatgtcatccacagagtatgttggcttgttttaattcatttatactgccaccaagtgctttgaatacacgcaagcatccttgccttctacgtcctcgcgctgttcctatagagactcgtactgatccgttcatgattgaacatctagctcgtccactcagaaagatcttcttcaggccaatatcgatctgggcaacaaagcctttgtccttagaaagtgggatgaggctgctgatgcgttcactactgcactagagatatggtcagttatctattcttgtgaaggtcgaaagctccttcatcatcgttctgccttcctttctcttcaacgtctactgattttggtcatggatttcttccgccccacgaatctgtttatcagcgcctctatctatggagatttctccgccgagtcggctgacttattgctatcctacgggaaggctctccttgagattgccaccgcccaaaaccaggtcatgaggcaagaagcaggtgctaacgggggtgaagacggaggttccgatgatgatcaagacgaagttgaagaggaggctcgtaagtgtttttctactttctggcctcttgtattttgttcttttccgatgcagacctcattcatgcggcagtatgtatcatgttgacatcatgctcactcgaatgatatgaccacctgtagtccaaatcgctgcatcgaccgcgtcgaacgtcaacaatcactttgacttccgagaagaaactcaagacgtcatctcgacgaccatccccatcatttccgctacatcctcatcctcttcgtccggcgcagctgacacagttattggaggtacggctctttcaaacgattctgccaccaaaccttcaggcgagcctgaagaagaagatccggaggatgacttcaatgccgcatgggacgttctggactctgctcgagctctgttccagaagaaggaaggtggcttagctagattacaagaagccgagtgttatcttaccttgggtgacgtcagtcttgagaccgagaattttgctcaggctgtcgaagatttccagtcggcccttgcactcaagtccccaatccttcccaactcgtccaggcacatctcggaagcacacttaaaactggcggtggcgcttgaattcgcgtcaatgttggaggatcatcaagctcgcgcattaggacatgttgagctgtccaaggcatctctgctcgaaagaagagcagagttggaaagtggcgtgagtgggtttgaggttggacctgaggagagcatcaaaggaaagggaaaggagggaaagatcttggctgaagacgtcgtcaaggatcgagtagagaaattgagcgaggaggagaggaaggctgaaacaaaggagattgatgagctcctagaagatctcgacctcaaggtgcgttaacaatccaacatcgctaactttatctttgactaatacccgtgcactgtctgtcctacttgtacgttctgcatatcgtacgaaaacacctatggatcttcagattgaagaccttcgcatggcccctctaccaaaaacaaacctggctggattgctccccacttcttcatctacctctacctctacattcaacgcgttcggcggtcctttcagctccagcgtgagcgctgaaacgtcagtctcagcatcccaggtgaacgatttatccagcatggtaaaaaagagaaagacggcggcggcggcctcctcgtcgtcttcaccggcgactggaaaacgaaaggcagatagcgagggaagcggaggagaaaagaaagcgaaaatctgattcctggtcggatatatcattttttcaatatgtcgatatatatatatgtatgcgcgtggtttctctgtatataggtggaaacaaaaacatcgtcgagtgggtatcattcactataacctcctccgtagtctcttgttggttcttcttcatcactctcaatacctacaccttccatctgactgtcctcccctgaccttgcactcgtgtcccaataagcatgactctcacccggcctgacttcctcactcgtctcttcgatagttgtcctactctgttccccttctgcgccgtcctgttcctcttcttcttcggttccttcttcgaccaccatactttcttcttccccgtcagataagaattctccgtccgcttctggtcctcgcttggcgcccgccatcccaggtgggatctcccttcctctttcttcaggcaggacgtctctaagaccgagttcagtccagccagtccggtatgtatgcccttgggctgtacgtgggtgggaaggaagatgattcaaatgtcggccaatgaggagagagggcggattatgttgcgttggtattgagtacggtcggccatatggatatgaaggctgtataaaaacatgcgaacgagaagagaactcaatgacggttgccaaaatgtgtttgtaacaagaagacaagagaagcaacaagactaaagcgaaactaacgtgtgctttggacggtagagctaagatttcacagaaggtcaaaaggatctgtgtgaggataagcttgctcgcttgtgtgatgagaccgatgccagaacggattcgtactttcatattcgtcgggtttcggagggtccaagtcaaacggaattggaatctctacagacagagttcgaagaagcaacatttcagacaaacgtctatggtcacctttgccttttctgaacaacccgaagagggccaacggagctggccgaaagggaaggctaggagaaggaagcacacataccatcatcgaatgcaggaatgattccaaagaaatcttcttcctcttctagatctaatgcaagcagagctccatctgacatatggatggcagaatatcgaccgtcctgtggaggttgttttgaggggcgtcgaggatgagccaaataaggtatcatacgtgtgaatctcgagctcacaaggaagcacaaaaggagcagaacgaacggtcatggtaataggatacccaggatgcaaggacaaatatttctggtaaagagaagaagcagaagataggattgaaaggggagaaggcagattgctagtttaatggttggaaggagaacgaggatatcattgatttcacttccatcattaattgacggccatcggacatcgaccatcgaccatcgaccatcacctatcggatattatatttccatcctcttctgagagtgaaaagatcctgttcatcatgtctccttctgttcctctctccagtgcttcttctgtcttttcgaaagctgcaaagtcaacatcaatagtgtcccatcctcatcccatccgtgcattctcctcggccaagaaggaatgtgcagtttcagtaagctttccttcttaatccatcatctccccctctgtcacctcacatacagccatacagaatctgaccgaagctgcttgtgataccgcgtgttgtgctcagtcaacagcttacggacagtgcatcctcgcacgctacaaggatgtagagagagggatgtgcgaagcagagtttcaggccttcaaggcctgtatacaggtacgtcttctttctctcctcctcttgacacacttaccagaagcatgaagacctaagtatttgtatgatctggatgaatcgatgaacagaaatcgataggccggaagtggtgattgtgtcatagtgttcaacgatctttgatgttcatgtatcataggctttccattgtagatgtacggcagcccttcgtcttctcttctcccgtttgtcgatcgcttcccatctagacattgtatttcgaatgaccttttggtcagatttcacccatgtacgattgaagtagctcttttgagccgatgtataacgggatctggatatcaatgtatcgaccgggacacctatcagaatatacaattgccagtacttctgaacccttagctcatagagctcgtacaatcgtacggaaatgaatatgcaagagaaaaagaaaacatatatgaatgattaggtatggcatctacccgcccctgtctctcgcgtgggtccacctccaccgccaccgccgttttctccctacacgttcgctctccttctctctacgccttcgaatcattctttgatcgcgctcattttgagatgctggattgcccttgcgcgcataaggtccgaatcctgtcagtcgagaggtcaaagagaagagctcaagctcgagaatgggttggtcgatatcttcttctggaggctccggggtaaggtacacgctcggaacagcagaagatgatgcaaaagagaaagaggaggcggctcccgtggtgaaaacaggagcgtgtgcttttgagtgagaagacgatgatattggagatcgatgatgctcataagaagatgagggtgacgaaggggacagaaagtcgatatactctaatgaagacaaggcatcggacgtagattcgaacgaaccacctgcttctaggtcgtccaacaatgtacttgtatttgagctcggagaatctattgaccgggttgtgatcgatgccaatgttgaagcaggcagagggggaggagtggatggaggagtggccatggttggaggaggattgtgaccagtctcgtatgctacgagaaggcatacgagctgcagcacaaagatgaaagtcgattgcaagagaacctgagtaagtgtagtaggtgtggctgttgttggcatacacatcagccatgccttcttgtcttgaaatgccgaaccagaacacgaatacgactatcagcagaggaacactcactctgcccgataaagttgagaaagagccctctaggccgtgaaccaaaggtagctgagggcccgtacagaaaatgacggagatatatgccaatgttcaaaaggatgagataatttgtcaagttaggtagtgagcgggtaggcgtcgtcaatactgggttcgtgagctctataaacgatgatgcggccgggagttcgtcatcacagaagcgcaatcaatcagaatcagcccagatttaaagggattgaaaacgatacgagagagaggaacaaacgaatttgaacgaccactctgacgagaagaacaaagaagcttggatcacagaagtaggagtagaccgacagagcgatcaccaatctatccagctaggtgaggtaaaagagttttgattgatctatcattaagctgagctattaacgatgtgggattagcgacgatgagacaaactagtgcctacctgttctacaagatcagttcgtttctgttcaagcatcggcgagaccatcgggacgctagaacaaagattgtcagcaccttcgtacagttcgccaagggatataggactgacggaaacatatatcctcacctgatgtatatcaacactccctacacaagggctttgaggatcagcagacacagcttgtgctcaaccaaaacaagcagagaagaatgaaacgttctatagatagagagaatatcgttgagctatgtgaagcctctggtcggacactttgacggccaatgatcgagatggtagtgatgaagaaacattcatcgtcaaagggtccgctcgcatcatctcttcagctgttcatcatcagcaccaccaacatcatcacaactattgacgctctcaccagattacatcgttgttcactcctaggcgatagatctcttctttggtctgccagctctcatgtcgcaaaaggatacctctgtctctgtcgatgacaagcgagcagactcaactattcacgacccatctgcctcaagagagcctctactgagcgcctctctcacatccgccaagtcgctcgttctccttcaattgctctctagactcatcacatttaccctcaataatgccctccttcggtttgcttcgccagaggttttcggaacagctgccattcagttcgaccttgttggttcgacattgctgtttttgagcagagaaggagtgaggggagcgttacttcggtctgggaacgcgtctgttaagagcgagaacgaagctgggagcaaaatcaaggagaaggacgcgattgataaagataagcagacgacagatctgtcggtgaacgctaggcagcttagcctaaacctttcgctcatcccgcttgggctttttattttactcggatgtacgattgtacctacatacatctattcatcttcgcgcctgacgacgagccagccgttcttcttaccgtctcttctgctacatgttgctgggtatctgatcgagcttctgtctgagccatactacgtacaacttcagacggaccttatacttggcgtccgtgttcgggcggaaggctcggcagtagtagcaaaggcagtggtgacgtttgggtcggtctggttcttaggagagcgacatgcgcttctagcatttggactgggtcagctcgcatacggaggatttatacttggagtgtttgtccatcatttcggtctgagaagagcagcgaggatgtggattcccaagaaagtgtcgggtagtctcttgggaacctatgtgtgagtgcgaagaactgatgagcgaaacaaagctctagactttgatcactatcatgggtactattctcgtatacttacctatggggttgacactttgatagctactttgaccagtcatcattcgcattagcaaaggcgatgaccttgcagtccgtggtgaagcatttcctcacagaaggtgatcggatggttgtctctcggatcagtcctcttgaggaccagggagcatacgcaatcgcgacgaactacggtaggtgagaatatatgagcttggtagacatcgttcacacataatgcttgctaatgattgtctctcttcaacccttctgataacggaatatccatatcatccggaacaggctctctggtagcgcggatagtttttcagccagtagaagagacagctcggctatactttgctcggtcactatctgctagaaacgagcggggcaaaccctcagagtcaacttcgacctctgtctcggtgtctgattcggatgtggagatcgcactgacaatgctagggacgctgctccgactgtcagctcatctggcggtgctattgcctgcactcggtccaccattcatcccaacggtgctctcgatactactaccgtctgcaaagtggtctggggagcgagcgcggacacctggccggttgctcgcgatttacacaatctacctacctctaatgagcgcaaatggggtgctagaggcgttctttgcagctacggcgaatgcaagagagcttggaagacagagtcgatcgatgtttgcgttttcgatagtctttttgatgtttgtgggtgcatatgttcggctgggaggaggtcgaccggaggaggggcttttgtggggaaacgtggtgaacatgatgtgtcgtatcgtgtttgcgctcgaccatgctactcggtggttccggttgcgaggcgaaggcaagacggacacgctcagtccaagtggcttgatgccgggggtgaaggtcatactggtggctatcaccaccgggctagccgtccggttgagtgagcggctactgatcgctgggcaagtgcagcggtctaagctagatctcaggagcacgtgtggacatgtgctcgtcggtttggctgcaggaggaagctgcgtagtcgcttggtgagtggtgtttcctccatgtctttacttgctccggagtattgtatgcctttgcgagactgacttatcaacgacatttcgatagcttcttttccgaaagaaaatctgtcgtggcagcgctccgaactctaaaaagacgtaaaatagactaatgagaagatataaatggtattcagagagaaagtggacacaacagaggagaacgatattctaagaaatctttgatacgagcgttgagaaaccgaacagagggtagagaaggagaagagacgcgtcgattgatcgaagacgcgccatggacgttatgcgaaagttgcacctccacactctgcagtctttagcttcctttcgtcctgggcaaccaggacatcaataatatcgaatacaatacagagaagattagcattgcccctgcataaggatgacacgattcgatcagagtggagaccttcgggtcaaattatttttttaactcacatatcctcatatgtgcctatgaggatgcttgtgtactgccattctttgatgcttttcctttcttcccttcttccctttctgttttgatcgcaaagcaggatctcctgctcaattgactagccttcaataaggattgacacaagtgatgacgatcacgtagcgcaagaaagggtagaaggcaagaaaggcgaggaggtgaggaaaaccgccgcagtgaaatgcgagacgacagaccatctcacttttctaagatccttcactccttcctctcatctttcatcccactttcttcttctctcttggactgtcttataagttgattccatcaccatgaagctatcttcgcttctccttccggcggctctccttttaagacccacactctccgctgctctttccatcaaagctcagcgatgggctcacaaggcagcctcatctccggaccacgttgctcagctcgatacagcttcatttgaggatctaacgaacaataaggacagggattactctgtcactgtcttacttaccgctcttgattctggcttcaaggtattttcttttcttcttggtatccgaagttgtattcttactgcaaagaggaaaaggcttattcttatatctggttgtgttcgtatttgctatcctccctgttctccatcatcaaagtgtgctccctgcaagtgagaccagtccttcttcactctctgattgcccttgggttattctgatcttgactaaaccttcggccctttgatgttttaaagagaattcgacccatcttacagagccgttgcctcttcttggggtcgactgccgaaagatgttaggtccaagcatatctttgcttcgctagatttccaacagggtcaagaggtttacaagaaggtacgtgccttcgagatctcgttttgtcaccatttgacactgattttgatcatccctctgtcaaaacttagtttggtttgacttcggcgcccacggtgttctacttcaaaccgactgaaggcgatcgagctcctgaagatggaaagacgggtcctctgatgtacgatctcggccgcaagtaagttttcagagcatctcagcaatccaggctgctttctgctcatgtttggtcactcgtcttttgatcttggctgatcgagacttttctcttcattatgatcacgaattcccctgctcagcgggtttgggccggagaacttgctgaaattccatcaggcgaacatcccagctgaattcgagatctataaacctaaaccttgggcacttatcatctccacgcccatcgcgtaagatccttctctttttcaatcatcaggcttgattatccgtgattcttaccggccgtcctgtcatgtcttgggttcctttccttcatctcaaaaaagagtaattgcctcattccgaagtctttaccaataccgatcactctttcttcccatcatcacttccaaacacctctggacggcagtcaccctgttgctcgttatcgtctttaactctggatacatgtggaaccgaatccgagatgcgccatatgctcaagtggacaggcaaggcagatctcagtggatcatcggtgggttccagcagcaggtaggagcggagactcaagtcgtaggcgccatgtacgctggtctcgcttttgccatcgtagcgctctccaacctagtaccatcaacgagggatccaggcagacagaggatcggcgtcttcctttggtcgggcgtcctcatcgtattgttcagcttgttgatgagtatctttagactcaagaacggggggtatcctttccgcctcttgttttgaaactctagcggatgggaaacgagagaaaataacaaaatactccggaaggaagaaaaggatccctcgagatagtctatcaaatccgaaaggaaatgttgggctgaagaaaggagatagataggtagtggtttagtttcacccagatctgatgattctcttttcttgcaaatcaagggcatctctttctctgtttcgtttttccttctcctcatcttgaactagaatgatttagagcatgaagagaaaagagatggaaggtccagaaaaggctagaggaggagttttaaagattgggtatcatggtctcgtgattcaaaaagatggagaggtaagaaggaagagcggtaaaaaaggtatggtcacaagcgaggattctcaaagataagaagattgagatgagcctaggcgtgagaggataacaaagagatggtataaagcagtgagcgaagacatggaaacaaagaagatggaatctcaaggttcagcgtcggttctgacttcctgatcgctgatacgcggcgagttggtcaagctctgcctcgagcgccttgatcgatccgtgagctgtctcaagatctttgttcagtcgatctctttcggcaatcaactgtttaaacatcccaattttcatcatattttcgatcagtcttccggccgctcttttgggtttccacctgttcttggctctcaaatgaagcaagagacgtacatgctgctcccattgtctgaatcgactctcctctagcttgacttgttcggtgaaccgctttctgagcatctcctcttcttctttaaacttcgggttgtcaagcttcttaaccttggcttctccaaacttccgggtctccatctgagactgtcggtagttttcgtagtgggcgtcctcggtcgttgagatgagatcgagcatgtgggttcgaatgagaagggatcgaagcttccggaagtcgcagtggtcctcgttgtccactgaggaggcacaggaggaaagagtgaaattggaaaagatgtcaaaactgtttgacgatataagagaaaatgatacgccgtggacgaaccctcagcaacaccccatagatattctcgacctttgacaacccgtccatctcgagtggtgacatcttgagtggatccgatgattgaaaacggcatggcggccgtcagcgtacgagcatgctctgccgatgcagggtcatcctcctcaatcggaggctggtagatcttgattccctgagcaacgatgacttcctggatctgttgaagaaaaggaggtacaggaacaaacgaaaatcgttcagtgcgcttgagactcgatgtcttatgagatatatgcgcagatatcaaacgcaactcgttgtttgaagatagctaaatcttcgggcgtcaacgtatcagctttagccaccacgggaatgagattaactcgagtaccgaggcgcttcataatctcaatgtctagcggcttcaatctgggggtcatggaatgtcgcgatagagagcgtttgtagacagcaacccatttcggtcaacaacctgtcagcgcgctctcaagtctgccaacaggacgacatcagacgtggagaatacgtacgtgtgtccagtcggtcgcacaaagtatagacacgcatgaaccctaagatctgccttctcctctcgctggggctgctgctcctgacgcataaacatctcgtgttggtcgtccacaaactccacaattggtccccagctgttacaaatcaacgagagtgattagtaaatgctctcgctatccgttagaaaacctttttgttgtgaagcatctagagaacttcggaagagaaagtgatttacctatctcggttgttgacgtagtcaccaaatccaggcgtgtcaatcacagtcaatttgactttaaatgccttttcttctagctgtggagaggaagagttcatgttgattaagtatatgcgcttgcatctagcgtttaacaacatgggcctatagctgtttagagaaagggaccgacctcagccttgatgatatctacctcggtcgtcttgtctagttgctttgagaatcgctgtcgatagttctttggctgagagagctcggtagagaacagagtgttgataagcgtcgtctttccaagtccggattcgcctgattaagtaaagagatggtaatggaggggaagagagaaaggtacacagggcgacacaaagtagaggaaggtgtcagtatatgctaaggagagaacttgacgctgacaagtctgtgggttgacttggctctagctctaacaagcagtcaaaaggagcagatgtacactgtagaatagaacaataaagaaacgtaccaactaccataacggtgaagtgctatagagatccattgtcgggcatcaacaatgggatttcaggcacgagcagattgacggcaagcaccaaaaaagagacacgacgagtcaaatgatcagcaacgaatgatttagatatgtgcctggaggagctcttgaagagaggaccaatagaatggcccatgtagatgtaacacagggaagagaagaacaggaagaaacagtatgaaaaacaagatagatgaagccactgaatgcacttacagcccctcgtttagctacgatcttgtgtcgctggttgggtaggctgaaaaagcggacaagagcgtgagtaccttgtatctgaccgatggaaagaaacgagaagatgaaaagacggaaggctaagtactttgcgattccgattccatttgcagatacatcagtggtggacattttggtggaggagcgaggagaagagtaccgaaggcgaaggtgaaggtgatggtgagggtgaagaggtgaaggagatggagagttgctgtcagagagagaagcgacggccgtttgtttatttcgtagccatttgctatacaggatccttcacaatcattacaaaatctcccatttatctattagaaattatgtattagttgaacccattaaatggaaacaagtactacgaggatcccaccacacaaatggtgacccatcatttggtctctaaaatataatgattcaacacacctatcattcaaagttattgtgatgcagcatgtatgatgactgtagtgatcaaagtgttcttgagaagttcactgggtcgtccgtagtgttgttgcttttgaagtagataaatcagtgttctctctaatgcctcgatcgagtttttcctaatataaatttcgctaggcagagggaagaaaaaagagtccaaagaa

SEQ ID NO: 263 - DNA, 8168 bp, Xanthophyllomyces dendrorhous
  misc_feature (588)..(691): n is a, c, g, or t
ttccatcccatggctccctacgctaaaccagagacgtctcttaaggtatgattttttgcatgttggtagtgcttcctatgtttctgttgtactcaatggtccatttcgctgttcggtcaaactggaatcaaccacaaaaaaaacaccataccttctcttacagcgagccgagggtaagtttatgttttgcacctcattgatctttcccatcccttctttgagttgacttaaccctatctttttcccaaacattccgtgctacagagcttctctcactttctcctcccaaggaaaaggaggccctcgatgctctcgccgaggtctttgtgtccaagcgatttaagtcgacccccatcaccgcccttgagcctgtcatcatccggttcgtcttccttctctttatcccttgttctcaggccttgcagaacatagcaaacaacgatatcaatttggatctaattgtcttccgatgttttctactgtatagattcctcgagctttgcgtgtcgatgaggaagggaaagatcgccaaggaaggactcgctgcttaccggtatgcctttctcgggttttttttttttttttttnnnnnnnnnnnnnnnnnnnnnnnnnnnnnnnnnnnnnnnnnnnnnnnnnnnnnnnnnnnnnnnnnnnnnnnnnnnnnnnnnnnnnnnnnnnnnnnnnnnnnnnntttaatgttcttctttattcacaacgacttactcacgcaacgattcgtcctcgtccactatttaccaacggtttccagaaatgtcgctcaatcgaccaatgtgccctctgtcgagaacgtcatcaaacgattcctctctgctgctgaggccaaggtggccgaggcccaggagtcggctgcttcgcttctctctactaaagacgattcgtccgctgaagagcccgaggccgatttggatgctcctcttgagccctctactctcctcatgatgtccgttgatgcccagaaggataggaccgaccgacagatcgtccttcctgctctccggttctactgggagtgcttgcgaatttctcttgaggtcttgaggaacagtgctcggctcgagattatctaccaggtatgcctttttctggttcatgcttctgacgggttgtttcgtttacactcagtctgatcacgtcttctttctctgctctcacagcaaattgttcagcgagcgtttgccttctgtatccagcacactcgaaagaccgagttccgacgattgtgtgaaatcattcgaaaggatcttgccaccgtccacaagtattcccaccagcaaaacaccatcaacttgtccgaacccgatattcttgcacgattccttgagatccggttccagcagctcaactctgccgttgacctcgagctctggcaagaggctttccgatcggttgaggatatccaaggtcttctcgtcaaccctgcctctaagaaggctcttaaacccgcgatgatgatcaactattacgagaagcttaccaaggtgttcaagtctgagggtggctccatggccgtgttccacgctgccgcttggggaagataccagatgtttgccgagcgaggcgctgccagcgctaaagagggccaatccggtttgagtgaagaggatgcgaagaagaacgttggctttgttcttctttctgccttggccgtcccagttactgaggatggagagggaaagagacatgccactaagttggtcaacttgctcaacttgcccaagatgcctaccagggctggtttgttgaaggatgctgttagtatatgtttcactttctgaacgccaaatacatatctggtccctctgacttgacttcttttcctttcacaccgtattcttccttgtcagcttgaccgaaacattctcgctcgaaccgccccggatcttgccaagctttacactctcctcgagcaggacttccaccctttgactatctgctccaccactgctcccatcatccagtcattggcttcgtcgcctgattatgcccagtacgctgccccgatccagcacgtcgtcatctcccgactgttccagcagctctctcaggtgtatgactctgtctcaatggctcacgtgctctctctcgtcagtgcgttctcgatggacgaggacgcgctcgagaagttcatcatggctgcctgtaagcgagctgagctcgccgttcgattggaccatgtccagaagtcaatcctcttcttggacgagcctttcaccatggcttcctccaaggtcggctccggccctgccgcctttacctcgaacgctttgatcgtcgactccaaggccgggcttcttcagccgtcgacggctgatttggttcgaactcagctctcgaggttggcgagcgtgttgcactcgactgtccagttccttgatccttccattgctgtcaaggccaaggaggctcagcgagagctgtttgctaaggctgttgcccaggccgaggccgagcaggccgctttctccgctcgacgagctttggtcgctcgacgaaaagagttgatggatgagttgagcgtccgacgagcgactgaggaggctgccgccaaggccgagaaggccagagtcgccgccatcgagttgaagaagaaggaggaggaagactacaagaagatgcagcgagaaaggatccagcaggaggtcgaccaggtcaggatcgatgaggccaggaagttggccgagtcgttgaagctcaggggtggtcttaaggtcgacgccgacaagatcgacaacatggataccgatggacttgttcaactccaggtcgagcagctcgagaaggagaagcgagagatggccgaacgactccgaatcattggcaagcgaactgaccatatcgagcgagcgttccgaaaggaggagattcctctcgttcatgctgattatgaacgacagcaggccgatgatctcgctgctcatcagctccttcagcagcagaccagagatcacgccaaggccgttcacgaggaggctgtcggattgaagaaccggttggctcgaatcttaggtgactaccagatcgtgaagagcgatatccagaagaggcaggctggcttgttcgaggagaggaggaaggcctccgggatcaagattgctgaggagaaggagaagcttcgggccagggtgttggccgagcgagctgagaggaagcgacgagcggaggaggaggacaagaagagggctgccgatgaggccgccgccgctgctgccgaggagcgacgacaggaagacgaagcccgagctgccgaggaggagaaggtccgactcgagatcgagggacgaaagcaggaggccgaggagaaggcccgggctgctcagcgagaagctcgagagaagcagcgacaggctgacgctgagctcgtcaaggcacagatgcagcgagaggaggaggctatgacccgacgaaacgctgcgaaggcttctcccgctggagcacctccggcccccagttctggtgcttggaagcgacctggcgctggctcttcttccccatctgcttcgtcctcgcccgctcccaccggtgagcgaaggcgactacagctgtcgtctcgatcagtcccgttggcttctgagagctcgcccgctgccgctcctgcgtctgtggtggctcctgctgctcctttgattcctgctgtggctatggccgccgctgctaccgctgcctcgtcaccagcggccccaactgaagatggcttcaaggaggttcctgtgcgaggccagaagtggactcgaggtgtcagcaagtgggccaacaagtaaagccttgttgcctctctggtatctgaatcaaaaaacagaagtagggatttccatcaggtctgggttcgagtgtcattgcatgttgtgttttctctttggatctctatagaacgctggcctattcttctgtgatgtttttcttccctttctttttcttctttcttgactctcttcatgcttcttctttcctctacatcaatttccatagcttccccctttactctttttccccatcaaccctttgtgtctttgttcgtcttgcgtatttaaccttatccgtcttcgttccaaaggcttgtttcgaatggaagaagaaaaacattataaaattcgatctttcatcttgccttttccctgttttggaacgaggatagtgttttctcaagagaatgacgtctcttgagagcaagggtgaatgacgcgatcagaacggacgaatacgagtgattgagcacaagataagctagacgaggagaagaagaagaaaaaatcaagaattcgttggaatcttcggagtctttcttgtttcttcctgatcgccaggacgtttctcgaccgaaactctactttcgagctgtcggtactcaccccggactggaccgaactcgtccatcttattccggacagagtcggtctgcgttcggttacctcacccactgacgctcagactgccgaacgtactgacagctcggcatggcatggccagaaagtagggaagaaccttacgtcgggactgtccggctccacccgatgggctaggatacatggctaacttgttccgtcgccatctctttgagtgggctcatgtatgagcttgaactgtataaaatgctgaccgagttggtgtttctgcactgagaggtttcatcgtttcttcaccccatcagacttccaccaagcaactcctttctacacatctacccaacgctaacaatctactcgatctacttacaatcaacatcatgcccgaatgtgagttgatcgactggtcgatcgttcctcctccttcgagctcaagctgatgagtcgcgcttgttcattcgacagctaccccctctaaggccaagcttatgcctgccgatctagttgggtcatctcccaaggttctgcccacctttttccttgtcctgatctcgtctataccttgacggttgtctgtactcacctagcgcggttttctgtttctgctgttagactaaagtcagtgtgctcaaggatgaagactttagccggatcgtcaacttgaaaggaaccgagacgtctggaaatcgtcgggtgagtgtgatgtgatctttgaaggagatgtcagtgatagtcaaataaccttctgacgttcctcttgttggcttgggctttggggacgaacgtctcagatcatgttggcttatgaagatacagcagatgcgaagctcgctctggactatacgctcaagacgttggcaaggcctggtgggttattcttcctctgattctgttttttgttatctcttcctgttcattgtatctgctagactctcgactctggctcatacgttctctcggtttgtgtttctaggagatcatgtattccttgtaacgatcttgcccatcactctggtcgacgctgcctgtacgcactggttgtttggtctcgggcgtccgtgatttcatcgagagctaacgttagaaatgttgtcctttcttttcttgccttgtttgccagatctgagctacgcccctgagtacaaccttcaggaggacgcaaagtggcttcgaaagatgaatgacaacgcgcttgaagtgttgaaagcccaaggcgcgcaatttgaggacatcggagtgggttttcaaattctttgttttctttactttccgttctaggcgaaatggggcgagggatgttcatagtgactgattctgtctgaacttttcttctttgataaatttgcggagtcaaggccgatgtgacggttcatgttgcgcatggagatcccaggttttcactcatcgctctggcagactttgtaagcgttttcgcttatcgcgtctctgctttgcgctggactggccgttctgatgtgcttacctttgttttgtcgctctttttcttatctagcatgacgtcaacttgtttgttccctttcttttctctttgtctctatagttgactcctcgaagggcaccaggatgactagaggagaaggaaacagaaaaaggaaactgaacgcgctcctccttttttttcttccccgttttttcttttcatttcggacgatgcaacacggatataggatcgtgatcgggcggagaaaactaggaaggttccaaaagttgatcacttctggtagtgtatcccaatacggtttgtctttttcatttcctgagcttttctggtgggtacgcaagtgagggcgaggatgaggagacggggttactgacccatttggatggttctctctttctctcttttccttctctcggcgatcgttaaaaagtcttgacgcacgcgaaccagaacgtcctgatcgtcaaggagtgaaccctcttcttctcgtctctccgaacctcccgtctctatgcaactcttttcttttcctcgcgcgatttccctctgcgcctttcagtcgttgtacccatctttgtcttctgtttttgttttgtctcgtcttgatttgtctctatttgagaatgatctgttgtcccgatttatgtatgtttcctttgaattcacatgtgagtgcctttgtacatgaacggttaggcacaaaagaaagagaaatgtgatggtgaacactgatgtatcgatgtatataatatcgcgtgttctattatgaagagagttatgtaaacgagacgaagggggggagagacaaagttatagtacaacgttccttccgggtcattcttgatggaaggcccggttgaactaagaagagaaagacagagacagagaatgaagacgacagaaaatggaaagacaaagtatcgaaacaaaaggaagaaaaaaagagaaaaaaagagaaaaaagagagagaacagaaaaacggatgcaacataaacataccaagacagaagaggagaggatagggtgaattaaaaaacaaaagaggaaggaaagaaattcgttgatgtaccttacgtgatgatataaatgaaagaaaggattttgaaggagaagttcgagagacgatgatcgattgcatgaatgttgaagcattgttgggcgagaagcccgaaagcgaaagcaagggagacgacaagttgtgaagagcgcaagaatacagagtcgtgacgggagacagcaacgttggccatttggttgttcacacgttcaccaagatcaaaggaaaacaagtaagggtttcataatcggccaatccacacgtcgaaagcctggacggatgtttgatgattggttgacgcgtggtcagctgggtctgacaaagagctttattatctctagagagagggacagaagaaaacgccacggaagacagacctttgtgacaagccagacgccgacatgaggccacgagcgggacactctctggacgcattcgaccgagacgcagatctgattttgattttcatttgttgattgcaaacgagagtacagaaccgggtcgtcaggaagagtgttgaagcgcaccggagcgcatcggaggaagagaagagaaactcagagggaacgaacagaatgggcgagcgcatcaagtcgagcttttgcttcttctgactgttgctctggaggaagggaccgatccagcatcggaccctcttgaacgaggataagaatcaggcttgactggcagggagaacaaaaggacacgggtcgtcaacaagagagaagaagaaggaaaagaaggaggaagaagacaaagacatgagcaaggataatgaactgggcgggactaacaagcaaagtctgggcggcttgaatatccagatagaggattctaccgacatctcggtagagggtgtcaagaccgcgcctgcgttcttcctcgagctcccgttcgaacgcttcctcttcgtcctcggtgtcgttcgcaccgtgctgacagtcgagttcaaacaggtcgacgttttcgacgtgaatgaactctccaaagcctagctggatcatcgagggcgggacgtcggtttgctcacccaatggctgtttcgttcgatgctcgctctgaggatcgttcggcctttcgtcggataaaggagacgaccgccggctggttcggtccggatagagccgatggtgaatcgatgagttccccacggggtcgtccgcgggaaccttcttctttttgggtcgcccgccttttcggttctttattcggatgatttgacttgtcgtgctagtcggtgtgtccttttgactttcgacgcacggccggccgatgaccggtgtggggg

SEQ ID NO: 264 - DNA, 566 bp, Xanthophyllomyces dendrorhous
gtgtgggggtgggggtgagtgtggggatggagctgagggtagcagaaagggcagatacagcgacgatggggtcgacgctcgatgtctgtgtgttctttcgggatgaccgtttggacacggctgtcagcttttcagatgcagctcggaacagggagacgggattggttgtagttgatgttgtagttgtggttgtatttgtgtttgaagatgaagacgatgaccgtttagatcttctgttggcgctttgtgccatgttgatggtgaggatgagtgagggtgtgtgcttgaacggaaactgaatctatcggtagagtagaaggcaaacggtagagaagatggtaaatactacagaccacacacaacagcctagcgaacgacgacgtagatcaaagacgaggtggttaccaacgagaagaccgacagagcgacgagccagacttaagaaggattgagtgaggactgagcaaggactgagcaaggactgagcaaaaagatcaagaagcaaagaagttgagaagcgaggttgaagaaacgaaggtaagataaaataaaataatatgatagaa

SEQ ID NO: 265 - DNA, 6473 bp, Xanthophyllomyces dendrorhous
gtcctacacgaggtgcgatcgatctgactcggtgctctcctttctgccgccgcccggcaaactcccgcactttgttcttctcccctggctaacattctggcgcacacacactctctcgcttgctcacacacacatatacacacacgcgctcatagacaccccaggctagatcggaaatcagcaagcctggtggccccactgtccttcccattccagagctctgtcccatcagccaacacttcgctcaactcaggcaggccggcttgttcaatcgcaaacgacgcagccacactgccgtacaacacggctgagagcaagaaaggtttgtttttcccactgtcagttcacatcggacgtaactttcggtcagacacatacatagacacagacacaccttcatacgggtcgttcccagtgatctttaagccagcgcagagtcctcctaggaaagcattccctccgcctggtgtagtttcttgtcaagtcagcgctgcatctatctttcatagaaagcactcccgctgccacgcacacaacagtagaaatgaacctaccagtgacatccttgatccggtcctgctcggacggtccaaacaccgccggcacccagcgagcctcacccaccgtgccatcagaccgaaccactccgaaacaggccccctctgccccactccggaccaccgccagaccgccaggtgacaagaacgatgccagctgaagggtgaccgacgtgatctgtgcaatcaaatctgttcgctccccagatggttcgactcctactaatcccagggcttccagatggtttgggctaaggtttggtccagtccagcgcaacgcgtttcttgcgtgtcagtcagcgttcttttcttcggtccacgaaacctccctcgtgcgcacacgtttgcacactcacgagatcaccttcagtcgggggcagatccgtcggacgttatctagttgttccggcacacaatcgtccttccggtgtgacagacatagaacagaaagaagatatatatatatgttttagtccctaaacacactcactcacacacacgcagagcaaatagaagaagagaggacacgctcaccggcattggttcccaaaccagattgaccgttcctctagcccatccgtcgagagagtcaatctcgtcgacaatctcgaacgctcgaaccggcgcgcacacaaagtgcacgaatgacggcggtccgttctcagcaaacggcgtccccacaaactgactcggcgagatccgaaagcgaggagtgagatatctgtttgaatgaagcgcatatcaacgtatcatcatctagagttcgacccctttgtatggatgctcagtcgacgattgcccgagatagtcagatcagagacctacttgaaactttgtagtccaaccctaccaaccgggtgtcagccaactcagatgcacaagaagcaagcgagaaggaaaaaggaagagaaaaaaagcgaaaaagagcccaccctcgtgcctcgccggtatacatattcaacgccctcgtcgtctttcgttcgccatcagttcgattccgaaagtgccacatgtctgttccgtacgcttctagctcgcgtccgattctatcaggaaagtcgtcccctttgtcgacgatcatccctaacgattggcttgaatccgtaggggagagcgtgccggagatgaaaagaaggcaggaacatatatgtagcaggtaaagataactgatcattagaaacccagctgccactctattccctcggacatgttcttactcacggaggaagaaacaatcgagaccccacgatagcataggtccctcccccaccgatctgtccttcgtccagagtgtgttcgatcagcttgccgtttgaatctctatactcgaactcgtcgatgataaacattcctgtagacgtgcggacggagatgtgccaagagccgggtgtcggtcagagtccatttatgttccatctttcgtctattttacaagaaacaagtccgagccacaagcaaggagtacatgcgaacccacccagagtgatgatccgtcctggacatggatccaaagctgccatgatgtgatgtgatgtgatgcgatctcggacgatacctgggcgagatgaacgagatgatgttcccgatctgcgggcacactacaaaactgcctaatatgttttggccgcgtctattaggaaagcgcagcaaaatctctagtagaaatttcggtcgccctcttttttttttctccttttctttttcctcctttttctcacacatccacttccgtcgagccaacaacccgatcagctgctaccctctcctcatccagtcatcatgtccgtccagaaccagggtttcttcgcttcagtcttctcttctgtctttgctacgtacgtccgcttgttgttcttggtctcttcagtcattcttcaggcattctcgattttttcgcctttttttctctcctccactcgtccatcagaagagaccctccaatcagcaatcgtcctttcgcctttcgttcatgtcccgtactcatctatccgttcttttttctcttgcctttctttctttcttgttcccatccttctttcctctctctcttctgcctttcctcaactacgcccactcaacacctttgttgtcctattcgcatctcggatacagtgctcacgccgaggaggaggacaaggccaacgatcagcaggtcgccgcttccgggcccgagtccgaggaggaggaggacaaggaggacgctcctgctgccgaggaggaggaggaggaggaggaagatgaggagcccgtcgatgttagtccgatattacccttttctttggctttcgctcttttttttctccttccgcgtccgatcgttgcacgttgagagagtctttggtttgttgactgcttgaaccatctttttttttccctcgctctcccttccctgttttatccgtgttatctctctccatctccctctcgccaaactcctcggaattgaaactcactctcggaaaatatcccgcgtgtcgataccgatccaatgatgacctttgccaaattctctccgctacctcgaacatgcgtcatctcccttcgtccatccatcgattccctcccgatcaggtcatgcccgagatccgtgcacagtgtgaggccaccccagagtgtgctcctgccaagaagcactttgagcactgcgaaaagaaggtccgaggtggtgagggttgggagcacgaggattgcgtcgaggagctctggcacgtgagtacacatccttccatacgtatcaatccgatcggtctggaaactttgacccgtcatcgagacaccgagatctgaatgttccttctctcttttcttccttccttccttccttcgcttactcttccccgtctcatcaacagttgatgcactgcgttgacgtacgtgtccattccgtttccctcctgttttcattcgtcacgttcttccagtcgactaaccacttttctgacttttcttcttcctcttccttgattccactcgactcaacacaggcatgtgccgctcccaagttatgggccaagttggtttaaagagacaggaagatcgtacaaaaagaaggttcattctcctcctacaccctccaccctccgccctcttcaataatggacgatgcggggatctcgtctccttttttcccttaatcttaaaaccaatgtttcaatcccttccctttcgtgccagtctagagagccgtgaaaagcaaagattgagaggagtctctttcttctcttcttttcttttcttattattatgattcccttttgtttctccctccccccaaaccacaaaccttttcatccttcttattaccataaccttctttctccttcttttctcctctttcaatgccatcatcattcaatcatcacataacaagtcctcacgcacacacacatccggatctcttctcatcggaaaataaggcaagcgttcaacgcacaagcgggtggtagagaccggtgcagtgcgtgcaagtcagcatgcggtgacaacctatcctcaatcaattcaaagctgtcgagactgcaatcggtcccaccgtcatcttctcccaaacctaccagatttccaacaatgtaccaagagaagaaccaagagagaaagtcaaccggaaagagcggaaagagatacaacagggacaaaaaacactaggcgagagtcgttcccagcacagcctcgatgtggcgagatgggctctacccttttcgcccttctctcgttcatccatccggtcagcatacatcgcacactcacatacacttcgtgtccgtccactgcccagctctctctctctctatacacccgatcatgtcgttagccgaggctgcccaatcaagaaaagaaagactggatgcactgagaaaaaggaaggcaggaggatcgtcgtcagccgatgggttcgttcggtttctctcctgatccctgtatctttataatgctttctcttccggcgcgttcgctctctctctctttcttcttcttcttttgaactgacgtgtcgcttccgtcttttgtacatgcgtctctgcgttgtatgcttttttgatccgactgcacgctcatcatgtgattcatgttggtgttgctcatcttgctctctctcctcgcaccctttggtcgcttggaacacgtctttttctgggttcgttcggacgtttgaccttcggatagactcgttcagatcaaacagcgaaactttgatccagagactcgatcagccaagaaggtatcactagcttttctctgagctctttccggtgttgtttgctccttcgtggaaatcaatgaccgagcatcttgcgtgtgtatcatcgctaaccttatgtatcttctactcttctcttcgctcttctactcttcttctccccccctggtttcgtcattcttcggtttccaatcgacctgcctaatggaacgttagttctctacagccgacttaccagagaccatcgagtctgccatctcgggtgtcgcagagcagatcgtagctgaggatgagctccgtcgacaggaagaactcgttcgtcttcattctttctttctttctcccttttttttccttctttcttctccgttcgcctttctgcctaccggagatctctgtattcgtttggtcagggaactaagagaaaagaagagggaagagagcatccagccgagtctgaccgagtgtatttcccctcctcttctttcatccctcacgcacatacctcgatcgtcgttctcagaacctactgaacattgctcccaagcgacccaactgggatcttaaacgagacctcgacaggataaacttgaagctgaagccagcgacggatgaagccatcaagtccatcattcgtacgttggtcataacctttctttgttaactccctttttcattatttttttcgggggacatctcctgatcatcaaggattcgtcttcgttattgctgttgctgttactgatatcaaatctcctctctccctgtgaactcatcttcgaaccggatcggatccataggtgaacgcctcggcggctcatccaaagatacatccaagcccatcgaccttgtcagcgccttggatgcgttaggcgacatggatgatgaggacgagatcgatggtgccaagtcggatgacgagtagggtagatagaccggtctgaatgaggagaagcaggaaacggaagccgaagaacaaccgaagaaaataaaagacgattcctcgtccctcagaatgggtcaaggaaacgcgtcgtcatacatacacacacatatacatatacacacttatacatccatctatccatccttcttcacacccacacacactcacctatacacatatacttgacttgtgtctatcttcttgcatgtacttttatgatcctcgtgtgtgcgcgtgtgtctgggcgcgtgcgtccgtgcgtgtgtgcgtaatggactgacaaaccgactggctcggtgtgatcggtcgagcaaagggaacgaaaacgaagacaagaacgaaagacattggaaaaaacaacacaatgaatagataacactcgagatcagatcggatcaaaggaatctccgtccctttgaacactcgtatcgccttcttcctttccatggcctcttcctcccgtctgcctcaagctttcccagcttgcacacgttcctccagagcatccaagagtgcctgtgcggtagatgcgtccttcactcgaaggaggtactgcataggtttcgtcttgtcgaacccttgaagcatgatcgattttccttgctggattcgaggggtcaaatcggcgtggcacgcaaagttctatatggacatcaaagatcgagatcggaagaagagtcaggcctggtcgatatgcaacagagaaaagacaagaaaggaacagaacgagagagactcacgatcaacacattaccggtcccttctgttcttc

SEQ ID NO: 266 - DNA, 9347 bp, Xanthophyllomyces dendrorhous
tgtccccactttcccctccttttttgactctgatcaacccgactccgaccttgacccatttgccatcatcaaacttgttgatcgaagatttgccttcccacgtcgtctcttcgtcttcctcacccacacctttctccatcaacgtagggtccgaagggatcgtaggagccggtggttcttcatcccctcctgttgcttctcctcctccgccgccgccgctaggaagggcgggagcggaactggaatcggcagcagcggacgtcgcggaaccgcctacactcagaggtgaagggaacacaggtcccgaaccagtcgttaaagctggagccggggcggaagacgagccgaaggagaacgatgagctcggcgttcgagctttcccacccggcgaggcggctccgaacgaaaagttgggtgtcccgctaggtaaccgctggaaagatggcgggtagggcacagcacctgtggtggtggcggcggcggcggctgctgctgtcgttgttgaaggggattctgtcctcgagggtgctccaaaactgaacggagagcttgatggtgtcgtggcagaggtaaaggagaacaaccctccttttggcgcgtccttcttttccgtttccttctttgctgcttcctctttcgaagctctctccgaatcctcggcggccaaaacagatttcacgatcgacccagccccagaggatgatgtcgagaccttcttcgctgaagactctgaaccagcggacaagttaacggccggcgctgatccaaacgaaaacccaccggtagtagttcccgctccagttccggtgttcaaaggtttccccccaaacgtaaagccagaaggtttcgtcgcgccagcaggcgtgctcgaagcggccgtcgaggcacctccgaaactaaatccgcccgtagaaggagatgagctcgaaccgaaagaagaagtcgggaacccagatggggatgccgaggatgaagaactggatgatgccccgttggtcgaagagactttggcacccccaaaggagaacccacccgagctggcgaatgtgggcggaacaaccggtgccgacagtgtggccttcgcctcctctcttggcgcctcagtcttttgggttgaagccgagctgatcgatgcggcttgtgccgctgcatcagtctggtcaatctccgacctgttcacggcgtatgatccagccagatcggacaacgtcttggaaagatctctgaacggatccttttcaaccagtgactgcaacaagacgagaagagaatggttcagtcctcgctggctcaagtaatggtcgaccagtttcttgtccacaccgttctcagttgaaacagggtcagacgtagtgtccttggttgtcgcggttgaaaaagaaagagaagaagaaggagccggagattgggaaggagcagccgttaagcctggagccgaggggaacgggtaggcgaccgtcgacgacaacgaagacggcttggaaccatcaggactggtcgacccggcggtgagagggacaacctttgagggtctaggtctagggcttgtaggagcttcgacgatggtcgattccgtgggcgaggcaggacggagtcggtcgatcgctgatggcttgtcaattggtaacttgggcagcgtgccggacgtggtcggtccccagggcagagagattgtcggcgcaggggcaatcgccggggaggaaggagcggaggattgcacggcggttccggtgaatggttgattggacgctgagctgaaggagaacgcgggtggtttagagataggcgtggttgttgaagcggcgccgaaagtggaaggagttgtcgacgaggatgatccaaaaggattggacagaggctttgcaggcgcagggtttaatccaaaaggattcgtcggaggagtcgacgtagagggtgagaggttgaaggaaaatgaggagcccgcaggcttagatttgggaagcgaaatagaggcgaacgggttggatggaattttcactgttgacgctggtgctgctgccgaaggggtagtagacccggccgatgcagcaaaaggattcgcgacagaagacggtccgaaggaaaacccagcagacggcttggatgcggttgagcttgagccaaaaacgggcgcagctggagcagaagtcgaggccgacgaaccgaaggagaacccccctccgaaggcctgttaatgtacgtgagtgcgtgcaggtggtgggtcagtcaagagtctgtagatacaactaagaaaatacgcctcagaagatacgagccgacagaacttaccggcgtggaggatagtgtaccggaggctggaggtgtaggaacaggcgagttactggcagatcctagtctggaagaaggtagtggtcggattctgagaggatggtggaacaggattgggcaagaaaagcaaacgaaaggaaccgaacggtatgaatacatcacaaagagcatcacaaagaacggcagatcccaatgacgagaccagatcgaaaggcgagactcacttccggacaaaaggctctggagcttgttttggtgttccatcctcggtagcttttgactcgttctcatcctcctcatcgagacctccgccttctcttgtaatctgacatgaagaacgagtggatgaatatttcttcagcacacttcaactacacacacaccagtttgactggcttacctgtgaagtagctcctcgcttggccatggctctacaacggtcgcttgctcgtggagatgatggtgatggtgagggtgagggtgcgagaaagaaagcgtagagaaagttgaaggtgggatcgtcctgatatttgaataatctgatttttatttgatttatattacttaagtcaaatcacgtgaccccggggttgttaacccctcaccctccgatcgtccgtccgcctgccttctcttgttttcatccggccactctcataacatagagcacacagagctgccatcccccattctatctgtatcctaaagatgtacatcctatccgtccttctgtcttgcttgctcattccggcgtcggtcatcggcaagggagtactcatcagtcattttaacatcaacactccttcttcaagttctccttgggttcttggagctaccaacgcacttacctgggagttttcaaagagtttgttcttttctagttttcatcctttttctttttcttttttcttttcttttctttcttccaactcttttctcacgttgtgctgatggtctatctcgttcgcctttttcaaaactcttcaactcgtcaactttccactttcagcctccgttctccagttcgatgtcgaactcgtccgtttgtctgggaatggcatcttgtttgtggccaagaatggtacgtgtgttgcttgtcttgctcttcgtctttctttcttgttctctttacttatcacatgttctttatcttggctcttggtgataaagtgccgataaacgcaaagaaagcagttatcgatgtgcagggtattcccccgggtgatgactactatgccattttcttggactcttacgatggctccgtaggtcttgatcctcatccctaactcttcttcactggtatttgttctaacttctttccttcgccttgcggttgtctcatcagatgtactcgcgatcttccaagttttctatcctcgcgagtgagctctcctcttcgccttgttttcctctagccagttgatctgatcgcatatatgcttgcttaccacttttcctttttgcaccctgttccagacaacaccgcatcgactacagttcacgacgcaaccatcaccatgaccatcaccggatcgccaaagtaagcgccgcctttctcttgttcatcgtgccttgatctctcgtctcttcatggctgatccctctgtcctttccctttcttggttctctcagccccatccgattgttcgagacgaccttccctgcccttcagaccttgacgtcctcgggtaccgaccttgctggtcaagttggggcgtatgttgtcccgggtagccggcataccgcgacgaccacctcgtccgagaccagctatacacatactcctactccgaccccgaccccaacctctacctcatcctcccaagactcttccgaagtgacctcacgtggagtgaacaacggaaagagagctgagctgtcgtactcggtcgtgtcgagcgcagagaagacctttggaaacaacgcggtcatctctgttctgggagttcttgttggaggagccgttggattctggaatctgaactgattcccgagatatagaaaacaaaaggacaacgggttcgttgttggaccgatggatgaggtctaaatcgtttctgttgtcgtcgttcttcaagtcgtcctcttttttccgaggaaaagcggaggccgcaaagagatagaagaattagagatatatccttttgattcattcctgaagtgaatatatgtttcttcgttcccttgtttctatattttcgagttgtgtcggccaaagaacacttttatcgtcatcttttttgttttctctctgtctctgttctccttcaaatcgattttctcttccttagctacgattgctctgtagacaaaatcaagggatcacccccttttacttgccttgctcgactcgtcgactctactttcttttcccatccagatctccctcgattgccatcttctttattcttgctttttactcatccaaatgaacaatctcttactctagctcctataacaatatgtccggcttcttatcaccacccttatcgatcaggatggcatgtctcccctccactcccaccacgttgataacacacccgtcatcaaaagaataggtctatagcgcacttgaactcccatcgaaagtaaagcaaatagacgacgaggatctaaagagaaattttgaacgaatacaaattatgcgtgtagcctttggggcttacatcattccaaagagttccggttacatcaacgtcctttagccgagatcccaagtttatccaactgacttggccagaagaacagctatatatcttgctgttgttctcatctctttccttttctttctccctctgtctctcttttttttttgtcagatattcaaccacgctttgcccactcacaatgtcctatcctactgcgcttccagatgtgtcgacaaaatatctctttgacgtcaaggacaaggtcatcctcgtcaccggagggtcgtcaggcttgggaacgatgatggctgcctctttcgtccagaacggagcgaaaggttggtctgtcttcttctttctgtgtctctggtatacttgtacgatggcaaagggctgatcgtgatcaacactaatgtctgaatgaccacaacttcgaaatcgcccgaaacaagtctacatcgcctctcgaaagttaacccaacttcaggaagtcacagcccagctgaacgggatcggcaaaagctcaaactctggcggctcatgtgcctactttgttgctgacttgggaacaaaggcaggatgtgactctttagttagccagctgaaagaaaaagaatcttccctagacgtcttggtcaacaacagtggaatgtcttgggttagtctctttcgcgtttgtcccgaatcatcttttggaagtgttttcaaaccgctaagatcgaccgtctctcttcgtcgtctgtagggaggaccgctaagtgatgagttccccgaagtaggatgggacagagtgatgagcaccaatgtcaagaggtacgtcggctttatcttaaccttagcatttctatggagaagctgaccatttccttctcggtttaccgttgtgatcgatcgctcatgtagtatcttctaccttgttgctgggtaagattccttgatcccgataactgtacctcatagtcacactaccaagtacctccgagcttatcgagtttcatcatggttcatctatgaaaattgaaactagtcttcgacccctcctcaggaagaacgctacagctctcagtacgtcatcgcccattagtcttgacactcttctctgcctgcttttctgatcatttgctctcttactgtcctatttcaactattctaaatcccagaccctggaaaggtcatcaatgtgtcttctatcgcagggatcgtcccatctgccgaaggaggcctcagcaagcctggatggggtgtctacagctgttcgtcaacttggttctttcaccggtcacaccctaacctgatctcttttcattgcacttcaatcttactcttacaacctaccaacagatgcaacctcaaaagcggccgtcaaccatctcacaggtgtcctagcaacttctttagcagccgaacacataaacgtgaatgccatcgcccctggaacgttcccttcgaagatgacatctttcgggttcaagaacgcggagaaagaattgctggctgaacaacctactggcagggtcggtatggccgaaggttagttccttttccttactctctttctttctttcttgtttgtttgtttgtttgtttttccttcgtgatgcgtggaaaaaaagaactgaccaccagaaaaccctcacttgcctccctctacctctgtacactgggcgaggaatcgcagacatggccggtctagcgatgtttctagcttctcgagcatcatcccacgtcacaggggcaatcattcccgtcgatggaggtgctagattgggcgcggagagtgtgaaaacctctcgagagaaagcaaagctttaaagttagcttgtttgtcggttgccttctgccttctgccttctgccttcttgatcttttcccttctcccgtctctcttgcgatgtaatgtatcatgatcgatgtattagttgatcgtccaactgcttcttgtcactcctccctcttcaccaaaactgatacaagttccattgaattgcgcaaaatccgtcattgacgaagtaccaaaaggaaaagattttgaaagagtccttcacggaccactctgggaaaaggaggaaaccgatccaagacctaaacgaaacacggaaacaactctctacatggctaagatcatacactacagaaaagatttgaaaaatcaagaggaggatgaatattcaaaaacaaaaaatacaactcaagatcgttcttctggtctgaaggattcatatcaaaggggcagacatagccctggtgtttctcgaacacgatacctccgatgttctccttgatgttaggtcttccgatctgaactccatccttgatagggccagtccatcgctcatcttacagatcgaacgatcttgtcgattgtgatgagcgtctccgagcttgacaaaacgttgaggagaacctctcaggatctcgtacggtggcgtaggaaacggttgataccgaggaggaggaaatggataggacgaggtctgtttgacggtcgtgtgcgggagagcgttgagcgagatcctaaatatcaatccgaacaggatttgattactttttgatccatcgtgaaaagacggtagtagatagtcttacaacttctggggatctcttgcttcgatacgtcgtcgacaaggccatgtccatcggaagatcttactgagaatccaaacgatggcgtgataggagagtgtctacaggacacaaagatagagtgtatcagtgatgtgatcgtcgtacttacgacgcatcgaaacagatcagataaagaaatatgtcgaacccaaactttcttgaaagtattgaagataaggggagtagaagaagcgaaaggaagtgccaggattgataacagccaagaatccttctggatactcatttggtgccctggagtaggaacaggaaatcagattcttaggcgctgactatccatgcggggtaaggagagccaacctaccgaaacataaccggtatcccttcattatcagatccatcacaagtctgcttccaaagatcatcccccacgcgccgttcgactgagtggacagtagctgatttgtggaattgatcaaagcagcttgtctctcgagctcgctcgtcaagttttcaatcaagcttgaagtttgggccagatcaaacaggacagaagacgagatcgtctaaggtgttgaagaaactcatgctggtaagggatgcacgctttgaagcaggcctcaatagggaacagactgcaaactcacctgggtctgtaaagcaatgttcagagagatttccagaccggtgtagacagactgtaaattcgattgaactctttccatgccctatgaaaaaatcccgttatacatcagtaactatgactcatgagggatggacggaaggaagagtatacccaccgaatgtgttcgctctactgttccctccaaatttaccagctttgtagcgagttgctcggagctgactgctaagctgtcggtcaatcgctgaagcacaacttcgtgttgctcagcagtacgctctaatgaggaatacaccgtctgcacgaccctagagacgacctcctcatgctgtatgagaagtatgaagataatgttagggcacgacttatatcccaaactggcgatattatggagtttactgaccgattcaaaattcttatcaaacgtttctcgagtcttctgtaacataacatccgatactccctccatctctgcttccatttgggttttgattgaccggacgagagaatcgatagactcctgagacgtccgggctaattcactgggagaaaagaaattggccatagatagatgaatatcagataacgcttgtcgagatgtctcgaaatcctgacaaatccatcaaagagaggaccacatcagcttgtcatttgataagtttgataaaggaaacagcggaaaatgataaaaacatccgaccgaccttcagtccatccttccactgtcggacgttcgaatcaaactcgttcatccggatgtccctttccctggcttcttgctggaggactctcaacaaagccgccttctctagtgtgatgttttgataaaccgatcgtgcaatatctattgactcaacagacgaatggataggagatggttgtttagatcgataattgcaggtgttatagaagaacgaaattgatgagagacaaagggtggagggggagggcaaggaagaaatgcgctaccagtccttacctacggaatttatcctttgcaaggcgaaacagagctgggctgaggatcaagccgagaaaaaattcagatgcagagcgcagatgcgagactaattgaacaaactgttcttactagcttctctcagataaccactgtaagatgtccacatctgagcgcttcgagctagagctcttatgtactcgaaacgaaaaaaaaaaaaaaa

SEQ ID NO: 267 - DNA, 25472 bp, Xanthophyllomyces dendrorhous
aaaaaaaaaaaaaaaaaagcgcttgatgtcaggctaagactgtctcatatgagcgcaccatactcgaaagagatgaatagagagattgactgactcgatacatcgggcttgtgaaatattcatttcatccttattttgtctggcgcactctcggtcttccttcacgcaaccatccgccgaggatttgaacggcgtacattccatagggggcgacaaccgggcagagtttagatcacataatgtcaaagagattgccacttgaaggagaaacagacaaaacggtaattctcctcatcagcaatgttgtaaacatgaagtgtttgatgatacaaacggtgtacctcgtgctctggcatcgccatcgatctgacttccactggatgttgcacaatctgctctgaagtcggcggccaccgctctgaaacaatctggtttgttttccgaaggttctaataaatctgagatttttaaatggaaacaaaaaaaagattaatcaactgggaattggggaccacccacgcaaggggggaaggtagcaacgggctgcttacgtagagaggagaacaacgcagtgttgtctttttctgacagaacggtctgtgcatagtcttttttcagaaggtcttgcagagaggaaagatgaccaatctgtcggtctatgatgttgtgggaatcaaaggagaatgagttgacaagattctgtacgtcaggtcttggagaatcagatgggtgtatgcgaacctcgactatatctgtcgatggttgaggcaacaggcaccacgacagccgatggattgttccaactccatactgcttttgtcacatttggacagacagccataatccagatgagcgaaaggctaaggcaccaagaagggtgagagaacattttggaagatttatgctggtgatgatgatggagaatcgaagatgagatgaatgctgtcgaccaaattgtaggaacggatctgtggttgtattcgtcctgaaatcggctgacagctttgtaccctgccctggaacgtcaatcgatgttgaaattcccccctttcatttccctcttccaattccgattgattttacagcttgattccttttgctcatctcaaccgggtctatacatcttttcataacaagccgatttgtgtcagtgaaagaagatattaaagctacatggattgatctagttccagtaccggatacaacatattacatttcctctactgtatttccttctttcatctcgccggagctttcacagaagattcaggcggcgggaccttttgggagacgtgtagtgaagaaatagacgaatcgggtgatggggcttgggtaaaatggtgaggggggacgacagattgtgcagatccagcacagtcggaggttactgaataggacgtgatgagtgaggtgtaataagattggagaagactgccatcgcactgatgaacgtattgtgatgagaaggcaacatatatgagtaccaagtaagagaaaggtcgtaggacttaaggtactcacagtcaagctccagtcaagacccgagatgagttctctctcgagcagattgagttctccgatcttgataccaccgactttggcataatgagcgttggtgcaaaacgagtcgcagagggctttggacgcgatgcatgcagaggctattaagaaccgatgaacggtaagcgaggaaagagtgaaagaagggaggtggactgaaaatgcgtctagatatggaagcaagatgagaagcggtgatttctggaaaaagacacggagaagttagaaggttagatgtcgttcaaaatgaaacgagttctcaaaggaagcgatggacaaacttctatatttgtgtactttactatccggcgcaagtactcgatgactgagattgagggaggagatcgagaatgaaatcgggtgaggtgttctctgtgggttatggcaattttagaaaggaacggagttaaagtaggggcgtctataaacagatgacacatggcccaggaacagaacgggacctacgataaaagtggaacctggtcgttgtgctggatgagtttagaaagcatggatgctgtgagatcggcgaaggtttgggaaaggggtgtgagtatcggtataagatatgaatattatgaagaacagaatggaaaagaagaagagaaaagattgtggctaatgcctagagcgtgtgaataacgaagcccatatgaacggactgataaacttacaaaccaagataaccagatcgtccatgtccgcgtccatatagtgatgaggaagttgtctagatgattgatcgactgattcctcaggaccaggttggtcggtaggggccgagctggtagacggctcggccggaggggaaacccgtatggtggctgtagagctggatggccggctttcccctgtctgccaagtcatgggctttggatttgttctctgctttttacattcggtttcttccagcttttctgcagccagaccaaaagaaccaacgagttggccgttcctttcgctctgtcttcttttcgagggagtcagcggagttttgggaacgggcaaagacgaaggatgatttgaccccaaaggatagggcgagaagagggctggattgatgagagttgttgacgacatgacgcgggaagcatgagacttgacaggttccggacaggaatcgttcgattgagaagaaatgtcgagaagagatagagagggtggatgcgaataggatgaacgtcggacaaacgataattttgggttaatgaacgaccgaagattttttctgttcttgatttccttgtacttttttgtttcccttattccatcgtagttcaacgggataaagcagaggagacaacgagggtgagggataagaaaagaaggagagctagtaactacaaattaggctttgatacgacgagagaatttaactgcgggatccacccatcgccggtatttctgggcgattctccggctaggtgcgcaaatcgacgaatattttccggcaccctatcggctaactcgtcaccgtatggcccgcggccgttcgcatgcggcatactaggagggcttgcgtcaaatagcgtgcgagacgaagcggaaaaggttgtgggcatcatctttgtcgtcatcaccaagagcgccagcattcgtataagagttagtgttggtagtctaatcgggagttagtaccacgattcattttattgttgatcgtagttgtatcctggtcagacgtatacaacgtggtacgcatatagaaacgcatacacatacacatacacatacacgcacacacatactttccctcacacacaaacgtatacatcaaagggcgtttcattttcgttgagcacaaaggccacatcaaaagagccaagaaagcgggcagagtgaacgggtactgaagttttgaaaaggaatagatggaaatatggaaatatggaaataaaacggaaataaaatcattgcagtgcaaaaagaacgacaaaggtgattcatgatggagtatacactgtgaatggccattaggtactcctacagtggcaacaacgtttgttactaagtctcgcttggcactagaatgtcctctttcttggaaagatgagggcatcaggaaggaaaggaagaagagaaggatctcgttaccatggataccatgcatggttagtaacgagcaaaaaacctcacccaagagctcgatttcccgtccgcagcagccgttcacagcccagctcgcacagaccctcccccggcggcccccccaggctttgtgggtgtggacgctctttggagggaaaaaaacgccagcttcgactcaccccttgtatccgactccagtctagccaacatgccgtaagtttggtatccttgttcgccaaagatggctcatctggtcatcaagatggcaacatatcatgcctatttgaatgaacgagtgaactaatcagctggattgtcatcgctattctttttctttcgtcggtgctcgcagtcccaagttcgacccctctgaagtcaaggttagttccaggcaggaccgcaagggaaaggatgtggtattgaagggatgctcaagagagagagtactggatcgagagcgtccacgaggaggttggaacaaagaagggggaacatgctagagtccggcaggggaaatgacaaacccagagagagcatgtatgctgatcagttttgtctcttccttcttctcgaatctcaaatccgcacggtcgattctttgctccaaaaaaattgattccctcgccctgccgctgtggatacgcccaatccgttctttactttcctgctcgcatcttcttcgtgtgcttccgatcggccaatcaatccttctccgtcaatttttgtccttgccacttcgttctgaaatatctcgtcccgacccatatgctccttcaaatcgacatcttctcaaccgaactcttgacttgttccataaacttctttccgatcatcatcgattcggaatcctatagatcatctacctccgagccgtcggtggtgaggtcggagcctcttccgctcttgcccccaagatcggtcctcttggtcttgtaagttcaaatatctttttgactattttagaatactcagcaggtcagatcaggccaagttggaggacaaattgtgggaatagagtggcaggtcccaaagaaacgcgaagacgaggaacaaggcgactgtaaggagaggagtggcaatgacgaagaggatggaggctgtcatccgaaacttctcaccgttaaaagcctgtcagctaaacatccgccgccatttgtattttgtattgttggttaaattataacctttagtcccccaagaaggttggagaagatatcgccaaggctactggtgattggaagggcctcaaggtgactgtccagctcaccatccagaaccgacaggccgtcgcctccgtcgtcccttctgcttcttccctcgtcatcaaggcccttaagggtatgttcttactctctccccagagtcatctcgatattggtacaaaaactcacttcacgcctttcacgcccttattccagagcccccccgtgaccgaaagaaggagaagaacgtcaagcactctggaaacattgctcttgacgagatcattgacattgcccgaatcatgaaggccaagtcccttgccacctccctcgccaactgcgccaaggagatcctcggaactgcccagtctgtcggttgcaccgtcgacggcgtcaacccccacgacatcatcgagggtattgacgatggttccgtcgaggttcctgaggagtaatggtttcattttgttgttataacatgtttctagacgacaaatgtttttctcttctgttcccaacattgatctcgaatacatcaaaatggtcgtacctttttcccagttctaacaaagcaaaccccgaaaagagataaagatgaaggcaatcatgtcaggaagagtgggaactgagtccttgagggtcctaatcgcagacgttcgcttagaaggatcgtcgatagacactttccaacaatcccctttcaagctgaaccctaatcgggcacactgtttctttcttttcttgtttcctctgcttgttttaatcaagactacaaaagaataagccatgcatcttctttgcaagtcttacactatttctcttcttcttttttaaatatctacttggactgtaagagcaaacaagctatgcttcctagctgccgtctgacgtcctggtagtcgacgtcgtgcgctagtaaagataagatcccagcaagatgagacagaatcaaaaatcaaaggagtagatggaatgataagatggatcagaaattggcaattcttcgtaaagcgaaacaaggcgaagagaaagaatggagggaataatgaaaaaggacttactatcctcgacttcaccccatacttcgatctgactatcaacttcgacctggctggcgagtgaggcttgctcaatcgtcagtctaccttcgaccagggcgagggcgatgaagaaggatttagtggtgtacaccgctcgctcgaacgctgattcgtgccaaacaatataagtattcagaaagtttcgtttcgaaggaatgaaatcttgaagaaaaaaaggaaaccagagatgaacagaatttggggacaacggacctgctagtttccaagagggaaattccatgactgcttctcggagaacttcaaccgtcttaggtggctgacgagacatcagcaccgatccgaaaacgtttactatgtagaaaagaccacacagagagaaatgtgagagacatatcattgagcaaaggcccgattctatacggttaaaatgaggcgaatgatccataccttcgactttaaaagcctccctaacccaatcgagaatcggcacccaccgctcattctgcaatcggacaagctgcgtcggatgggtctcgtggaaacagattgtgtcggtgtccaagtatcggagaagcgttgcagtgacgtccgttctagacttgatgttctcttcgggggtcgactttgtagaggcgaaagcatcgatcgctctcgaagcgagcgaggtctggaattaagtcagaatcgatgatggaaaagtggtcaacgaaatcaagctaacggttgttatactcattgcatgtaccctgacaaagtctcatgctacctttatcaaaagttaaagatagatcatatggaaggagacgatgagacataccatcggcaaagcatgattcttgagcaccttctcctgattctcccactcattcgcgatcaagaaagcaagcgctttacgctctgcaggaatcatgagtgggtttccacccggcgtccggagaggtctagtgtctagtaggattctaatgcctaagagataattgtgaaacacacatagagatgagcattgacaagtttggagaggaaagtctttgacgatcgcaggcgtaccgttgggcgtcgtatcgagctgaacagtcttccagaaccgaccaaacgtcttctcggcctctttcatgatgattgtaatagatctggttagctcttcgattggttgttccgaggttttgaacgcaagaagagctgaatcttacgtttcgtaggattcaaaccggattgagtggcattttgtccatcgattttcaattgaggcaacacgtaggccgaagcaggcgatgcaacagccttccggacaggaagagacctagaaacatacctctgctgtttagagattgctctggagacaccagaaaacatgttggggagtctgatggacatcttgactggatatgtgctagatggttgaaagctgatgaacgacggtatgtatgctggctgattttggatgaaatgactgcgcgaggggaaaaagtcccattttgaaaggttcgttcttttgccttcctttctctttctggctattgagtatacctcatcagacaaacttcatcatggcatccttcacaaacgagcaaaagtacgagctcattaccagaaaccttcaggaggtcattggtggcgataaaatcaaggatatcattgccaagggagagactgtcaaggcctattggggtacgtccgaggtcacttctaccgagtctcaaacagttttgtacaagcagacttgattgaatgacccactaatgtgtactggaaatcttaatatgtttgctactcccttaataactggcaggaactgctcctactggacgacgtgagtgtgcccattagatactctaatttatttgtattttagcaaatagagatttatcgcttctcgagctgacccttcgttctctgtgctctacagcccatatcgcttactttgtcccccttgccaagatcgccgactttcttttggctggtgtgaacgtacgtcccgagtttgcttcttacttagtgtatctgattgtcatgatgccgcgctgaaactgttttcttgatcgtcctctaggtcaagatcttgcttgccggtgagtcaagcgagttttagcaatagctagaaacagccaaactagacattcacactttgatccctcgatcagatatccacgccttcctcgattcccagaaggcccctcttgatcttgtcggccatcgagtggactactaccgacgccttctatatgccgtcttcaacgccattggtgtcccgacagacaagcttgagtttgttgtcggatcgtgagtccagtttctctgcgtcgcctgcgttctgttgccatatgaagtgctcatcatctttacaaactatcagatcctaccagctcaagtctgattacaccatggacgtttaccgattgtcttccatggctaccgaccacgacgccaagcgagccggtgccgaagtcgtaaagcagtctgccaccgcgcccttgagttcgctcctctaccccggtcttcaggccttggacgagcagtacttagacgtcgatttccaatttggtacggttgagctactctttctatctctcgagggatatcaactgactgaatctcttccctttcttgctcggaacgttaggtggtgccgatcaggtaagaggcatacaatcatcatttgtacctcaaagatactcggttcggttctgacatttgatgtctcgcgtctgtattaacctacgtagcgaaaaatcttcatctacgccgaagagttcctacccaagctcggctatgcgaaacgatcgcacttgatgaacccgatcgtgcctggactcgtaaagggcggcaagatgtcttcgtccgatccaaagtccaagatcgactttctggactcggcggccgatgttaagaagaagatcaacaacgcgttctgcgaggaaggtaacattgaggagaacggtttgctcgccttcttcaaggcggtcgccatcccgatctctcagctaaagtccagagtatccgatggaaagtctaatccgttcgtcggagagggcgccccggagggaacggtgatctcgatcttcagagacgagaagttcggaggtgacttgcactacagctcattcaaggagatggaaactagtttcgccgagaagaagctgcaccctaaggatctcaagaagggaatggtgcgttgttcttgttctctctgtttctcatagagtcgtgcgatgccgggtgactgaatagatgaacaaccactttgtcacaacacgaaactttcttttctatatcagaccgacaccgtcaacaacctcctccagcctatccgagacgcgttcgagtcggacgaagacttcaaaaagtcagaagctaacgcttaccctgtacaggctcccccggagaagaagacaaaggtacggatttgcatacgaagtcgctttcattcgatcattctctcgttgcttttccttgacaatcttccttctcttgttcgtttgttttccatccgctgataacgcagattaagaacagaggaaccggtgcgcccggagggcagaaggccaaggcaccggaaagtgcgcccgagcctgctgctgctgccgatactactactgaggccgctgcacctgccgtcgcttcggtggattcgttggctgctggaacaggtgctttagagatcacccctcagactcagctctagatacaagaaaggaaagaatctgtaaaaacgttttttgtgtctctttgtttcttcgtctttttcatagatctcgaattaaatggaagagtcttggttatcaaattcagccattagtcattgcgtttagaagaaaaagaaaaaaaaccctgatatccaaattaagtttgatggaagatgcctttccgcttcccacatatatatatatatgacaccccctttcacttcttccaacgatcaggtacaggtccaacctctccatcctgtccgacgacacccatcggttcgagttccttcacaagtgcttggttctctgcgttatcaagtaagagtcctcggagcgtgaacaatgcgtgttctctgagatctgttattaaaaggtgagagaaaacaacattcagttcaaagggttcatagccagaaggaaaggagcaggtagatccgagaggagaaaggagggggaattacaaggattcgtctcgtccaaagcacataatcccaagatgacctccagtccgcccagagttctgatccgatcttgaccttctttgttattatacgaaagcaaattgagaattctgacaaggcactttcggagggatgcgaaatgctggcgggtgtcttgttttaatccttcttcatcttcggttgaaccgtctagaggagtgatgctagcgctgggaacatcagcgctggattgagtacggataagacgcggctcgagtttgtcggatagtccgagcatcactagatttgaatatgggaaatcgcgcgatgaagcaaccacaatccgtgaatcagtacgaagttgaaaaggagacggggggaagaggaacgagaaaagtgatgaacgtgtgatcagacttctcttcgattgatgagggaagaaatagaacgaaaagaatagaggaataggcttacctatactcttctcatcgaattctgcaactctcaactcgttcacaaacttgacgagctcttctcttctttcaacctccccttcggtctcgtcatcggcattgttcgtcggctgagattttgccccaagctgattgataatctcgagacatagtatcagaccttcgtaagactttccgaacctcacgtccgaaaacctcttttccttcttttcgttcttctcaggccgatcggtttcagccgagacagcagaatccatcaattctctcacgaggttaatcaaggtagtggttgttgggatcaaaaactgtagactggcaggaacgtatgtgcgatatgatgagcgggaggattgaatataagcgtccaagagtttgaggatcgttaattgagctgccgagatgggttcttcttttgatggactgtgaaattgagacatgggtaaaagtagtagtcaggtcgtatcgacagaaaggataaaaacaggaatgagaagaatgagagctaaaagagaggaacacactgttgaagagcgatgtagagtgtggaaagatgccctgcttggataatttgacagattatctcgtacctggagggaaggaagagaggtgtatcgagacagaggagagatagatttgtgatagtcagattgagcgcaagaagaaggaatgaaagaaagaggatgtgtgtgtgtgtgtatatgtaagcttgcgacgaacccattattgaaggcgaggccatcgacatcagattcgaaccagtcctctatccgccgtaagagccgttctatgattgatagcccacaagaatggtcgtttcgagtgatgagcagttttcttgaagttcgaattgaacaagggcatagttggaagatgagctctactgaaaaaaatttgaagaggcacataagaggagaaagaaagaagacctacgtcccagcaggatagacgtctgttgcattggtgaggaccatcgtcaatgcgaatcctaagcggtcatcatctgacgccaacaaccgactatgaatagagtccatcagtcttgttttccatgaagtcaaaagagcgatcaaaagaaggaccaggagtctttacattaatacgttcccgtcaaaaggtggtttcaccaattgaggaaagattgcgctcgacacgacagcattgcccgcgatcatgtttgccaacaactgaacgagcgcgcgcgtcgtcggaaggcctttttgtcaagcacaaagacagacgagccatctgagtttaactatagggagagatagacatggatatctgagaagatagagacagacaattttcattagaaagaacttcatatgagctcatcgaaaacaggaggttgtgtaatgcgttcgatatcgatctaccgataggcgaagaaatgaaggatgtaagatatcctgccggttagggttgcaggctagaagaagaaaaagggcaaaaatccaaagagaagagaggccgaacgaacaacatctttgtttgactatcctcgtttcctgccacaaggtttctagaaaatgcagcgagcgcgcctaggaagtctgtctcttctgagccaggtgcaaagctagattgagagctgatggcgtgccatgcttggaggatccattcccagagaggtaaagtgttgccaagtgtttcaaaaggcgaccgggaactgttggcgaagatttgtctgtgggtgaaggcacgatgtagacaggcagggactctgtaagctttcgaatttgggtcttgggttgtagcgtgcttgggtcatcgaagagaaggaaagaaggagagaaagtaagatgttcgaaccggtgatcagctgatttcagcttctcagcttcttctctcagagcaggagtgaatcgaatgagatctttagtttccaatgtcattcaaccaagtagtatttttgagaaagataactaagcgtcgaaagaatgaagaggataagtaggaagaagagaacggatcggttgggagtgtgtcggaaagaagcagaaggtgacgcgtcgaagacgaaaattcttattcttttctcgtcttccctcggctttcaccgaagaagaaagagccaatccatcctaccaacaaccatcccattccgatctctccgactgaaacacagagacattcactaaatgtctaatatactctccgtccttggtataccaatgtcaggctccagctcgaacatcagctctgtgccgatgtcgaacccgggttccgcaccgaatgcaccagagctagaagactgtgcggcctgtcgaataattggcggaacgacgttcatcggcataggatcctatgcggcctatcagtcactctctcttgcgcgtgctgagcgtcgggcggccgaggcattgtctgtgaagaacggacttaacagtccgccggtgaggaaaggcctaatcgcgatgggtgtcctgggtattggtaagtttctcacgttcttctcgacttgttcatgtacgggtgtgcatgaatccatgcgaatgtacatatgagtggcagaggaaaggaaggcagaaaaaaagaagaggagagaagagatattaattgattttctgtatgttctctgtattttcccctgactctcccccacttcttcagtcttctttgcggccggtgtgggcagactatctggcttgcggatgacggatggcgtggacagagggttaaagtcagatgaagcaaacataaaacctaggctatagtatggatgcgtgtgcgtgtgtgtgcctgtgtctgtctgtctgtgtctgtgcgcgtttctacaaaggatattcttgttagtttgttatacacacacacactctcatatgtgcacgtgtcatataatttgctgtgctatccaccctcttaccttcctctttcacgtgtcggactggacgcgagcacaaacggcgcgcgtacaagcgttggatttgtgttttgattatgctgtctactttgtagaatgtagagtatgctgagaacgagtgaacgaggatgagtggaccagtgggtgcatgtcgatagtgcatgtctatagtacatgctgagaatacatgttggatgtatatcaacattatggctgctgctgatccctctaggatgagcgctctatctctccttctctctgtaagagtcgctcgctcactatctaagggaaaatcctgatcgacccttgctcgccctagcgtgcgctcgttgtttgtttgtttttcttcaggcgtacagactcctcccttgtttcaacataggccaacaagggacaccaaccttccaggagagctggcccctcgtagaactaatccaaactaacagcccggttccttgttctcgtatctacaaaaagagaagacgctctctccattgtctttctctttcgtactctctctttctttctcacgcctgttcctttcgctctctctctctctctctcgcttccttctatccacgttccacggtctcttctattcttacacatccacactctcgctatctctcactcgctcactcacccactcacacatttcacactctctaaacccgttatcaaccctacatcatcatggctgacactactgaagtcgttcctatctccaccattgctgccgaggatgttgtcgaggatgcttccgaggaggtcgtcgctcctgcaattgtcgaggaagtgcccgtgattgaagaggtaagggcatatatctgtctacacactttcgtccgctcgtttcctgtcttgtatggccatactgttcgatcgcgttcctggctttagctcgagaactttatttgacgtcgtttctcacgccaccctgtccttttgtttccgggctcgccatccgttcgtcttgcacccttgcctttctcttcgacgaatgaacagtccgctgctgaggttgaggcccctatcgaggtaagttttcatgttcttgtgtttgttgaggcccaccggtcttgttctcctctgaatcaaactcgtagtaacattcctgcgcaaccgttcctcaatttgaagaccatcgctgcctcgcccaccgaggttgcccctgaggccgtccctgtcgccatcccggcaaaggcaaccactactgaggtccccgtatgtaggctcctctttactcttatgacataaggtcactcacccgatccaatcgatccatcctcttcataggccaccaagccagcctcacccaagaaggagggtttctttgcaaagtttatctctggactgaaggaagacaagaaagtaagcgtacaagatcacgctatctatcaaacctttttcgctgtacatgttgctgagaccttgcctgttgtcaatcctagattgccgctgagaagaaggctgcagccaaggccaacaagggcaagtggtcgaacgtcgtagttgtcttgggtcatctcccgttatggaaagctaactcgtcttatctttcatctttttagcagcagccgagaagaaggccgccgaagaggctgctatcaaaaaggctgaggagtcctctagcaagaagactgaggaggctgctgtcgtcgaggacgaagctcccgtagtcgccgctgctatcccgaagagtgatgacactcccgtcgttgcacccactgaggagactgccgaggccgacgttgtcgagcccaaggaggaagccgtcctcgtcgctgctgacgccccaacgcctgccgtttctgagctaaagactgtcgaatctccggcagacgtcgctctcggagccgaggtcgaagttcctgaggagacagcgtaagagcctcttactatcatgatcgctctcatagccgtggggtctgacatgatgaatttttgtatcgtgtcttgctcagtgaggctgtgaccatcgagaccgctgtagtcccgtaagtcaatgtgacttttttctttttcaaggccacatgtttcctcacgaactgatgatttgcccctctacatagtgaacctgcatctgtcgtcgctcctgccgccgtggaggagaaggaggctaagccccttgctcccaaggccgctcgacgacttagtgcccgtatcgttggtattttcaaggtgtgtcttgcgtatttcggtatgattgtagttcagttcaacattcggctcacctctgtcttgttttctctacacaagggttccaagtccccggtatctactcctaccgttgagaagcttccagagtcggcgcctgtggtgagtcctttgatctgttgagtctgttggagtctatgcaagccactcatcgccctctcttccaatcatttccctctctcgatcagattgacgccgttcccacttctgagcccctttcggagtctatcactcctgcagtggaggaggctgctgttgcccctgtgatcgaggccgaggctcctaaatctattgttgtcgcctagatagaagatttcgtttcttctgattttctcgtcttcccttcccatcaaaggagcttctgttcctcaatcatatactgttacattggtctttgctaatgagtgtttctttgttcgtatatctaattacaacctaatggcgagcacgtggcgcttttttctttctcttaacccctatacctcttcactctttcatcctacaagctcatcatttgaatcttcggctacctaattatatccatgggtgcttcctttcaattcagttcggatgaatgctggcaaagtaagcgtgtagacgaacacatggattttggacggccattatacatgtctttgtacaggcgtatagatttgatggaggcccatgcgcagcaaccgtccggatgaggggcgatggcgtcgttgaaagaggacagagaaaaaactcctcaccaccaaaggaccagtcatcaacatcacatcacatcacccatcatgttccagtctgctcttcgaaagaacgttgtcgctcctctggctagagggttttctaccgctaccaacggaggaaagaacagtgcgtatcagtttctttctgtgatgagatagatatcgtcggatggagctggacctatcagcccagatcggggtcacccatcaatttttcgatccctcttctccttttctctttatttttgtttggaaaacggagaagactgaaggaatttgaccgtgtcttctcctgcttgggcgtatccgtttcgttgttctgacttggtctgatgggttgctatcgattggattttaattgaatctgttcgtagacactccgctaagtgagttttccttttttttccttttcttttttccatccatgattctctccgtgaagacgaagtcttataatgaggtttcttccgtttgatttactgtttccttaacttgatgatctgtccgagtagtcatcgctggtgcactagccgtcgctgccggaagctattttatctacaactctgaggctggagtgtacgccgagtcaaaggacgagtcggacgcaaagccccgacctgtcgcattcaccaagtaggttttgctcttgtccttatcattttcgaacgaaagagaagaacaccttgttgatcgactgacttttcttcggataaaacgtttttcttggtcatctgcaggtcagagttcaccaacttgacgctctctaaggttgagacttacaaccacaacacgaaccagtacactttcaagttcgatgatccgaatgctatctgcggcggaccaatcacccatcttctgatggtcaaggctgccgaaaacggattgattgtcgacgaaaaaggaaatgatgtcgcccgaccgtacactccaatctctcgacctgatctggccggggaagtcgtgttgcttgtcaagaagtacgacaccggaaagatctcacctcatcttgcttccctcaagcctggagacaaggctggcttcaaggtatgttctttttgccgatcttcgttgagcaaaattcgaccgtaagaaaagcctgacggttctggctgggatttggggttttgcgtgtgtagggtacattccctaagttcaagtacgtgcccggagcactcgaccacggaatctgcgtggccggtggatcgggtattactcctcactaccaactgattgaccatgccctctccgtatgttctaagatcaccttgaagaagaagctacccatttgtgtagacgcgcatgttttaattgatatttctcctctggactacacaacactcagctgaaggacgacaaaacaaagtggacgttgttctactctaatgtgactgaggatgacatcttgcttcgaaaggaatgggacgcgctcgccaaggcccaccctgatagactcaaggtggtctacgtgctggataagcctcctgcgggatggaccggtacgttcatattcacataccttcatcggctcatttagatttcgatggataaatgactgaacgatctttataaatctacggatcaggcccgaccgggtacatctctcagcagctccttaaggacaacagtcctgccggatccgaggccggtgaggccgtcaaggtgtttgtctgtggcgtacgttgtttctctgttccctttgcctgttacatctcttcattcgttctctctctctaggtgactcggcagagcattaactatcatcttgggttgtctttgcgcgatgtgattggaacagcctcctggtcaggttgccgccatcgctggacccaaggacggtacgtaagatgttgtaaatgtctgtaaagaaactcctgggccagatagcttatgatactgtactctctcctacgtcaaaatcataggtatgaagcagggccctgttggaggtgttctcaaggagctcggcttctccgagggccaggtgttcaagttctagatttgccgctagatgttgaagatgcgtattcggatagagtatcccttgattctttgggaccatcacctctctcgtttgtttctttgcaaaccactgtatcatttgattttatgaaagatcggatatagaaatagagaacatatgagcatacgcggaggtcagacagccggcaatgaaaggagacggagagaagagaaaagaaaagaataatgaagaaggcagccgcggcaaatcgtccaatcccgcacataaaaactttttttttaatatttttttaatagaaaatcaccatcgccatcactatttctcttggtaactctcttggtaacacatctggtctatctcttgacttgatcagacaaggagaaaaaggacacagggttgcgctagactggtcgttcaatcggaaacggaagagacattctattcagatatctttccttcgctttaacccgagtgttaataaccaccggtaaaccacggggatttgataaatcattcccaattttttttaaataacatcttacatttatacttttctccccttccacatctccctttccctcctcggccttcctaccatctctaatcgagaactgtcgaggggttgactagtattcctcggtgagtcttgaatctctcttgacaccctctcgatctgcagagcgtagggccatgccttcggtctgggatgtccggaacgccatgcacacgagggaacatgatcggatgactatcaaaggcgtcagaagtttctccatcttttcattcaaagagaagaaggagagaccggactggaagatacacagatctcttgtcttttctgttcttgctactctcaatcctacctcctgttgtctttctcatcttgcccttgactaatcaagaggaacgacgtggagctgaaccttcttttttgccaccctttgtttttccattcaaacaaaaaaagaagaaagaaaagaaacaacactcgcccttagtcaacttttttttgcgcatcgactctcaactctcgcatacatccatacggtctagctcaaaggccaaatacacatactcacatacacagaatgagcttgacctcttcgcttgctgctcaggatgttgatcggaatgcagcaggttagtcctcttccttcttcttccttgcgttggctgtgctagcctaggtcgaaatgttcagaggcaccaagcaggtgacctatgagctaccgatcaaccaaagcgacgaacaaacttcaaccctcaggaagactatacctcgttttggcctcagttgttgttctcttccgaaaagaaactgtctgacatatggatctgtctgttggtttcgctttttgttgtccctttgatccctgctaccaccagatcaactcctcgacttgtcgtcctcatacaaccaatccgtcataaacactgcttcctctgacctcaccgtcacttcctcctcaacagggtcgaccagaccacagacgatcgtcaccagatcattttctacaaagccagtggcgattccaacaccctcgtccggttaccttcctcgaaagtccaggagaggaagcgaggcaggcaccggtggagagttcacagccggaagcttacctgctagcgtaggatccgcccacggctctggatccagtctgatgctttccggcatggaaaagaagaaggcaggcggaggatccgggacctcgccttatgggatgatgagaagagaaagctcgagaacttctcgaaaagggtgaggtcgttctgtggtttctttctcttgtcctggtcgatgggtagagcaagtctgactgatgtgtatctctcccgtctcctgacaatgcttctgtcttgcacatgctccctagatcggttcctccgactttgtttgacttccgacagacagactcgggatcgtcccctgtgggttcacctaggcaactacccatccagacggaaccccgcccaattcctgtcaagtcgaaccagactccttcgcccttaccgttcgtgccccagtcgttgcccgcctcgagtgaggtcatcctccaacccggagacgcagaggacggagagattctcgatccagagatcatcggaaagttaggaaaaagacgaaagagcgagaacgtgtttcggtgcgaaagttgtaacaaggtgggtctcttttaccaatgccttcaaacacatttcgaaccattgttgattggccttggtccaccttctttagatctaccgacacccttcttgcttggtgaaacatcgatggcagcactcgcctcactggaacgagtcctccaagttgcttcttagcaaacaccagcaggtccaggtccttgaggttggtggctttgccccattctgctttctttctctcatcttttctgcagaagaagactaatctcgcgtctctacgtttccaatctaggcggcgacaatattggtgcatcttcacccaaacagtgggacgtccttaccggaagacaaggtgcgttcatatcggaatgtctcgacgtccctcttcctgaaaccaagcgctgatgtgtcgtctttgtttgtccctcgtagtcactctggccggcggccgtctcaccgacatcccacccgatgccatcgatttccttcttggattcccgtcaagtatctcgcgcaaattccgccgccgcccgaggaatttcaccagccgacatttccacaggagagacatccagaagcagcgaggatcacacatcgtcctcatctcctgcgtcctcgacagaagacaccgacccggaccacgaccatgactctggttacggaggtagtgtggtgagaccacctttggcggacgtcaagcgatcatcccctcactcgtcttctccagggggtttggcaccggcccttcgagtcgcgtcggacccgatcccgatgaacagacggacctcattcggtaccgctacacttgccatgggaaacctagccttaggagcgtctccccgaggcggtggaagcggcagtctcggtggaggctcggaacacggaagcttccagccaagcagtttccaaccatccaggggtttccagtcgcctcttcattcgtacgtctcatcttcgccttccctcatgggtggttaccctctgaatggtcatcacgcccatggatcgaacggcactggttccacggtcccttatggatcaccgtacggaacatcacccgccttgcctcttccttcgtcctcactgaggaggggaagcagctttgtggatgacggggacgacgatgagaacgaggacgaaggggatgaggacgcggatgaggaagagtacgacgaggaagacgacgggagcgatccgagaaggaggttgagatacctccgttcgtcaagagttccggacgaggttgtcttggaggaagaggaggacgcagagatggacgctgagggacagagtcaaccgaaagaggtccatggcgcgtgggatatggaggacatggatttatgacacgagcgggagcggtcatctctgttcttctacttttcccttccctctagatgtcatacacgttaatttcatctttcgatctagccctgtctattcttttcttttttcttcgctcctttggtctcttctagttttccggccactagttattttctttccttacttcattatcacaacatatatccattcaacccacatccgagtttactttctcttctttgctctttctcttgtatatatttcgttggtacatctttctctcatttgttgtctagtttctggttgtaaataccattcaaaccgttatctctccttctctttcggtactcccttctttaatctcttttttttttcatctgtagagagatcttcctctcgaaatttccagacagtatatcatctagtattcgatctatacatctccgacgatacacgtctttctttttctctttctctttccaatctcgtcccttttgtcatcgctatttgttctttcttttctgtttcactctcgacatcgtcttgatccttcatcctttcgtttgggttgtttctccgggggaggaggttttttttccctctatcctttttttttcctttcaattttttctcccctgaaggatatgtagcgacggcgtgtggtttgagtaaggtatgatcagggatgggtggcgcaagacgagtcgagttgtatattctatgaacccgtttctttccgtccgtcaccgattcttcatcaaagtttgcctcggaccaggaccaggaccagaaccagaagacaaaagcgaaggcgaaggctgtgagaggacaagatgggcatgctatgactctaatctaggatgacccaacccggattggagctgtgttcaggtctgggttgagtcgggttggaaagtatgaaggaaggatctataaaacaaagagacgagacgaggagagagagggagagagagagagaaaaaaagggggaataagaattgaaaaagaaaagaaagaaaagaatgagggagatgggtagctttccttggatacacacaccggatgaggtgttcatgacgaagaacaaagaccaaaagaacgaaaatagggaacatgatggggatggaagaggaaggggacgtgagacgatgattgcgttgcgcttggaagtgcgggtgatgggatgtatgagtgcggtgtcttgatttgaaaacgaggaaggcgagattaggaggattaggtgtaaagaggatgacgacgacgagggggacaaagataataacgatacaagaaacgggaacatggaaaaagagaggttgggcgataaacaagcgaatacaaaaaataaaaataaaaaaccaaagaaccaaaagcaaggaattccatgtaagaggaaaacgaagcgagagagaaagacagacagagaagcggcccgattgggtcgactgagagccgtctcataatagcggggtccgttcgtctgtatgtgcataccatgtggcccgtctttgacggatatgacccggtcgtttcagaggttccggtgtaagcctaggtgaaagataggaagagagattgaacaggtcatgatgatgagtcagttccctaacatgtctatgaagtaacaagatggaatcaaacgagatggacgtacttgaaagcctggtgatttggatcgaagaattcatataaacaaatcagaccacagtataacagcaaagacttcgagaatagtgaacgaaccggcatgaaacaaaacggaaatagatgatcgaatttttctactcgtgactttatatcttcctccaagatcaccttaaacttgacttcttctttacttgatctacggatctgacagacaagcgcgtaggtcatcaccacgaggaggacgatggccgagatggcgaggatgaggttgaacgtgactttgaagagcagaaggaggttagcgatgaggttggtttgggaacgaagggcaaaagagaaacgtacaatcgacaggatccaacacacgtcggtcgaggtatttgtatctgggtcccattggaccgttgacatatctgcaatttcctgcgtaacaccactgactcttgacgacatcttcttgaccctgcatgctttcgcctgtgctggcagcgctccagaactcatcaccccatctgccggcataatcgaggaaggaagccgagatcggagttccttcggcgggtacgaaagtgagaaactgggtccaccaggtcgaggtggatgtgttgagccagtacgcgagatggttaagagtggggtcccagagtggacctttcgaggtggtatctgataaaaggccaaaaggtaacagatactcttgacgacttgaaagacgacgatcgacaagatgtcagttgaagaaagacgcgaataagacggaagaagggagtgcatacccaggagtaccgtagagcgcatgacttccctccgcagaatacaccaccggacgttcttcccatccccattcttttcctcgagggtgtaggttgagccccttgtcgatcacatcaaacggccagatctctccaaaggcatgctcggacaaaaagatctgttgtggcatcccttggtagaaacgaatcatgatgtgttccctaaagaagagtgagaagaagaaggaaaaggatttgagcgattcaacctcgttaaaatcgggttgaaagacagccataccaatctccaacatgatcgccaaatcggatgtcgaacaatgtgttgcctctgtgaccaagaatggaagcgagcgtgtgagaagaggggaccttgaagagaaacagctttcggtgaacgcgacttactcattgtaactgttcaaaagcgtaggaaagagaaaagtaaggatgataaagaaccagcccgagcaagagaaaaacacacacacacacacatccatgcacgcacacgaaagaacgagaacgagcttacgaataaaaggtaaagtagaacgcgtcgaggtagccctctccgatgatctcactcttgtcaacgaggatgatgacggcctctgcctcgctcctggcattgttgtctggcttgccgtactcactaccaagccagtcggcatggccggctttaaaggcttcgtccatcacgcctgcctcgagaaaaagctcggatcggttgccaaggaagccgagggtgtctggaatgagcgtgccgggtgggggtaggtttggtacggtggtccggttgggagagaatcgaagggttgtatgctctagatgagtcgaaatcttggagggccagtacaattcatccgtagatagatgaacgagtggggcataggtgagcacgtatggcgggaccggcccggacgattggggcggtatcggcggtgtgggtgggggtataggtgagggcaggctatttgaaggcacagccgacagcggcaacgacagcacgaatgccaaaagccattgatatccggacgagcggaacacaggcatggggaaaggagtagagcggacggtgcgaagggaacgttgtcgagagggaaaagaatggatgttgatggtcggaaggtgaaagagttgttggctcgtcgatggaatgttgatccagtctaagcgagacgacgctgttggatgttcatggtgctgtagctccccagtgttgttgctgtggttcgttctctcgtgctgtatcccatgcgctacgtctctctttcctatcccatcc

SEQ ID NO: 268 - DNA, 1975 bp, Xanthophyllomyces dendrorhous
ttgttcttcttcctcttcttgctgctgctgctactgccgccttagtgggggaaggactaggttaatgcactgtggctgtgccaatcacgtgaccgtgcgcctaacaccttccctgtgttctccttccgcttaccttccatccttccccccgacacaccagcagcaacagcagcctcgcactttctctctctctctccccctcatacacccagacaagccatgcttctatcagtctctgcagctctgtccatccttccggcgataggtaagagtcttttcggcagcttgatcgtcacgcctcttgcggttttacttaccggtttctgatcacacacaaaccctacacttctttgcaccgtccttctttctttctttctctggatctgtccggttatatgttggatataaaacacgacatgatgcagctctcgccttgccatcgtcatcgtacaactatccggacgaaagagcacttgctagtcgtggccttgttaagcgacagacatccattcctgaggtctgcacctatatttgccaggatattgaggtttgtgtcgccttctccccccctttctctttctctctttccttctccttctctttctcccaacctcacagaacagaacagaacagaacaggagcacatcacttccaagctcctttttgactgacccatgagctactgttcattctctctcgtctttcccttgtcttctttcctctcccttttgtaccgccccggatcggacactggacacagtatgctctttcggttcgtttcccatacttccttttgcttccctctcagtactccatcagtactctcctagctcttcccagctatgctgacctgtcttgtcccttctgtcaactacagtcgtgtggagataactcgacctgcctgtgcaacactcgcgttctgaattcctgtttgtccttcctgctcttcctactttgtgtttcaactctcacactctgctctgaaacacctacctgatgctcttggttctttcagttctcaattgctcagagtgcaccttgctcaacactcagcaatctaatatcaacgtctccattctatcataccagtactcgatagatggtctgtcctgctttcctccttttctctatcttctccttgctctttctccacttactcaccaagagcatctctacacagcctaccgccaatcttgcagtatgaccactcctacacccatcatacttcctaatgtcaccgtcacccggccggctgccaatttgacgttccctactagcgctccttccaaccagactggcaactcgacctcgcactcctcctccgtctcctcttcgcattcctcgtctgtttcctcctcatcttcttcatcagccctgccgtcctcttcgtccatgtcttcgacaagctcttcctcagcctcgatatcacctacagtgtcatccgcagcagcttcgtcaagcacgtcggccatatctggagcaaacatacttcaaaccggatgggtcaccggcgtcgtcatcggtctagctggcttagccctgagcgcaagtctgtaattgcttcttctttttttttcctttcctctttctctctttctcacacacctgcaagtcattggacagtttccgttagaatcttcctccttcttgttctttcctgcttgatttcttattttatttttccccatctcttctctatattatatttcatccattttttgcttggcagaaggtctcgaaaacctggacgattccccctctctcgatctcctttatgctctttcttcttctttctacctatttcatccattcatagatcaaatcggatcctcttgtcttttctaccgataatgctctttgtcgtcttgatgacctgactattcggtctcatctgaaagccagcaaagactattaatgctcagcttcccttcggataaggtgagttcgagagtgtttacgctcaacaaaaccatac

SEQ ID NO: 269 - DNA, 40681 bp, Xanthophyllomyces dendrorhous
  misc_feature (35941)..(35950): n is a, c, g, or t
acactatagtcatatgatacaaaacaacacacgatgaaatcgggtcaggaagaaaacaaagaaaaagaaaaagaaaaagagaatggcgatatcgaatatctaaaacggagaggaaaagttgaactctaaccaagttgacaaacaaaatctctacttgaactatacatcttcctgatcgtcatccgattgctcctgaagtttcgcaagtccatcgttcacatcatccctagcggcctcaaacacttcaaacatcgtcgactccttcctctgcttcttcttctttccttcttctgcttcttcttcctcctcctctttgatatccttggctttcgagtcggcacgagactcggtagagttggactcgaaaccagagccagactgagttttggagccccaacctagagatcgggagaacgcttcgggagacctgtcaagtaatatctccaagtcttcgtctctgttttcccccccatcccctcaagaacaaagccaggcagggattgagttcagcgcgtatgttcaagatgatggaaggaaaaaaagaaaagaaaaagaaaaaaaaaaagaagaaaaaagggacgaacgcaatgatcttgtcacctgcgtcgacgaggttaatgttatcgccctcaagtctcaataaatcagcagcttgttcatgagccgtctgtttcttttctttggtagaataattccctttgaatttcccttgggcgatgacaagagcttccaaccggcgtttggctcctgctttctggaggatctttgtctcaaccgtatgagctgttaccagacgaaagaccaggacaggccgggtctgtcctatccgatgggctcggtccatagcttggagatcagattgagggttccagtcctggtcgtagaagatgacggtatcggctgctaccaagttgataccctgtacacgacacgaaagtttccgatgaaagcctcagaaacaatccacaagcttgagagagagaacagaagaagaaaaaagcaaaaagagacaaaccaaaccacctgctctagtagagagtaggaacagtcgacaaactccatcttcttcgccccctttattaaattcctccatctgttcccgtcgacggacttgaggcgtacttccatcgatccggcatacctttagtttcttgtattcgatagcccagtcttcaatgatatctagcatgctcgtgaattggctgaacagtagaacctacgcgccatgcgaatcaaaacaggagacgtttgaggaaaaaagcaagtcgacgtctagatcagatagcgaatggagataacaatacggaccttgtgtttacgctcaaataaagcatcgagaagtcggttaagaaggagcatcttgccagatgcattgatgaggtctgtattgacaatctctgatcccgttatcggatcaataggccagtcaaacaagaacggatgagaggcaacctattaaaagtcagaaaaaaagaaatgaacagcccattcggaaggatacaggcggtcggaagggaatgagccttctcacttttcggagttgcatcatggtgttttgtaaacgcatgttgtttacggattttcctgcatgacaatcaatcaatacctgtcagatcaacgaccataggccaagaagaaagaagggcgatgacgaacgggctgctttgttagagtactccttcccaatctcaaatgccgagcgggtatcttcaggcgctccttggaacagaccattgtcccgttctttctccaattgcttaaagtatttgttgtcgctttcgatctgagcatagtctttcttgggaactctgttcagtcgacgactctttctggggttggcttcatattcctgctctggttcctcttctgactctcgagtctgctgcccatcgccatcggcagcatccccgtggtcatcctcattaacatgttcgccctgggtctcccccgacttcacagcaatcaaaaactctctgatcgtcctcgcggccacactctcgtacaactccttttgcatctttgtcaacggtgcgtgaagaaggtactctttctttggaggtaacgacttctcgacgtctatcttgagtcgacgcagtaggaaaggcttgaggattgaatgaagggtggtgacaattccggtggattgatctgatgtcaacaaggacgtcttggattccgaacgggatttgatatcggtgtcgagatcgaacctgagaatatataccagtagatgtcagctggagtttggaaataagggatcgtatctgtcatccttcatcaaacttgccattgttgaaagctatctaggtcgtcgaaaatctttagggtttgataaaggaaaggagagaaaagagagccgcgacgatcagtctatcgacgaatatcatcaatatcaggttgactgttcgagaaacccaatcgacttacatccggaagaatgaaattcaacaaggaccacaattcactcagattgttctactctcgccaatgagatagatccgggcctgtaagaacgcgttctcgtttgaactcagttcaacagaggagaaggacttggactaacgtgcagaggagttccactgagaatcaacctgttggcggtgttgtacgatttgagctcccgtatcaacctatacgagagaagcaacatgtttagcaggcgtccaaaatcgggagctatgaagaggatactcacttgcagtccatgttctttaatcgatggccttcatccacgacgatatatctacaagatcatttcaagaaaatagtgaatacccaatgacacaaaaagttctcggcggtaactcagacaaaagaagaagatatcacctacttccattggaagccccgaaagaaagcactgtccttcatcgcgacttcgtaactcgtgatcaccaccgggaaggtcttcatcgtgtttggctcctccttcacgttcttacaagcctgaatctttgccctttgggatctcgatgcgttctttggcatcgtcacacccaaaccaggaattagtttaccggcgtaggcggctcctttcgcatctgagggagcagaaagccgggtcttgcgcaacacagaacgttcttcgggagtacctagtacgtttgagattaagtatggaaagtcagagaagaaagggacaaagtggaggagggaaaacacaaaccatgatactgaatagtaggaatctgagttgtcgagaaggtgccgagagaaaacaaaagatggagacaggaatctcaactacatcgctcaaaaaggataaatcacacaaagcacagtgatagaggagaaacgtacgtcgggtgtgaacttggcaaactcggccgaccaattgtgcagtacactcaatgggcacacgatcatgaacgctaccaaattagatttgaacatgagtacgtgggagagaagactgattgaatagcagtctaagaagactcacgtccccaaacacctttcgttcgcaggtgagcgatgaaagatatagtctgtaatgtttttctaagggatgtattccgtgaaatgatttatggacaaattagatggcaggatacgactcataatgatatcaacgagacacatacccaagtcccatctcatccgctagaattccattcagaccattctcataaagcgagattaaccattgaagtccctgaatttgatagtctctcatcactgctccggttacaagcgctggttgtccttctgctaattccggtgggtccgtttcgttttttagacttgcagagctaggctccattttgagctttttcgacccctgtaagaggtggatatgtacgtttaagaccggaagatgataactataccaaacagacgcttgtttacggccacagagatatgatttaagggaaggatgcactgacatttgtgtttgtaaccttctttcctcctacagcctcttctaaagcctccaactcatcccctgcggcctttcgtttgataccagcggcattgcctgccggcttctttttttcctttgctccatcttttgcggtctctttcttaagcttagagcttacagagctctctgcatttcgtcgagtcatatgttttggttcgacacgagactcggagtgagctttggaggtggccgtatttgcactagcgcggagtcgagcttcttctttcattcggtcttgacgctgtctttccattttgtcttgaaggatctgtgtatgtggcaaagtgctcagaatcgaaacaggctggatacatgagaagagagaagaactcacttgggtatagattcccgattgctagaaaagattgaagaaacaaaggcaacgcaaaatgaaagattaaatcgttgttagggtgcgcgcatctatcgatcaggattcttaccaagccaactttctttgaaaaagcaaggaacgacagaacgaaccttgagaagaaagtttagtcgtcccagcctggatgatttttgttgctacacgattaaaaggacaggtcgcagaaggaagaggaagcgacgatggaggaaaatccagacaagagcacacgaaagacgcgtgttaattatcaacacgtcattcttcaccgacgcgtcctttcgccttccttttccttttcttttctttgctgccccaaagcgaacgatactaaaggacaacgagcaaacagacgaacctcttccatttcctggtctgcatctagatcgttcgtgggtttctctacctctccgtcatcctcatactcctcgtcgtcgtcatcggtctgtttgatcttatcagccaaccgaccgggagaaaccgatagagaagaccctcggtcggctggtgtcgacggcgagttggtcgttttcgttgttgccgtagagagcgcaggagtagaagccattaaaacagactgttttactgattgacactgaaaggcaaatcaacagagagaagctagagagtgagtgttagtgagtatgaatcgatttgtttgagagtacaagtgtggtgctagggtgatcgatcgactcttcgatcatggtcacgtaaccatccgcacgcgtggttacggtcgtctggtagccgcctttttctccttcctgccttgatctctcatcatcaccaccgacctcgaccattgacttccttctctttctctctcaatctaatcagcaataatgtctggaccagcagcagccggtgggtcttgtttggattatgtgcttctgctctatcagagattctccttatcttaacaagaacttggctcgtttggttgtatctctagccggaggaacaaagttcgctcggttcatgaaccaccctgccggttcgtatctccctcttgtttcttcccttctctttcttttgggctcgctttgtttctatctctctcttgttcacctcagaaatactcacgcgctctggttctgttcgctgttggattgaatttcatagggcccaagtaagttttcatcacaccgggagaacttttttctagccgaggacatttgtcggaatctcgtccgacctagtcattgcctagcacctactctaacccatcttctctctcgtcctcttgatcatccttttcgaaccattttataacgttctgcgaatctaaaggaccatcttcttctgggctcctattgcaaagtgggctcttgtcattggaggattggctgatatgaaccgaccggccgagaaggtctccgtcaacgccaacctgggtatgtcctcatcttgcttcgtgttctcttcctcacttgatttctgagctttccagacagctgagaacggttgcttttcatgatacaattcgaatcttgaatagctcttgccgccaccggtttcatctgggttcgatactctttagtcatcaagcccgtcaactactctctcgccgccgtatgtcttgccgattgctccttatctatctgatactctggtcgccatacagcaatctgacgccaatctcgtggctcctctcattcttgttttgcaggttaacttcttcgtcggatctaccggtgtggctcagctgtaccgagtctgggagtaagctttttctattatatctccgatcaactaaagggaaaaatacaataaaaaagttactgacttgatcaagttgcaacttgctcatcttcgtctagttggaggcgtaacaaccctatcgaggccgccgctgccgacaagatcaaggaggtcaaggcctaaacgaccgaactggcctctatcctttgtcttttttgagtttctagacacaatctgtattctatcttggccttattctttcgatttgatgaaactctaaattttcttctcagaggtggatcatcgcacaagcgaaagaaccggggctggttccagtcggctcttctcatatttgatgcttattttttgcacttgtacctccgtggttcacaactagcaatcccagctttggtgaaaaaagccgctcagtcgcacaaacgcaagcgaccgtacaacccaatcttccgtgtatctcttcagcgtcctacgaaaaggttcagcatgctaacggaacttaagcgagcatctcaggattagaagacacgggttcaatggtgagcatatatacgatgatggggtttgacaaagaagaggaaatatgatatttagtgggtgatatagggtgtagtatgtagaatgcgaaaggatgatgaacggaaatgaagtcgaatacacatgagtgaatgtccagatgaggaagggaaaagacaagggtacggatatctatcaggagaagtggtgacaagccgatgcaagaagagatcgttgccaaggaatctaagaaaaatccccttcgcgtcaatttaaccgaggagatgtgggaattgcaggagttgaactacgagtgatgcctatcgaaggtgatttcttcctgccgatgcgagtccccatctggaccaacgtttccagagaagcttgacagtttatccgtactgtgattcgtattgggtagctttggttagcctgcggagttcgatgtgcaactgaaaagatacaatatcgctcacaatcttcatcccactgaacagcgccatcctcaaggacgagaacaatagtagatccacctagtatatttcaagcacacacaggatctgtgttagactgaatgaacgaccagccatgtaaacgataagagatactgaccaaatgcaaagtacccaaactcctgccctcgaacgacagtgtcgccagactctacagtgtgcacgatggttcccaccactttacagaagaaaccgattccgtttctcgtcaatcatcgagaaaaactagaagagtcacagacacgtgaacaagaacatagaactgactcatagctccaacgcagatggcaaacattcgtccaaacgtaggcgagtcgatcgggacgatcgtcctgacattctccccgtacacatcaagctgggttcggatggcctgagggttgacagtatagtacgcgccttcgattttttcgatctctcccacgaccccgtccacaggaacgctagataaccaggacgataaggagaatgggttagctgggaatcggcagagtatgtgtgaattagggatgaaggaaagctcgtactggaatcggtggtaatcctgtaccaagtagaacatcattatagttagttgaattctgaacgcacagataatagaacatgagatagaaacgcacctgaggagctaatcggaagacagcaacagcgcccccgtcgtacctgtgggcctcctttccataccgatcccctaaaagtcgctcgattgtgaacctattcaatgatggcaaccatgtacaagtcaacaatcacataatcatgccaaaaataattcaagtaacaaccgacgaattactcactctcttcccttgatccagatcttcttagcatcgcttacagtgtcgaaagccataagacgacagtcggcacaagaaaccagcgtattagggtcggtcgggtcactgacagggcgcacttccggctttaattttcgataaaagaactgaaacaagcggaatgtcagtcacatccgaaactatagatatcgttctgttattctatgtagatccaacttacttcattaaacgtttctatgatggtaagagtaacaacgaacagttttacaagaatcaataagtatctactcatacagtctactgaggacttctcctgacaagactcactgaatgaatcaagaggatccagaatttctataaaaacgagatttctcaacaatttagttcataaaacgatgaccaattcagataggcgaacgcatgacgcggttcttaccatccatgttcaaccgatggaaagcaatgaacggtgcgatatcggcgactgattcaggcgagtcgtacttgatgccctgcttgaaggacatgttcttgagaagccttcgagctggacaggcagaggacgtcacaggacgtcaaaggtcaacgtagtgcgagcgagagcaggaaattggatggacacgaacctcgaccaccctccatacgcgatttggcgcccttgtacaacactcggattccaagtctgacatacacagccatcttttcttcaagtaattgacctgtctgtcggtcctggacgagaatgttggcggaatttgcgcctgccggaagagcgcgcgtaaacaagatgatagtaagtgcggattaatcagttctatgaacaaaaagttgagataacgggtatctaattaaaaacacgaaccaatttggtaagcaccgctcgacaccttggtgaacactttggtcatccacttccgttgagctgagaatgaaccaacatgcatcagtaagaaaagagtttgttgcggccccagcatgcgaaacatgattataccttgcgaagatgtaacgtagttgccaaccagaattctatttactcttgcccagtctgcactagcacagacctgaggacgtctccaatactgattagtgctcaagaaacacagataccgtttgatagcctgcaataatgatgaagagatacatactgccagatgagtaacaatatccacctcagctctcttgctcagtctctgtcggtggcagagcggacactccttgatgttaattaccctctccaaatcactgtccggccctagttcttcttcttcttcattctcccgatcgtcatcgtacgggattcctgcctcgtctgtcaacggaatctggtttgtttccgacgttacctgatccccgttctgcgcagcacttgtcagatttaccttcggtatttccgctgaaggctggccagcttctggaccagtgacagagagagagatcgcgtggtttggttggcctttcttatcaatcaaatcgagagaaggaacatcggcagtattgggagtttcatcactgaaactcggtgattcttctaggccgacgtgcttcttctcggttttggtcttcttgacctcttgctcgagggatttaataacctgttcgatggtaagctcgtctttctcgggatcgagtaagtatgacgtaaagtagctttctaaggtctcgtctgtaagagtcgatcccagagagtcgagcatctgaggtacaagaaaagacaatcagaagtttagatagccgtcgacgatcaatcttgcgcatgctcgtccacttacagcttgtaactcagtgaagctgatcttccctgagttgtcatcatcatacgatttaagatactctcgccaaaacttagataagacacaagtcagtctcccgaaagcgtcactgaaacctatgaattgcgttcaccttctgtcgcaatgcatcgtaaggctcgtacctaaataaggtcatagtcaatatatatagaaccaccaggatataacggagaaaattacttactttgctcgaacggtgatgctaggcttgtgcttggtctcccaacttggatcttgaggggtggatagttgaagctgggcatgacgagcatgggaaggacataaggatcgatataaagtgtctcgctacttaggtagcctgaaaagagggaaggaagaccaaccttgaactctctcatcgcatgttttccatctccttcatgcaatccagtattcgcatcaggttcaggggagtctgccaacaactcagacagaggaagcgtggccaccccgacaaagtcgtttcccgagatcttgtcccagtcgagaatgttgaattgaatcacgaaagaagactcaaatttctttacgtgaaatagtagtttttcgtcccaaacaggattcaatctgtagtccgatagaccagaacacaagtcattattgatctgtttcagagtcagaatcagaactcagatgtgttgttctatacgtacgagtgtcgaatcactcgagttctgaacactttcttgccgaacgacgtgacaacgaaaggctaaacgtgatcacagaccatcagcaaacaaagatgcgatgttagtcaagaaaacttgaaacacatacatccatatcaaacccagttttcaggactgataggaagaaagaggcatcagaaccacgtgcaacaactacatgagcgaccatattggagaaaatgctgctgtaccaacagttcttcagcctcggtaaatcttctgcgctcttgatttccaccatggcaactcctaggatatcgctctgagtagaataactccaattcttcttggcgctactcttcttctctctttttcttctggatgctctggacacgaaagatctccctccaggcgtcgccgcgactgatcctggtccctgaccctgtggatcgaagtatcctggctttcttccaggcaaaagcttaccatctggtgagagcgtaagtccagctatgggagtagatatacccgaaggactcaaagcgggcgaaatcgctatggctgatcccggtgtcatatcgctatcgtcctcgtcgtcgctcgagtctgaggaaacgctcagcccatcgtcttcttcgtcttcctcgcctgtgactgttccaatcccttcgaaggcggggaccgaatggagattacgttctgaagcatgtttcagaaggagtgtataaacctcttgaaagttttgcgaagagagtgactcagaggatagagtgttcggcgaggtggatgaaaggaaccctatacggaactggatggacccagtggcttgagtacggctacgagacgaggcaagagcagaggttataggctgaccgtaggtgtaggatgaagattgagtcgggtggctatgattgaacgtgtgatatatcgaggctgtacgtacgggtaattctggatcccatgcaaccgcctttccgtctggaaaccagtgctgcacctggagagcggtttcacccaagtattcctttcgaagaatatcctgctcattgtagtaacagatatggcgttagacagagaagataggggactcagaaaggccttgatgtatgaatatacttgccttgtcccaaacgacagcttccaaagctccgagcctatctattaccgacccgtaaattggaaagtcaaacgttgactcattactaggaaacacaggatccagcgtttttttaacaactggagttgtctgtcgatttggtacaagggtcatgaccacgaatctaatcaattaaaccctcaaaaatatcgtcaacctcaggagtctagccaactcgggatgtttatgcacatacgggtcgctgctcgtccctttcttgtctttgcctagcaagtcgcatccgctgattacttgaactcgaacaacagcaattgggacctctgcaacaacatcagaaccaagacgtgggtttaaaatagcaaggttcaatgtcagcctcggcgatcttgatcgcctttctctttccttcgtcctcttcgatcaagactagtggtgaagtatgttgaataggtgaaacacaaaccatctgaacaaggctttgatttcgacctgtttgagctgacggggttcagatgtttaacgagccgaataggagccattatgtttcttcgctatcgttgagatgaggagcgcaaaagagatagatggtaataaagatcaaaattctagttgtcacagccagaggacagaggtaaaggggtatgcagtattggccgcggaggaaaagaactcacccgcccatgagtcctggagaccttttgatccaaagacatgtccagtgtcgtttagactgtttgcgattctaatcagagatagctttgtgaaggagggtggtgaatgatgagtggtgtgaagaaaagatgggatggagagagccgagtgcggaagtgatctgggggacgactccgaagatggacattgtcacccggccggtgtggcgtccggtacagcctacacatccgcttattgtaacatagccattgattatacatgccaaacctcaacatcgaaataactttcttcatcatatatctttacaatcaacatcttgactttattttccacttgatcgcctgcttgttcggcttgtccggcgccttttctcccttctcttttcccaaaaagtagttacgatccactaagaacaagccggccgtaagtgatgttgagaattggtttcagtaagccaagatggtagtgcgattaccagcgagacgatgagacagaaggagaaacgtactggctgtcgcaaagatctgcccgttcaacatctggtcatacatctccgtcactatgataaatgtatagatttaagcccttggttagaaaggtataggatgtaggcgatatcgagtattaattgaaccactcaccggtctggcattcccacctaaccttaccagatacttcatcaaccatggtaaagaacactcgctttatgcccgctctgtagcaagtatgatagtgatgagaatagccttgacgctgaacctctgcaaccaaatgtggtcaactcactctacgatccatccaaaacatcgatagcatggcctgctctctgccaaagcccccgatttcgttacacgacaaacactacaagaatgggttgagatttgatgtcaatttcgctttgtatgatacaggatagatgtgtactgtagcacatactaaatatccgctccgtacgttgatttgccgccgtccgctttggtccgacggcacgctactcgaatcaagcattgttcacaaagtaagtcgagagtatcttaagctgctttagaggggtaaaggtgagagcacgtacagaagctaggacccctgccattcttctccttcaaattcaaaaggatcttttttccaaaagcgaggttggacatcccactcttccagatcatcagcggtcccgtcgatctctcctccaccagcagacattcctccatcgggttgggcatgtcgtgatgatttgggagagtcaggtgacgttgatcgagtgagtggaggagactgtcggaaaggagcagaatgagacatcattccggatcggccgctggaggcattcccaggtaggagcagttaagatacaggacatctcggcatgcatggagtctgatatagtcaattataccaagaattgttgttagacgatgtctttgacggtttagatgagaggaaaaacaaaaaagggcaagtaactgacgctgaacttctcctccgaaataagtcctccgttgattatgacccatggatatgatttttccgcccttgacaatggcggctgcatgcttgtggttgaggtcactgttttcggtttcaacacaatccgccatcaacatcagaatgagatatacacacggcttgcatcagagaagagcggtagaaggaacaggcgaacctgttttgagcctcggcgagaagaagggaatgaattcgatcggttcgagtcatgatgctaagatgttacaagattgatgtgtgatgctgaattgagatgcagataagtgtagcttggtcccgatcttgatgagaagtctcaatgggctcttgtgagtatgcaaacaaaggaggagagaagaatggacctatagagttgtcagggataggagctgggctggtaacggaatggttacgagatggctacgtgagatgtaaccgctcaaaggatctttgattttgaggaacaagttcaggctccttggacagagaaacaagattgataaagtcactagggaacaaggataatacagggacgagggaatgtgctgagaacaagcgaataagaaaagaagtagaaccaccaaaggatccaggcttgggatttctatctacaagtgtccgagaaagcctgtgttatatgtggttcttaggctctagacgcgtagtacagaatatactggagcgcaaaaacatgctggagccagaaaccaagtagaagtggaggattatgagatttcgcgtcacagcttagaatcacgtgtagttcaagccacatccctacagattgttagggtttgcatttgcttacgtcaccatacctgcacacgtcatttctattcattcgatcgatccgtctttacgggctcataaagcgtagctcgactaaacgacgagtggagttgtggcagaaagagggagtgcgtgtgtgagcgactactcctcccgtctgtttcgcttgaacgtctccatagatttgtaagcgaccgatcgagtgccactcatcctcagaggatcgatctgtagagaagaggccaagaccttgtgcacttccattctatgttctcactgactgaacgatcgttctacgatcggcaaagaattcatcatcctcttgagaggcaaaggagacatatgttatataagatgacccactaatcaagctctctgaacattgccaaatctcttgattgttcacttacccattcaacctcatctgacatatcctgctcaggatgacgttcacagcatttcagacgaccgctctaggagccgccatccgggtcctttccggtcgaagattactcaaatattctgatgagaaggaagtacccgaccattggcttcatccaaatgagaatcgacccagatttattactgcactgagacctaaggtcaccgttcatatgcccagagcgagtcaagagtctgacatgactagggttgatccagaggctgcttcccatcacaacaacaaagcaggcaagggaaaggaagagaaaggaaaggacggaaatattgtcgattttgacggaccagatgatccggagaacccattgaactggtcgacctggtacaaatgctttgtttgtttccaaatctctctgctgacgttttcagtctacatcggctcttcaatctactcgcccgctctcattggtaccaactccgtcgcgtctacattcgacgtctcacaaacctccgccctcgtcggattgactctattcgttatcgggtacgctatttcgcccatgatctggtcgcccatgagtgaaattcctagaatcgggagaaacccgatctatattggtaccctcgtcattttcgtcgccatccagtttccaactatctatgcaaagaatatccacgttcttctggccatgaggttccttgccgggttcttcggagcaccggttctagcaactggaggtgcttccgtctccgatctcttcgcgccaaagtatagagcctaccctttggctgtctggggactgggagccgtttctggaccgacattggggcctctgctcggtggatttgccttccaagcgaatggatggtcgtggacgatctggttcgttttccattctctgggatctattgatgagcgcaactgaattcaatatgcttatctctgatgatattatacacctcttctggtcccattctcagggttctcctatggctatctggcggagctttaatctttttgtcaatcttcctacccgaaacctcgcctgacaatgtatgccgccttgttccttccccagatgtataatctctacttgttcggttcctgatcatcttaccatgttggctgttgttttaatgtcagatcctgtacagaaaggctgttcgactgagacgggctaccggaaacgacgctcttcagagccagggggagatcgaccttcaaggtagttctgtcggcgccatggtcaaagacaccttggttaagccatttgtcctgggcactgagccgattgtgtttgcgctgaacttgtaagctcttagaggacctgttctgtctatccttactatgtctcgagtcatgacgcaagcgctggcgtcgacttatagtttctttcattctcatgtctacctgttacaggtacatcgctctggtctatggaatcttatacatctggtaagaatgatctctctctttataaagaaactttgcttattcaaatataacttttgctgatcgttatgttcaactcataggtttgagagtttccctctggtctttaccgagcttcatatgttcaactccggagagagtggattggcatttttgggagtgagtcgagggaaattcatgatgtaatgttgatggactggaactaacatggctctgcccctctgtctttgtgaaatcgacattggttctgatagatttttgttggagctgtcattgtatgtttctttagctcaacttctgattttaagttaaagggcatgtatctgacgttggctgtctaccattggattcttcagggattgatcggatatgtcgtatactctaagcttaagtttgagcccgagtttgaaaaaaacgggaatgggatgatcaaacccgagcttcgcattcgtgagtccttcgaggggacagatagcgaaaactagtgcataactgcttacatccatactgtacctgtgtctcgccaattgggtagccgttatgtgtgttggagggttctgtcttcctatctgtctgttcatgtttggatggacaggacattcagcatcgattcattggtatgtttaccctgtacttaattacaagctaaatttcgatgttgacagtcgatgcgcttctgttttcttaggattttgcccatcatcggtaaataatgcttgctctcattcgatatttgttctggaactgaactgatatggtttctgtcattaggttctagcttctttggtatcggatcgcttctcctcttccagtctatcttctcttacctgaccgacgcctaccccaaggacgttgcttcaatcttggccggtaatgaccttatgagaggtgtgtttctccctacatttttgatctcatattgttctcttgctgaaagcaacaatactatctccgcgctcgatcttcaggcgctttcggtgcagggttccctctcttcgccaacgccatgtttcatcatctcggcattggaggagcctcatcatgtgagtcgttgtctagatatacctgtccccttcgtgtgactctgtctgatttgactgtcttttatgaaaacattctatagtgctcggaggacttacttgttgcttcgttgcaattcctttcgtacttctcaagttgtgagtatattttaatcacatttctgatttgtgattaggtttgaccgaactttgttctatcgattgcagcgggtccaaactacgacacagtagcaaacatgctctaaaggacgaggatattgaggcataaatttcactcgtctccacctacacctagaagtgctctatcatactcaaatactctaatttcctctatatctaattcggaaccacatcctgtggctgctctcttatctatttataatgaagatgataattatttaattcattgaaacacgatgagtttcgaatgacttgtgtttggattccggtagtcttgacatcatttcggccataccttatcatttttcctccttgaggcaacaccctcaggtcttgcgcagagtcccaagcacttctctccgaggagttatgaaacgtgacaactcttctctatcctccttgtttctcgatcatgttactgagacccctgagcggtgtgtatatgggtttgggaaaccagtggggacttggttgaaagcaagtgccacagcgaaagtccacttttcacccgtatccgaaaaaatactgagtttacctgcatgtggctcgatcagacatgtcatctgtctttttgtctctttatctgttcatgtctgcggactgtagagcctttatcaggtcgttcatcatggccgacggccagtcgggtcgatctaaggcggggggaggaggggtttcttgcaaacaaacaggtgtcggtctcgacagcttataagacacaaagaagtcggagtgatgaggacaatcgtccgcgttgaacactcatcggtggtgttggtgtttacctctgctgcctctgctgctcttgctgacctatcgatgagggacaaactagatctatgacccatgaagtttgggtggtttgtggtctaaggctatcccagtccaaaaggaccatgaatcgacagccgttgattgaggttacccgcaccaagcccaaggcttatacttatagatagatagataagaatatcgatgcttacttaaccaatgaagcttgacgcgtttgcgacgtgttcattctggtcgcgtatcaaacgcgtcatctaatcctgcttctcttccttctaccaatcaccctgttcttcatagttttcatgaactttccacatccagttctctcggatgagcatcttccttttcccctagtcccgctcatcccgtcgtcatccggttccggttctctgatcgccttcaacggtcaacatccgacttcaccggaatctacatcaaccaaccttactagccggtcgctcaaacccgaagcagaagactttgacaagatgctagatatgttggggattgcagatgatacagcagatcggaaaaggtttactcaaaagaaggaggatgtatcagggagtccctcaaaggatgcgacggcaggaaaagttaatggaaacgtagtcaaggaagacaacactagagagggaaggaatagcggagtttcacttagcttggaagtacgtccgttgacaacgaatcatcatagaacatctcgctatcacagtcaatagtagctgaacatgtcttctctcgtcattctaacctcagttagaggatcatttttctcagatgtgtcctcctgccgaggactccaaagtgcagactcgattcgtccgtcatccgtccgcctcatccacatcctcctctcaatacctgaccacttcgtccgaacctgtgcgattaacctcctacaactctacctatccttcttacccagtctcttttggctcttcagccggtccaacatcatatcatcgaccacactcggtagcgagcgatgtaccctcactcgacgaaaacattttttcaagatcatattctagtccgaggtcaataacctctcgaagagagaggcatcagtcaacgtctagtaaattgccctcttatagacctcccaaatcaagctcaactcaaatggctctcgtgttgcaaccagaaatgagggaatcagacgaagctcggccttctttgcctacgtatctacaatccccgatgcaggaagtattcttcaagaacaaagtccccgctagcggcaatccttccgagccgatcgtcaactcaaatcctctcgcgcctcctgatctaccttctttggagcccacgcttccttccactcaactttcctctacttcgtcctcgtcttcgtcttcgccatctctatcttcatacattgaaccacaccaaccgactcgctcaactcacttctcgactttccaagctcatactgaatcttctcaaacgactcataactctgcatattcacctcccaccttgtcttcctcccgccataataatccttcttccaatcgtctgttcaagcccaggtcgatctcgagtatgacactagagggcgaccgtccgtcgggtcgacacgctgctcgaagtggatctactccaaggagcgcgaaggaaatgccacagcaaacctaccaatcatctataagagggccatcacctaagcggagaacttcagtaagatcgctcagatatgaggaacgagaagatgaatacgaggaggaagacaatgaggacgaagatgagcaagccgagagcacagaagagcatcaagagtttttagtgagcatctcctagtcctgatacttattttggattcagaccgacaaagcttacgcgtttattcgactttgcttttttctcctgactcgaatgccacgtccaacagaatcggcctttaggattgctggcactatctcatgcgcttgcagcagcgaacgaagaagtatgttttccgtcttatcttcgcctttgccttctctttatcagtttcagatgtattttgtcaatcaggatttacagtgaagtggttaattttatacgtgtaggtcggcactcttcgttcggtcgttagagacgtcaatgctttagttaccgagcaagctgccgtccttctgaccagtcgctatctacctaatcaccctcaccttcttcattcgaatcccgtggcttctccttctccctcttctggagatgcacatctggttagagagacggggcatagacttagtgcgggtatatcaaaggtcgggaggagagcgagaagggacgaggactggctaagcttatcgaaggaggaaatcgatgagtttagtggtgcggatgctagaagggttctgaaggttcgattcttctgcgttgtccttgctcaacctcttggtctcttctcttccttgtcatctagagagcggtcgactgttgacactcccgtctttgaaatcatttctttactcgttttacaggcaatcacatccccgcaacttgggctagcatcaaccatcgccttcctacgacacatcgagctccgattgaatcctcttcttgaaggcgcgccttctagatcggatgacgacgtgttctcgaatgagagctttcagcgaatgaataatgtgctggacagattgttgttgggtcagcggcaggaaaggagttagacgcgaaggttcgagaagattggtgaacagaacggttgattcatatgtttcgtggccttttttggataaacttctttttgtttttggtatatagtctctgtcggtgtgtcttcttgtatattgcctctgcttcggtttttccgatcatgtactatcgtagttgtatgtgtacgccctgcctttgtattttactttattacacctacttctaatcaatcggtttgtcgattctgagacgaatctaatggattggcgttgatgttttccccaggaaatgagacctaggtagggatggtgggtagaacgaatcaacttattccactcttgacccactcgtcgtctccgaacagtccatcctggttgtcttcctgctctcctaactttactctcctcttcccactttcactcctattccctgccgtcgcccctgcttcatccgattcactctctggacgagatcgttttttacattctgacatgatcgattcatcttcgggtgccatcaatccgaacacgcccgattgggagatcacaaaatctctctctgcgcgtctagctctgggtgagaacacaacggtcgcccttctgatcaatacgcctttttcttcgtacatgataggtccagactcggcctgggtggattctgcctctggagagacatattgatcgatcgaccggatttcttcgggaagcgaactggacgcgcaccgtcggttcgttcgggacagcatgatacgcgtgttgatagaattcgtccagactaaacctagtgaagcctctttcgctaggtgagggctcgatccgttcgaccattttgtttgagacttgtatcccagttgaaacactttgttggtgggcgtgagtgatttcagatttaataaagtttcttcgtcttggtatttagatggtgattcagaaggttggtcgaacgcgtaataagagttggattcgttcgaccggacgtcggtcgtccaacctgttgatgaaggtcttggtccttctgagctaccaaacccccatagtgtcacgaaatcaaacacgtctgagacttgattgacaacaacgacagctagattgtgctgaacggcgagcgatcgaagtttgtctgcagtggtgcttagagaggcagatcgctcggagagactcgagaccgagttggtgaaggacgaccgggtcaacgccgccagagaatctaacacgatgagcttgagagggagtggagaaggtttaacggtgaaccgaggcaacggacgaacggactgggagggtggctgcttagaatcgaatggagtggaggaaagacgcgacgctaaattagggacgagataggaaagtgtgtggtccagtgcttcaatgtcgttgcattgaataaaatggatgttgtcaaatatcgagtcaagagatattccttgagattggaccagttcaggattccgggcaaggatgccttctgccagggagtagagacggcttgtcgggagggatccttcggatgagaggtacgcgactgacccacttgcctgtgggcatttggacgaaagagtcgggaacgaaaactggacagagatcgccaatgatagacaaagctgagtctttccagtcgagctaaaaaagtgcaagccaagatcagttctcacctccggagcaacgttgtgcctgagggagaatgagaaacggtcgagactcacctttgcccagcaatctcggtgatttctccaactctcaccccgccacctaacaactcatccaatgaattgtctccgaattggacaccctgccaccctgttcgagcaccatgcacttttccttctcgagcttttcctagtttgaccggagagccacataccccgcgcgccacggcctggacgagctcgaccacctcatcctctgagagcggtttcaaagttttcgtaagcttctgaagagataccagtaggatctcggccggagcgagcagggacgcgcgtctgagaatagctttctgacgaggtgtcaatgtagaaagctcactaagagccagatcgaacataagccaggaagaaagaagaggtgtcgtgtcgtgttgtgttgatgctggatggatcggacgactactggttggctcccgggagctacggcgttgaccggggcatacagtaattaaccctaacagaactggctggatgagtttttcctacattcaacttagaaagaatcgttaacgactaccatcatccatcccttcatccttctttctcttctcttcgtcctcgccgttgtccctgttcgttttgatactgagtgagaatgagatacgctattcttgtcacaggtccggtagtctttcttctctttgatgtatctgtctgttgcttttggaatgttccatggcctcattcattcttccttccgttctgttaggcccggctggatccggtaaatcaacgttttgcaactcgatcatagcacacgctcaatcacaaggaagaaacatccatctgttcaacctggaccctgcagcagacaaattcgagtacccgcccacagtggatatcaaggatctcatcagtttagaagatgtaatggaggaaatggagtttggacctaatggaggactcgtctactgctttgagtgagttcaatcgccctgtctctctagattcggtcataaatctgtatgttatagctaaactagagagagtaaaccaacagatatctgctggataacttggactggttggaagagcagctgggctcatatgaggacgactacctgatcatcgactgtcctggtacgaggtcttctctcatcagtctagagcaccgcagccctccttcgaagtctacttactggtcgaacattgcctctgatttgattcaggccagatcgaattatacacacatatccctcttctcccccgactcgcatcgttcttacaaacgaggtgcgacttccgagtctgcgcggcttacctacttgaatctcaattcatggaggacaaagcgaaattcttcgcgggtgtgatgagtgcgatgagttgcatggtcagcttggagtgcagtcatctgaatgtgttgagcaagatggacctcgtcaggggaaagaaggccaagagtgaggttggaaggtcagtctctctttctttggttcccttttgctagtctttcgtctatcttgaaccgaaaagactgacgatacagaatctgatattgtgttgggtcgttagatatcttgacccggatccacttttactccaggatgagatcaaccagactacaaaccccaaatttcattcgctgaatgaggccatcgttcaattggtaagcacatccattgtgtattctctttctttccttcctaccaccctttcctttcctccttccattcatctgctattgtgtctcatcatcacgcggattcatcgcgctctatcttcatacagatcgaggatcacaatcttgtatctttccttccgttggatccttcgtccgaatcctccgtcaacacgattctcagccatctagataatgctatgcaatacggttcgttcgatgttcttctctttcatgatctgctccatttcatcagggcgctatcctccgtctgagagaaggttgattctgatcgttttgtttgactgatttctcttgggattcgtctgactcaaggtgaggacgaagaaccaaagatgccaaaggatatggacgaaggggatttcgtagaagaagatgaatgaatgaatgaatgaatgaatgaatggttctactgtaatcactggaagcaaacggaaacatcaacacaggttatcaatctctcgagactcaagttacctccttttccctcttcttgatacagacctgtctataggaaagaattgagtaggttcctcgcctcgtcagcttacacacccatccaatacctctctcagctctctgactcttgcaggcatgaccttccacctctcccaccgccccattcccattccctccttcctcgctttcatacacatcggtccatccacccagctagaacacgatgcatggatttctggaaacattccttcacggagaagttggcagaactctggatgggcaagaattgaagcagccgatatcccagatccagggaggatggtcagaggacgccgaggacaagaagatgctgagtgttttgataaggagacagattgatcgataatgctcttgatataggaaagggatgaaggaaacgtcggttgtaaaccgctgaagagggacagagaaaagacatgagagcgagtttccttacttcaagacaatagcctctctcgggagaaggaaaggctaaatgaggacgaacctggtgagaacacgagtgattttcgggattgtgtctaatacgcagagagctatagacaaaaaaacatcacgtcagctatcttgtgcttgagaaacagcatgagagaagagaagaatataagacggaccggacgtcgcccagaggagaggaccatcagccgaagggtagttgatcatgtcaaatgcccggtgaaatgtcactgagaccaccagagaagacaaccgaccagtcaactcagctgttaatggaagattggttgggagtttggaatgaaacccataccttctaaaggtccggcacatgctgccaatctatcaagcaactcgacgaaacaagtgagtaacaaactttaagaatcaagcctcattaaaaaaagacaccaactctgaagtcaccagctcatcaatcatgccatctggctttaagcaaccgaacacgactcccatgacgcgtagtcgtcgaaacgtcgcgatctctgccttcatcagacggacttctgactcggaatacacaaagtcacctggtcgaggacggatcatgatcattaacgggagcttaggaagctcggactggatcatctggtcgtcgtacaacaggcatcaagagaaaagaagagaactgtgagtacatcatatgaagtacaaagacgatgaaggagattagacgcgtacattgaccagcgcgacggaaggcgttgtacctcctccttgacaaagagaaccacatatctccaaccgatctgctccattgtcgacagctctaccagcatacatgaatggtcgtgtatatgtatcagatgtaggtatcgtccgatcaagattaccaaatatcagtcaaatctattcggcgcttcaacttaagcaacgggcacaaggcgtacgtcttggccgagtcgaacgagtctacgcagacctcgagcaagatcttcttatgcgtcataaggatgagatatcagattgtgtcagctatcaagtagaatacggatgatgccgggtcaatagaagatcagtgaatggtgttccaagatgtcatctggatggaagctggaggaaagatgcaaagcaggaaaacccgatttaatttcgtccatccgttccatctcctatcatccatcatctctcatcccgttgcttcatcccgttgccccttcccgactcccttctacgactctctttatgcctctccaaacgactactcaccatgcccacgctcgtccaggatctgctagacgttcctcttcccatgggcgaccatcctctacgtcttcctacaagagaggcaacatagggtctaatctaggcatgaccagctcgagcggagctcctcaggacgtgaagaccaaacgaaacgatgtttgttctaatattcatccttctttttcttctctttccctttctctatgaccaatgaaaaagttttgtagatggagctgtttgagaaggacgattggttgggctgataatacctctaccctcatattctggcgtttctgttaatttaatcgatgggcgatttgttcaacccatctccatctctaccaacctttcaatttttctaaacttctacttgaccctccttgcatgaatacgttctttctctcttctccgcctcttatgcttgtctttgtgttttcatgatcatctcttacagggaatgccgacctctcacaggatctcatctcatcgatcggacggtcatctgcctcgattaggcgccctgcaacgaactcacagcaaaacaactattattgatgacgagaggccaaacgctgcctcggaaaacttagtagatgctggcggaagaggttatcaggaccaaggaaaagaaaacgtgagttgaccgtgtgatctctgtttaaaagagttgggtacgtgctgatggacctggatgtttaacactctttcctcaatccagtcaaaggatggatcagtagctggggaagaggagggttgggtgtccaatagtgacaatgaacgtgcaactgcgtccgaagaggatgaccctagctccagaccatcccgccatcgaccaagtaatgtctttcgaaaaaatagctcagcctcgacgatccgtagacgttcatcaacttctattcatcaaaccgctgtgtcgtcgtcatccactaacttgcaagatttgaattcgaaggatcagctttcgtcccagccgtcccaggattctcaacatgttcaacatcctccgaatgcccagccgtcgagggacctatctccgagaaagaaacccaacatgttcagaatccattcaagttcttccgatgttactcaaaatgctaaaccctcggcaccgtcatcatccattgcacaggttggatttactaccaagccatctgaagcggaagatcttcctcctcaacagtccttacccaaacaccaaaacggattcagtccatctcctcgtagcagacaatctgcgctccctcctctaacctcagccgcgactgaacctaccctccgccacgctcaacatcctcatgctaggccttctgccaatgcacgcgtccatttattcccttctccgcgtcgaagcccagccactccattgccctctccaccgcttaccgcggattcctttcattctggaacaagcccagaacgtgactcaggtccgacatcgacaacgacccaaaccgttcatcatcaggcgaatctgtcagaccaaacgaacggggcgatcgcatcttcgcctctagtctcgaatctaagagaagattctcatcctagatctcggcttggtctaaaaaaggataaagagattgaacaacctagtccagctcagaacgacgagtcacagctgttcgtctttaatccggttcaagccactccatcggcggattcacattctcgtcagcagtcgcaaggccctcctcacggtcggtcatcatcccatcccttgcgaacgagctcatctcgaagttcaattcgctcgctcgtcaaccgtcctcaactgttacccaaacgactcgtctctctctcatccaacattccagcaattgcgccccctcaattgacgaatgactctgccttggcagattcgcctgccaactgggagacatcctccccggctggctcatacatcagtgggcagcatcaccccgacgctatgggttcccttcgaaggacgagtgtatcgagtgtaaggacggctaccggaagtccatcccgattctttgctccccccggagatccgaaccaacccacctggggctccacagattcgacgacgagaaaccgggaccgaacggccagctcggccagtatacgcagcaacagccacagcatctatgggcctgggggagccgggtcggccggtggagagttttccaatggagcgtccaaggcgagaggagcgatggcagcacttcgatcgagcacgcatcttggaacagaaacaggctccgcttcgtcatcaggaggaggtattggccggcggatggtctcgtcaagctcgactcaaagtctggctgaggtcgcctcgggggtgaggaagagtctgatcgacgggttgagttcattgacgtcgaacggatccgacaggacaccatcccctccttcctcatcaaccattagtcctaatggcggcggtggactgaatccatcttcagtctcctcagcaggtcgagcacaaagtcgatcagccactgcaccgacctattctagatcaaacacctctttcctcccctcttcttccagtggaaactcaaattcacaattctccttgtcatgtctgaccgctcttcgaccggtcgtcagagaacagacaatgtttcaagatagaccaacctcaccccctcctggtgccccaggaggcccccacctgcatccgtctccattcatcgaggcacataagagtctctggctaggatttaaagaagacggaaggttgagtccgatgggtctgagtgggaagagggtattagatcaaaaacggctggctcttagttaagagtagtgcacaggtgttgctcaatagcgccttcctctcttcttttctttcttttccttgctttcgtttcgttccgcacaacagtcggcatgttggaaattcactttattccgttcatcttgtcctccttttttattttatctcctcatgttcttccattctctgggcatcatcgatcaacaggggccccttccttttgtatcattctcatcccttacaacccactcatatttcaaccatcactcacaaacaactggccatcccctctcctttttttcttccttttcttgtacccatttttaattgttcttccatagggatagaagaacggattccgttttagaaatgatagacactacggaagtggaaaaaatagggaatgtgaggtaagttggataccggacaccacaagaaaccctgaggttgatcagacgaagcgcacgataagcacacacacacacacacacataggatgagcaaggagccattgaagaaaaagcgcatgtgatatcaaagagagcaagaaggggaataagaagagaggagggaaggatatatggatcttttcacccgtttcctcctctgcggatgatgaaagattcaaaataccaaagagagaaccacacacggacacatatgttccagcaagaaaagaagaaagtaaaataaaaaaaaaagagagaggagagaaagagcccagaagaagaaaggacgttcaaaaagattctagagcctttggggttttcttgatctaacagatgcctgaaatatcgtcttttggaagatggaatcttggatctcttctcttctttctttagagctcctcctcgataggaacctcgtcatcgtagagctcaccatcctcgtcctcgagcggggcctcttggtactgagtgtactcggcaacgagatcgttcaagttggactctgcctcggtgaactccatctcgtccattccctccccagtgtaccagtgcaagaaagcctttcttctgaacatagcagagaactgatccccgattcgcttgaatagctcctggatacaggtcgagtttccgatgaaggttgctgacatcttgaatcctcgaggtgggatgtcacagtgggcggtttgaacgttgttaggaatccactcgacgaagtatgccgagttcttggtctgcacgttctgcatctgctcctcaacctccttcatcgagacctttcctcggaagtaagcggcgttcgtcaagtactttccgtgtcgagggtcacaggcggccatcatgttcttcgcatcgaacatctgctgggtcagctccggaacggtgatcgcccggtactgctgggttcctcgagcggtcaaaggcgcgaaaccgaccatgaagaagtgaagtcgagggaagggaaccatgttgacggccagctttcggagatcagaattgagctgaccagggaatcgcaaacaggtcgtgattccactcatcacgatcgagatcaagtggttcaagtcaccgtgcgtcggctgcgtcaacttcagcgttcggaagcagatatcgtagagcgcctcgttatcgatgcagaaggtttcatcagagttctctaccaactgatgaacagagagtgtggcgttatagggctcgatgaccgtgtcggagacctgtaattacgaaaattccatacgcgcggaagtaaagagaacggtgagacgtgcagatatatgtgtcattttgagatgaagagggacatactttgggcgagggcaagaccgagaaagtagccatgattcgatctgggtactcctctctaatcttggagatcaagagcgttcccattccagctccagttcctcctccgagcgagtgagtgatctggaaaccctggaggcagtcagttccctcagcctcctttcgaacgacgtcgagcaccgaatcgacaagctcggcaccttgtgtgagaaggaacatgtcaaggtaagtcatagtgaaacgcatctcaaggacgatgagggctggagaacactgtgaaagacctaccctcagtgtctagttgaatccacacggcgtcacgaaaagtgtgaagaagcatattcaaagccacaaacgtcagtccatatcatcgtcgtcctccgttttgaccacaaagacagataaacgaacaatgtcctttagcccagttgtttccagctccgctttgaccaaaaacgaagttatctggtcggaagaggtttccgagaggaccggctcggatagaatccatggttccaggctcgagatcgacgaggacagctcggggaacataccttccacctgattcatttcatgaacggaatgatgaaagatcatcaatgcctgtcttggatggcgcatacagtcatatttaaagactaaccggaagcttcgttgtagtagacgttaatcctctcgagctgaagatcggtatctccctcgtagctgtagaagaggcagatcattgttgggtgttcgagataagtctatctctagaggtcaagtatagaaagtaaggcagaacgaacgttccatcggctccaatgccgtgttctacaagcggaaaacccagagaagacaaagttagaaacagagatgtaaagcacaaagtggacggcttcggaggttgatctctcaaaagaacgcaccatcacaaaggacctcccagaacttagctccgattctgaagtgtgtcaggtaaagtcagtccctgccatcagttctaagaacatgaaaggttaatatacgtactggttaccacactatacgaccccatcaggacaacagaataaaacataacgaaagatggatatcagatgctgaacttgccagggctgaaacaggccacgtgggagaagaggaggcggggttgaacgtacttgaccagtttgaaggtggacaatctctcgcactgtcgagcgaagtttcagaagaggcaagagtcagcatcatattagatcagagagacaaaaacttgatgaacgatcttctcgagaaacgattatgtgtatgggtgacaggcaactccagaacggccgtccgtacaaattccacccaaggcgagacagtcttcacccagcccaccaggcgactttttacactcttggacgatgtaagtcagctcaaaggaaatccctacagagataggtttacaacccaggctgtaccttgacagcacaagatgaaaaaaagatgggaggagaaagcgagggaaacgcggaaacagatgacggctgcagccgccagagacaaggcctgcaccacccaatcgagacaagggagagaagagggaaaagaactagaccaaatggtaagatgagacactgactgatcaagtagaataaaaagaaaagaggagagagttggaaagaaagcgacgactcgttagaggattaggatgagggaaagagaaggcggagggcaacggagggatgttaggaggacgatggatggcaagagaaacaggaacaggaacaggaacaggaacaggaacaggaacaaggctcccaaaaagggacggggctcgagcgcagggagatggaaaagtgtaaccgatgtattttgtaaccactgccaaaatcggtcgcgtcgacacgacagacgcgtcaagatctcgccacgtgatccatgtgatttctacgttaaggtttcatctactcttcccgctctgttgaccgacgtcttcgccttctttctcttcttttctgttcatccatccatccatcaaccttactccagaacgcgttctttccctctctttacattcctttgatatataccccttctttttctaggaccatatctgtttctaaatggcgtctacagatagcgcctacagatcaacaggacggtctcctcgtacattggtctatgctccctctccgttgcaagttaaacggacacctctatcgcccacatccaccaacattcctttatccaatactctgtctccttcctctcctccttccattttctcaactcaaaaatccgttcgaccagtcaagtctactccgtctcttcgtccgccttcggtctctttgacaggccgagctgctttcccactctctccttcctttcctccggccgttcccgcggaccaggacgtcacagacgaaacgatcgcttcgctcgctcctcctcaggttcagttccacaaggagatctttatccatcgacacgagaggacctttccccatctccattctgctgagcctgcgcatactgcggcctacgcgtctcagtctctgctccctctatcgccgccagctgatgtcaatgtagtccctcaccctccttcggatcatatccgaacgaacgaaccactaccgacgactttctcaaacacactctccctagacccctcaacaaaccccacagatagctcgtcatcttcgacttcttgctcgtctgacgagtcccgtctgcctctccgacagccgatgagcgtattgtctagtagtcaaccttgcgcgccctgtcggcctctttctctcatcgcgctccaacctactggtggtctctttcgagcgaagcctaacttgccacctgtcgagagtctctctagcgagtcctattctggttcgatagactcccattattctcagcgaacgactgattcggacaatcgacgtgaatccgacgatatgtcttccgagtgcgcgcttgatttcgcgttcgataaacctcattttgtcgtagttgacggatttgagcagaaacctcgacatgctgcctcgaacggtactcttcgagcggctgatactgtgactcgccctataggaaatcctaagtcgaaagaaaaagaggaggaggaggagcgagtatcctcaatgatggttgttagacctgctctggtagaagcccagcatccacatatcacgagcgcgtcatctgtccaacgtcaagattcttatacgctctccctatctgaatttgctcattcgactccttcgccaacgcacgactctactgaagaacttgcaattgcgttcacttctggtagaacagagaggactttggacgagatggatgaaaacagagaaccattctggcaggccaacatagagtacagttctagaagcaatggaaaagaacaggcaagcaacagggtggatgcgctcggtctcccgttggatggtctgagaaagtgtgtcagtgatggaggcgaattgagagttaggtattcagacgatctgtctctatctcgcaaagtatgtccgcccttctctttcttccaccaacggccagactgctgacgaatttcatgttcttgcgacctttcttggcaaacgaaaaggtttcttctgctcctaccccacgcgcgcctagtacgcccatcgaatttgcttacagagcaactccaccaagtccaccctcaccctctggtatgctcgattcatcccaaggaaacacaggttggcgaggatggcttcgtaggaattcgcgctctgggtcaagagaccgacctgcattcgtcctcgaggacggactaggagcagggcaggaagagtccaactggtctagaccgggaacgagtcattctcatgttgtacgtaaacttcgttatccatctgacttgcgcgttctgtctcagttcgcgtcgtgtattcagtggaataaacatcagagaaactcatcgatacatttctcttcgtaaccacacttgatatttaaagtctcctctaagctcgtcgtcgagtcctcacttttcttcaccacccagcctctcgccttcttacccaggcgacgcgagttcgaccttctccagtgcgatccttacccctcctccttccgcccgaactctcgatcgagcgacgttcgaatcacccgtctcgacctctccgtctttaccctccgaaatgttcctcaacccgtccaccggctctggtacaggcggcgtcacgtacccggctcagacgttgtcctcctatcggccgtgtccgacgacttcacattcggcctttgttcacgtcaaccacgtacaccagatcaatcacgctgaccatattggttctggcgactcggcacgctcaccgacgggcgcgttcaaaccgctgatgctaggaccgccgagaaactcgatttcgattggaaataaagcgaagccggccagattgggagagatcagaaaccatcttcctacaatagccggttcaccttctcggattagaccgctttctctttctacacgaaacagctctggtgtcggcgcgaaaggagttcgaaacacaagcgaagatggtttgagaggaggggagcccagcccactcgcgacagagagagacagcttcaactcccactttaccttccctgtgagctcggatgccatcttgagaagaaacttgatcgaccggcagacgaacccacccatccggccatctcatgaaagaacatactcgaccgcgacgacgagtgcatcttcctccccgacgtcgacgaacgcgcatctccgatcgaggtcgagagcaattggaggatcccgagtggttatcattgatcaaccaagattcgatcgagcgtcgaaccaagccaatagcgttcaggaaggattggatgtgggttcaaccggagtaaagatcagaggagaagacagggagcagatgcaatccaagacgaagatgcagacgcagaaggggaagggattgaaggacctcatttactcatttggcgagaggataggcagatggatggacgaaacgctgcctgctcaggctgtattcttactcgggttcatcctcgggccttgtacgtgcctccttcacctcgtttttctcttcttcttcttcttcttcttcttcnnnnnnnnnnttcttcactgtgcaatctgaaaccggggagagactaactttatgcgctctaattgatcaacatatacatagggtgctgggtccttggtggatggggcctttcttctgatggcgcgcttattcttaccaagtttcaaggcggtcggtctgcccaccaggccgacaatccttactatcgatggcgcccgccttcggtctcctcgtccccttcgtcttcgcctctctccttagcgccgtctgtgttcggtgatcgatcccagccatactcgtttccatcagcagtgtctggtgctagaccaggtaacagacgacgcgtctggatcctccctagtcttcgatcagactcgcctaacaagtgggtgtggaggaaccgggtggctgcaatcttgagtgggctagtcgttattcccggattgatactggcagtgttgtttgcgattctttaagcggatgggtcgtgtagtcctctcgagattatcgttctgtttgccttcgtttctgtttctcttatcgatcgtgttctgttggacgattatccgttccatcctctctatctactttgtctctttatactcttatcctatcccaatacctctacaatctttctaatatactttctccctatccctctccattcgagactatcttctatcgggaggcttccttgctttctcttctctctcttatccatcttaactttgttcggatgttctccatttcattcccaatcctctacccggattatgtataactaaccgcccttctgcacgataatccctcttctatacaacctcccctgcatatcttccatatccggtgttgcccggaagtactatacccccttcatctatcatgtattcacaaggttctccgcccgttctgaacaaagcttttcttcgtccaacgcaaaggttgttccaggtatgtgctaaacgcccgggaatgttttccaggttagtacacgtacgcgagggcgtcaaactcgcggttgatttgttccccgggaaggaaaaaagaatgaatcttgaaaaggccggaactacggagcgcactaaagtcggaggttgattatggtgccgacgaccatcaaccaacatctcaaccagtgttcactctcgcctcgcgtactctcttgctctcgaggctcggattcggccttggcgtcgttcatgatctctctaacgacctcgacggtgtgacaaggatgaagtgcccacactgcttcgcccgtcgagggatgttcatcagaagcgagaagagggaactcggccgcgccgttgaaagcgacaggagtgctgagagaggtcgcttccggttctagcggagtggacgatgaaggcagaaagatgaggccgtgatgaacaagctcctgcagggtcagcggtcggcctgggttcccaccgggtgatgagacgaatcgttatgaaaagaagtgtctgtcagtctactatgtcgaagaaacagctctacagggacagaggttccttcgtcttcaggacaggaggacgcatggggtagtggctctatctaccttgagaataagcttgaaggaggaatcgaggggtttggtaggtcggtgagtaaaccacgtgatgtaccacgtttactgatacgcgactcaaatctggcgatgtgatcgcgacggattcatccggagtctcgtccatatcagggaacgactgctgtggatcatctaccgacggactgtcagttggaagttgaacagagcttagacatattgttgatcgaactagatagcctgatgaagggttgatctaaatgaaggcagacgcctgatgagctggctggctgactggggtattatccaaagagaaaatccggagcacaatgaggaaggaaaaacagtcagcgcacagaatgagtcgtcctccattgccattgagataaagcagatccgatcagatgtgagtctgaaagtaagttgtgagttgagctcgatgatggcaaggccaacaggttggctgcagcatgtgcgaaatcagcatgggtcgcgtaaggtgtgtcaagcatggggtttgaatgagaagaggagacggatatgccggtctaaagccggaatgtattagaagtctatggagaacgtattagacgacgcgttaggagagagaatagaaaggaagactagagaatatgtgatagaacgactagggaacagagaggcaacgtagtcagaggaaggggttgatagagactacagcgaacagagctacagaataagacggactattacaagaaaaggaactattgcagaaaaagaaacgatagtaatacaaaaaagaaaagcactattaaaataacaaatgtattccaattcagacatgaactagggaaatatcaccaaaaaataataataataataaaaataataaaaaataaaaaataaaataaaaaagccgcgtcacgtgtcagcatccaacccgccatctgacttttcatctgacctttcgtctctacagcccgcccaagacacaccacacagtacgtcctcaggcaaaagagcagagtgaaggattcctgtctcaccccaacgcaaggttagtgtccgaaaatgctagtggagatgaagaggacatcaagtgttgaccctttgcactctttctccttctaaccagcaccatggccgtcggaaaggttagccccagcatcgtccctacagagcaaaagcttttcctcctccctgcctatttttctgtcctcgtgcccttgtgttcccttcgtttgggttttaaaaaaatcatccagccgcatatatgcgttctttcgtcaaaaacttcacccgaacggtctcacacctcatcccttccacatccaaccaatccaccgatatccaccgttaccctgcatgttgtcgacattggggtgttagagacgttaagggacgttgagttgtaatgttagaagggtgtgcaagaacaaagcgtaaagcatgggtcaagcttggtggaaaatttaggggaaagagtgccgagccgacaacttcgacacaacaaaagggcactgcgacaaaaatttctaggcaggaggaggaaaagatatcagcaacaccctccggttcgtgtccatcccaggttgctgactttctcttcctgttcttctttctccttcacctaatagaacaagcgtctctctaagggcaagaagggaattaagaagaaggtcgtcgatcctttcacccgaaagggtaagcaacttctcaatcaactctcatgccacatcctgctccatcagtttactgatcagtctcctccttccgtcctctccatcagactggtacgatgtcaaggctccttccttctttgaggtcaagaacgtcggcaagaccctcgttaaccgatcccagggtttgaagaacgccgatgactccctcaaaggacgaatcatggagttctcccttgctgatctcaacaaggacgaggagcagtctttccgaaagatcaagctccgagttcaggaggtccagggcaagagctgcctcaccaacttccacggtgtacgttacggcctctttgtctgtcgaacccttcttccaagtcttatctgttctctggttctttgtagatggacatcaccgccgatcgactccgatcccttgtcaagaagtggcagtccctcatcgaggcccaggttgacgtcaagaccactgacggatacctcgtccgactcttcgccatcggtttcaccaagaagcgacccggacaggtcaagaagaccacctacgctcagaccgcccagatccgagagatccgaggaaagatgatggagatcatgacccgagaggcctccgccggagaccttaaggagctcgtccagaagttcgttcccgagtctatgggtcgagagatcgagaaggccgcccgaggaatctaccctctcgccaacgttatggtccgaaagtgcaagagtacgtgtctgcttgaatctcattgtaatcatcacctcgcttaccccttctctcgtactttttttttcctcactccagtccttaaggccccccgatacgatccttccaagctcttcgagttgcacggcgagtctgctgacgagaccggtgccaaggtcggaggtgctaaggagttcaaggagcctgagatcctcaacagcgtttaaatctttatataatcgcttttctgaaaacctcaaacgctccctacgaggactttttctttcttcttcctgagtggaacttgaatactgtcaacttaagccatacatcgttcgcctacacccggaaagaaacttgagctacagactacatcctgccactcgcctgtcaccttttgacttgatctgcttccatcactaacgaactttctactattctaatgataactcatttcccgagttatctcactgatctcgttgggctccaaggttcatatgggctttatcgttctcgtttgattgtttactcatagaactgacagaaatagatccgtaatatcaaaacggaaccctatctgccttcttccttgctaactcgtgcaatgttgatctgaacgatcaccctcgatcatccatacgtcttccaagaacttggacacgagtcgttctaggtcttgctgtccagaattaggatccgaatcggcgtggtggatggccctgttcgatcgagtagtgatgtagtgaggtcgtctacagaattggccaaggtctagccagatcgatcctcctttctcttcctcatcttcatccccatccccattcccatccc

SEQ ID NO: 270 - DNA, 19466 bp, Xanthophyllomyces dendrorhous
ttcttcttcttcttcactattctcctccctctccacgttcttctccacctcatccactctctcttctcctttgtggtcttctcgttgtttttctattcgaggggacgcgttgataccataggaacaatgacgaatagaccggattgtctgtccgacccgacgagacctcgtccgtatgtcttggtcgtgatcaagtctactttgtcggcgttggcgtcgtcgatggatcgagagagacgaaagagggaacggatcgtttgttgacctgatagcgaataaaagtagatcaagcacgtcacggaatagatcaatctcgagtatccggctttgaatccatcgccgagacgatctatcagacgagagagatagaaaatcaggggaggaaggaaagagagaagagagcgaggagagaagagatctaatgagcggggcaagtaaggatgaatctaggtgaacgagagcgtagaggagtttaagaagagggaacgtctcctttccaccgttgtcgtcgtcggcgtcgtcaacgtcaccatcactcttattacgtccaatcttttcaatgccatcgaccaccttggtaccgccatcagacatgttcccttcgtgcctatgcatgtttccagccatccgatcgctcaaagctctcgcgacttcagagaagacctcccgtccgatgaatcggcagactgtggtgacttcgcgtaaagtcagccggggtaggacctcgcgcaaggttgtttggagaatcagataaacacaggatatgatctcccttggatttgtctctgcgaaatcaagcttggacagggacgggggaagtataaggacaagtcggagaagaacgtgaagcgttcggatgagttttagcgtaaggctcttcagagactgaaccgatgaggtggacgaaggagggtcttgtacaggtcgaaggtataacgtttgattgatcgtcataagcaatccaatgatagatccagcgcacacaagatctatcgtttggtttcatgaaaactgtcagccaacgagctacacgaaaatagagcttcctgatgtctgatagccgagacgggactctgtctcgaaagtcaacgagcagaagaaaatgccgaccgacctggtcccgagtgcacagagagagcttcctgaagaaagatgtcaagctcaaggatgcgtctatcacttaatgggaacggtctatcattccagagaccgagaagcgatggaatcgaaggttgtgtgcgtatctgtgtcaaagaagaccgaggcgaaggagggactccgagtcgattggctttgaagcgagatcgcatttcttccacaaactcttttgtttttgttgtcgatttgggttgaaaagaattaagaatgcttgtttagtctataggcaacacagctgaacacgttaaaaaggcaaaacaagaattaaagatcggcctagacagaccatctatgctcttctctcctcggtgtttgaccacatacagagcctgaacggagaggaggcaattcttatgagcccacgaatggactagtgccgatcatgatggatgaaaacttacaagagccagtcggatctgatctttgtagtcaagataagccatgtctgatgaagcgttggagggaaaggaagtgacgagtgaatgaaggacagaaggtgagcgcatatagtctcatttctgtcagtccggattctagatgctgtcagtagcttttcttcgagaagatgatcagtatcggaagctacctcgtctcgagactagatcagaatcatcgtcaggattacttgtacgaccggtggagccaagaattgtacatcattttgaaacgacaagatcagtctaggttaaaactggggggagaacaagacaaggaattggatcaaattgcgtgttgaaaggcgaaatgagggtgtcaaaagatacaagctccgtagaaaaaggatgatcgtgtagaagattgtacagagacaagataaagattccagaggatgatgtaaccaagagagagcctaaagggatcaaagaaaggaactgccggcaagaagagaggtagagaggaaagaaaggactggtgttgagcttctgttttctagtttccgagcctcatttcgtctgcttctctttcatagcttagggatccttagcgtcttggaaaccatcaacgctccccacaccaagaacaccaacgcgacggggtgcaactcgaacgccgagtctttcaaccagacgccaagaggcagaccagcctggccggtgtaccatcccttcttgacccagtatgccatagtactgacgagcgctagtgacgaggggatagggagaccctcaaagtacttgatctttcctgtcgtatcggcaggaatgagggcgcaggtggcgttgaaccgggcgagccgagcgagaccgcaggacacaaagaacgagaggaggagtgtgtcgacaaaggagtttgcacctagggtgaatagaagcagagcaggagagacaccgaacgagacctaagagaagatgggtgcatccgaacaggaaatacagatcaggatcaggtcgggtaagtgtgttggcggttggaatacaactcagcatcacacttcctgtcaacatgagaatatctgagactcaccagatcggctagactgtccatctcctgaccgagcatactggcacttcccatccaccttgccacctttccgtcgaacacatcgaaaccgaacccgaggaccgggtacaggaggcccatccacagagagctcttgttttccagcggggcagacaggtacttggcgcaagagaagatacacgataggccacagacaccgttcatgatcgtaattaaatcagccaatcggaagtttctgttgttatgttgattgaacaggcaaatgccaatcaagcagcagaagaaacgatggtatcgaaaaaggttgagcgagccacgtcagatgatgaggaaagaaaagaataaatgtgttcgatccagattcgagagaaagagaaaatacaagggaaacaaacgaaaagtcagcgtaagagcagaatacaagtggtttcagagaagtcttgcactggacatcaaacggcataagactaggatgaagaacgaaccggacgagcgaaaagtggccatcgtcctcattgtattgtttgagctggttccgcttggcttcctccatcttaatactagcagacttctgtccggccgaagtacgttgactcataatagttctatctagcaatgctcgcttattgttactatcagtgcaattggtgctgtcgtccttgtcgtcaggtcgagatggctgtgaggaaagggaaaagaggaggagcaaagttgagacttttctcatttggagccgtatgaatggggagtcaatgacgcttgtattacataagcaacatgtatggttagggttagtgctcttcaagatcagatcctatatgtgtacatgaacagagagcttgtgtattctctccttaagtagagttatgagccgagaagagcgggtgttgatgtgggaagggaagagaatgagaaaacaaactggacaggatgtggaggccggatagatgtcctttcgataacatctcaagttgttcgtaacagacaagccatgaagacatggtcagcaatatgacgacgagtgatacatgcttaatcatacatatcatccatggttcacagatagaatcaatactactactactactactattcttgaccgatacaagacaaactaaagagagagaattcgagagtacatgaattgctcaagtctgtagattgtaagcccaaaaagaaagaaaggaaaaaaaagaatacagaccgacgtgtagcttcgtttcgtgaggaaagcaagaaagaaaaagagagagagagagagagagagaagaggacagcggcgagatacaaacaggaaagaagcacaaaagtagaggaaaagcaaaaagcaagcgcaaggacatcggaaaggtcgaatttgattgattgatctgcaaaagagttcgaggctcagaggtaatttggtgccacatagttcaaagctacatacccgttttacgaaacttcgaatcacggaagagacttagcaatctatcaagacaggagagcaagcacacatagaagaaaaaagaagaacggaatgcacttacagactgaggagtcttcgtgaaaggagtgaacagagtgagcagagaccgcagagctgtgtcgcgaatgggttggtctcgccgtcgaaggcaacaagcttgatcggtaaggtgttccctgttgttgctgttgtttaggatcctcagtgttgactgacgtcgaagtctcaacatcggtccgccagacgtctagatgagtaccccgttcctcggctgacacatcgtgatcgaatccatcctcgggctcgggctctggctctgactgaccccacgtccccgcctcttctttccgtcctcctcgtcgggttaaaggtgcccggtctcggtaatctgctgcggtcggcgtcagttgggtctgtccctgcgctcgggcatagaactcgtgcatctgcatacattgtgcgaacagttggctgtagtacgggttcatcaatagctgatagtgggtcaactgagcgatgagtgaggctgggacggctgctggatgagtgttcgggtagacatagtatgccggatgggaaggcgaatatggtcctgtcgacgattgaaacgaaggttgagatgggatctggggcgatcgggaggagtacgtcccggtgctcgtgtcggacgtcgtgatggtgaccggagtctccaagactgatgctcctgttgatggattcgatcgagaggagatcgatggggtggaataaataccactcggtggagacgtctgagggcccaagttggattgagcagtagagggaggagggtgggatgtgctcgaataagaaaaccctgatgggagctgtgtttgaattggagtcagaccggttgagaagctaaacatcggcaactcgaatgggaggagcgaagcgttcggactggtgggcgagtaaaccgaagagaacgcgagtggaaacggcgaaggatggatcggggaaggacttgggtgaggcagcgtcacatttgtcgaaggatgtgtggagttaaagtcaggaagcgagcccacttggagtagtccagtgtgtatatttatgagtcaattgggagagtaaggaagctttagcgtatttgcacttttcttgcaatagatgaacaggacgtacgttggcctgagacccgatcgaaaggatacggagccgagtgaccggatgtattcattctaggcaatcttggccgggaaaactgtatcggttgatacggcgcctctttttctggaaaaaataaacatgtgtggtcaggtggagaatcagtgggtgattagcgtcacagtgctccaaatccgttgacaaattcaagaaagaagaaaggagaatgtgaccgaactgtagggcttttgtttggtggggcttttcttcgcgcctcgctcgttcagctctacatcctccatgctgatccccaagtcttgtcgggatcgttttgggcccaaggagcggcgggagagcgggcttttcgtgttatcgctacttgaatcagctgaggattgaggggagtattctgcttaagagatcagaccaatggggataaagaaggtgaaggaggacgaagaggaagaggagaatcagacgcgtaatagagagcgaggcgaaagagatgtgaaattctatcgaatggagagatcaaagaaagaacgcgagcaagctaaccttgaagggggtagtccaagcaatcctttgcccagatgacagccgattctaggcttctcgggaccggattaccttctgcaaccaaggcatcgagtttttcttgatcgagtgcaatatgctttaggatagtcctcctttggaagtctgatgagatatttggttgtcaacataagaatccgacggaaaaatcaagaaaacggacgtgacgcgcaagttaagagggacgagcatgggaaggaaacagaaggacaagtgagtaggtgagtgttggttcatgagtttgagggcaaagtcattcaccttttcctttgcactcaagggtaaagcagtagcaacggaatcgcttagacatgatcgattgaccgacccgagagaaaggcaaaggtgtattggtatcaaaagggtaggtgagatgatgatgatgacgacgacgatgatctcgtgtgcgtatgcgtgtgtacgcgtgagtatgaagagacagatagaaggagacagaactggctatatggaactaagaatgcttgagaaaggaaaaaaaaaggacttggagagaagcaaggcaaggatggtgttgcatctaatatctaatttcacccactctgtgcatgagaagtaagtaagcaagccagcaaaggtgcaagcaaggatgcaagcttagacgccaggagcccgaagaggaaacgagcaggatgaaagagagaaaaggacaagtaaaaatcaaagtatctccagtcttctgtgggaaagccagagattgcgcttttgaagatacacaggtatcttcgggtatcaatttttcttcgcttcaatcgtatgggcgtacaagactgccagccaaccgaagcgatcttattcggaatttttaccttcggtgtaatctcaagtggatacaaacgaccgagctaatgcacggtcgcatgacgggaatagtcgagatcattaattttgaatggatgcacatcgtcggttaaacagttccatgtggcgttgctggtttccttcagagcgtgtgagaagaatcgatcggcatcacccatcaaagtgaccaaccgacacagggagactgtcactgtatcttttagtcggcgatagagagatatgcgttgaattttatccggaaggaatgaatacattcaactcctctatatggtatctacggaaatcgtatacaggtgggcagtcaccgaagaatgtttaacttggtcacccgaccaaacggcatggctactggattcgttcagtcgccattctaccaagtgatctttatctattcattctaatactcgtcttgctcatgttttctcaaggaaagtatggccgacaatatgagaatgatcaggaggaataagtagaaaagaagggaaagttgacgaagcgagatgctgtaaacattgaatggatgtataaatgaatgaacgatgactaagcatatgatcacgcgtcgacacagagcattgtgcgacgcgacgcgacgcgatgcttccctcagtcatcttggaaacgaacgaaccaagccttccgcgttcgtccatcaacctccagaagcataaaaagttcaaccatcgatgtctccttctctttcgaatgacgatcatatacggccggactctcactattccgccctgcccaatctaaataatgctttcagcttgaagggagtttctagaagttatgaccatcaggtccggccttccctttgctataagccagccgcgtctcatgtacttacctttccatctttgatcaaccttcattcgtctcagtacgccagcctttacttttccaggcttgttcatctccgaccaccagtaaaagctcgagccgagaagaaatggaaaggcgcccaaggtctgtttcactagcttatcgctcgttcctcttcattcgttagcttctccgtccttaaatctgacgatcgcttccaccatcgattaaactcaggaaacccgaagccgatggagagagtgctcgacgttcaacaaggagagctctgttggatcaccggtaccatttatatggacatgcccctcaagcccaatgtgctggacgacatcagcaaagacgtacgtttcgatcctccacgtgcatatacacatccttttggccttatatccctaggtctgatatcacagattctgatgtgttgggaagcccttatagaaatggattaccgcgcctccaccaagagagacgttcttctcgtccgaagatgagatccttttggaggacgagtctggccgggtgaagttggtaggagaaagattgaaacatgtcaacttggttacaggtccgtttcttacgctcttagccatttacaaccaatatctgccgacactatcttcccatttaacctttgcgaaaaaaaggtgtagtgttagctgctctaggatatgaggccgctgccggcgagtttgaggtagtagacctatgctttgctgggttaccaccccgattcgattattcagctaaaccgaaggaagcacaaaagacgaaggtcaaagggaagccagtcttagccgaggctgatccaaatccagagatcgaacaagatggatcctgggtagctctcgtatcaggattagatatcaccggaggagagagtgtggcggatctcagatgggcgcttcttgtcgagtggctgatgggtgaggccggcagcgacctggaccgggagtcaggaggaaaagtctctcaattgatattggctggaaactctttagcgacaccctctacagtagatgatccagacaaagccagggtatatggctacgatccaacgacatattctactttacctatccaaaccttagacaacttgctctactctctagcccctctcatgcccatcacactacttccaggaccgaacgatccatcgggcacgatccttccacaacagcctttgcccaggctcatgttcaaacgaacttctcctcacgattcatttagaacaacgacaaacccgagttggcttcaagtaggtggcaagcggttcctcggaggtgcaggacagacagtggatgatgtcttcaagtatctgccggagaatgacggtagtcggattggactcgtgagggatatgctccactggagatgtatggctccaacagctccagacacgctctgtaagtgacagagttcctttctcatgcttcatcaacaactctacggttgagaaaaaaaatcgagaactatgaaacagaggctgacatgttctttcccatatttatcttactggtccaaagggtgccatccctttgacaaaggagaccctttcttattggagcacgcgcccgatgtattttttattggcaaccagccctcatttcaaacatgcaccgtatcaggttcgtctgatttcattatgttcgacttctattcttcattaaataagataactcatttgacatcgcgcgcaccattcttcatctttatcacttgaaaatgattcagacgcagacgatagcctgacccggatagtcctcatacccaaattttccgagacaggtacagtcgtacttgtgcacacatcttctcttgaggttaagaccatggagtttggagtctttgcgtgggatggcgcaggaaatgaagcgacgggttgatagaatgtctttatatctattctccttgtgacaaaaaatcacgtgatccacttgttccctggtcagcatcttaccccgcatcgtacggtagatatatacctgcaaacactcgagtttctctcaaccaacagtctgtatcatctgtatcatcttcattatcgtccttgaaccaccacgctcagctctcggtcccatcagatggccgaatctatctctacctggaaagaaagaaggaccaggttgttagcagctcttgaccaacctatagaccagcaggatgaagatctcatcggcaagcttatagatgtgacgttaactgaaagtcgaaccggcgaaacaggcgacgctgaggaaggtgagctctacaactacatctaattgatgcacccatattcttaagttgtttctcactcgcacatatgatcccatgtaaaattgaaatagaagttcgctcgaaagttaaggagcttggaatcagaacagacgactttgtgcctgtatcgcatattgctcaaggtcaattcggaacagttagtcctcctttcagcctgcatatcatacccggctgtcctgatgcttgcatgtgttgaagatattcgctaagttgctctaacgattgaaatttataggtagaccttgtcagatgcaagtttgatgatgagctgtattgtatgaagacgatgagcaaggtaacacttcgcagaagccgtcaggtatgccctttcctttcgttcccatcctgtcgacaaactgtaactcaacttgatcctttggtttttttaaacttgaacatgattccaaaacacagcacacctctccaatacctgaacggatactacatactctcgctcttaccacaaactcgattttctctcctcaaatcctgtgtgccttccaatccccactttcgctccatttaatcatggattttatcccatacggaaccctctgggacgtgctaatctctacaccctccagtagactcccagaatcagatgtcaggtactggtcagttggtatggtttgcgcggtagaatggctatccgacaacggttgggcacacagagatctcaagcctcacaactttcttatccgtcccggtgagaacaaccgaatgccgagagccgtcctgacggactttggaacggccgcacaggctctacctgaaggaagaaataaaaacagaaaggtcttacctataacggcgtgcttatggcctgtcggcacaccggattatattgccccagagatcttggaggctcacgaggatgcgctcgtcagggcggaagaggatgaagagagagcagaagacagcgaggagaaatcagaggaaggcggcaaatcaagatcagcagagacagagggctatggcattcaagtggattggtggtcgttgggtgtcattatcaggtcggttcctcttcccaaggatagtctcgaccatatgatctactgactctggtagacattcgcgtccatgcgcgaaatcagtgaacttctttttggcgagcctcctttctttgcagaaagtatagcggatacctactggaagattgtcaatttcgaggttcgtctgtcattgccttgctgtggtcttcttatgtcataaagacgaaatggctcactgaaatcctatcgaactaaaaacaactgactcgaatcaaaatgtaacaggacagtctaaagtttcccccggaagttgacatgtcgagtgaattcgaagatttgatacgacggtaaagctgactcgctctgtgtcttgccttatgtgtcataactcatgagcttttccttcttttgagaaatcacagcctgttgaagcattctacagaaagactaggccgaaacggtacatctgaggtgaaattccatccttggttcagagatgtcatctggccatcgacctcgtgtacaccgccttcaggtaagctaggttcatcatgcatgctgatgaaaaagttcactcagactcatttctgggtggggtttctcttgtacaggcataccaccaccagaactattccttcccccaccccctccggttcctcaatattctcaacatccatttgatctatccttgtcaaatctttatgagggacaaggtgatggagaggacgacaataatcctttcgcattttcagacctgttcatctcttcgcctggcctgtccgtcttacattctagagaatcgcccttacggtcgaatcaagatcctaatcggatgaagctgacaggcatctcatggctcggaggtagtcctcagtcattcgctcctcccgatcgggtcagtagcctaagcgaggcgttcgacaggtccttaatcttccatgatatagccgaggagaaagtcagatcatccgagttggcagatgaatggacaggcttcacttggggacctacgcaggatgcgttcgaagtgaaaagactcaatcggttgcccttagaattcatgactccctttgatcagcccgtgctcaattcgttccctggagaagacgatttcttggcattctctttcgatggaaaggccttggagtccccgttcacacctgcatctatcaaacgccatcgggatcaaacaccgcaccggccgctcctgccaccagactccaaacgcccgccgaatccaactatgtcatccaggaaaaatgtttaccaaacaccagcccgttcttcagcctcattctctgcatcattcccgatgtctgcgccttacagtcatggaaataggatacccagcacggctagtagacggtccagacccgtcacagatgttaaggcgctacagcagatggtagattgcattgggttgagcgccaggaagcgcgtattagagagcgggaagaaaccacggttattagtcctcagacgatggaagaggtcttcaagtcatggcgaggatagccaagaggaggagaaggatcccagagaggagcgtcagataggaagttcgagagctacaggttggacgccaagtccttctcgagctatgcatttcagcgcagacgctggctctccgagtaataaaccttcgtcttggcggctaagaggagaacttagcaaagatgttgatttggacgatgatgatggggtagagattaacggagggggtagcaaagggttttcaaagagaattgaagaactcgagagcaggcggaaattacttgttggagagctcgataaagtcaaggatggcttagtgggcgttaggcagacggttgacaaatggtgaatatgcactttgaatatctgcgttctgatctcttgtatatcattctggttgaaatgtcattataatcgtaggggctgggttttgagagaagggacagaacaaaagaacacgccggggtatagacgtgatacagggggaaatgacagaaggtagggacaatgaaccatcatcaccatcatgttctaaagtggcagcgataccacgaaaagaaatgaaaactgtttaggtgtcgaatgaaatagaatccaactctaaggctttgtctcagccgccttgatctgttcctcaagcgaatctccttccttcttaaccgattgataggcctaagaacagaccaaatgtcaaacaagaacgatattgtgtgagtgtcgaacggatacaaatagaaatacaagagttacgttccacaatccgaaccagaatgacaagaatgaactcacagcacccatcaattccaatccaacggctcgcagtcgaagcttctccctagagacctccggttgagataggatacggtcacacgtctcacctgcaaagtaaaggaagagcgtttaaaagaaggaaataatcgccagatgatagtaaccatcaaaccaatgaaaagaattcagattcattcaagagaaacttaaattacggcaagctgagagcaaatccccttcgttatatgacgagtcagaagttgaagaaaacttacggataacagattcgacttccatctttgcagacttccataaggttttgagaccctcggcagcggcctcttcttccagcgccttcatctgttccggtgtaagacccaacttctcggcagcctgaagcttttcaaacacattcttgaggtgaagacctgttcaaccgtagtcatcaacatcagtatgatatcacaaactgcttcatcttacagagctttcgctcttaagaggtggtgcagaacaggccaaagacgaataaatacgttaaaaagagaacctaccagcgcgaactaaagaaatgctgtctgaaattgtatccatcccagacttggctccatgaaaccatccgatcacacctccaaacgatcctgtcgaagcgttgtattgtctataaattgcccaagaatgtgaatggaatctaagtagatgtttgtcgtatgttaacgaaagatacagagggacgtaccggcctcgggcactgtacgtgctaccgacggcttgaagtagctcatgcccgtacgactctagtaccagttcctctgcctcgagggaacatatggtctagcgtcatttttccaattacggtagtcatcagtaaaataaaaaaacctttcagagctgacggagaaatgcttaactgaccttgaagctttcgccaacttccttctctgcccttcccatatcttccggccggcctgccccactaccttggacaccttccacaaagatcgccaacttcttctccagattcacgacaagtttatcgactcgctcctttcgctccttgtctgccaacgcatccttctcctttttcaacttatctaatctggccttctcctcgggcggaataaccattttgccggatttagaatcatacaccatccgaggggttgatggatcgtcattttcttcaccagtttcggcgtcggccgcttgaagagcttctttcattgatcgacctgtatcatggtttagaatcattcagtcgatttagtacggtgtagacgaacgctgtcagagaacctctacacaaacgacgggaagaaagctaagaaaaacagatgaggaaaaagaacaaacctattgagatttgaccgatgatatcattgaacttttctccaccgaataatgtcccaaacaattcctccgggtccacctgatgtcgcagcatcattcacaatcaaataccccagaagaaaggtatcggtaggtcagtcagtccatacgctcctcttcaatatcgtttacagatgagattgaagaaaattcggagtaaagacgtacgaaaccttcagcgggctcatttcctttacttccaaactcattatacttctttctaagcgccgggtcggaaagcacctgctctcaccatatattcatccggtatgatcaacatctggaggtcgcaaagctagtctgaattttcaaggcatactttggaaaactatgacatacctgataggcaatagcgacctctttgaacttttcctcagcatccgggtcatctctgttctctgttgtcacgagacatgagcggaggcgtttagctttcaatactactgcggctttctttattctccttgagtgaaagagcacgtactatcagggtgaagtttgatagctagtctacgataagccttcttgatcctgaggagacaaaaaatcatcagttgcagatagaattgtcaatatatctcgcttcccgcataaccccaccctcttccaacctcttatcctcgtcggtcgacagattcctcccgtctgacagagagttggctgaacttactcatccgcatcagccgtgactccaacccccaggatatcatagtaccgactctccaatgggcgctcgtttgaacctatcttcctacccttcttctccttacccacctgaccggtgcctgccgatgatgagcccgcgcctgattgcgagccggacgaggtgtcatacgggttgaacgtcggcggatcaaatatccggccacaaggcttgttagagcatcgaatccggaaaggcttagactgagaaacaggactgcgagtgagcaaatcatcaattggcagagaaaccaggcaaagataagaatttaatggaataggaaagtgtcagctgagcaccataagtatacgcgttctttagattcatacgctgagttcgagtctcttaacatgagactcacgtcgaaaagtccaacagagatttacagctacaataaaccccacgaggaggaaaggcatttgatgaagaaaggaaacgataagtacatcatgctcggatcggctgtaagaaagactagactgagaagaatgagcataaggttttgacaagagagctcgaaactgactgtgggcattggacagtgatggtgccttcgggcctaagtctactctcaacgatggtagacattgatctctcctttgtttgcttggatactttgggacagacgaatcgaagagggatgattgtggctggatgagggagcggatgaattggctagagagtaaccggggcaaacaagaatcgacggagaatgaaaacgtcatttctctgtttctgcctttgactgagtattaaaattcctttcgcttcctcaacaacctctagattcatattgttcttggtctcacacgtgttgaatagagcatacatatggacaggatgtgcatgtacagagtagcaacagtacagcataccgattgcacgaatacaacaagaaacaaagtaactctcggccgtctaaagcatcgctcgaatatcttcttctcggttgagtagcctgccttccatacctccatgtaccatgacgacctgtccagtaacatgcccagaggcagaagaagacgccaaaaagaggatctgatttgcgatgtccgatggaagcgcaaactttcggagtggcaccctgatggaagaagagatagaaggacgtggccactcggatcaacagattccatgagacacaccacgcgttagagaagaaaagaaaaaaacccacgtagctatagagttgtacacaatggtagggttggcaagtgcagaagctacagctggtgtgcgaacccttgattccgggtgaacacatttcaatgtagaagttatgcgttatttagtacagactgctatgaagctcacagaaacgacaagaccttaccatccgggcgcgacgacgttgactctggctaaaggggcaatcttgacaatctcattcttgagagagagcgtgaagccgttcatgagagctgatttagtggacgcgtagtctggacgcgcacaagagagtctgttgattcagaacgagtatacaagaatacacagttgccaattgggacataaaagagagaccgtacccgcatggccagcttctccgatcaaaccagcagtagacctaatgttgagagaagaacaagacagtcattaccaaccagatacaaagcaaggtggagaagcctctaacacagaacttacccaacgaagaccactgcgatcttgtgcctgttcttctcctcaacatactttagttgtttcaagaacgcttttaccattatgaatgcacctgatgtccagccacgcagacatatttgggtgggataccaaagaagcttgtatgagttaatcgaggtcaaatagaatagagctacagaggatacccacccgtcagattgatgccaatcgtcttgttccattcagacagcggcatagaagctatcgggtagtcggtgagtccgacatacgcatggttgactgtctcatccaaccgagaggaacacctgtgagcactgaggattagtttcagagaagaagagaagagagaagaggatgccataccaacaaggacctcaactgccttgcccagcctttccttagcatcgacgaagagcttatctacctgactctcgtcccgaacatcagctttgagtgcggcaagacggtcgtgtttgatctctttgagcgagtctgggttggagttgtagtgtgcggtgacgagcgcgccgttatcaagaaacgcctgggtggtgacgataccgattcctccggacgctccggtgacgagcgcatgaacagaatcgagagcaaggtcgaaaggcatgtctgtataagattgtatgagcgagtgaagtaacgagtacgatctatgtggaaacagagtcgaacagatcttatatacctgatggacgaggaggagcaaaggattgactcgattaactcagtcacttccgctttcaccttctccatctcatcggactcgatctctttcgtcaccatcaccatcaccatcaccatcactatcgttcgtcagttctgactcattttgttctaggccattcagtctgcccggcatctacctatgacaagccaattcacatacgaggctccttgtaagcatttcttccaagtttgggcttgcttctcggtatcggattctctcttccttctggctgaacgttctcctcctgatggacatacaaaaccagggccgatatatgcgcttgcgttcaccaacagccggcagcatctcccccatcggctggccctgggaagctgtgtgaccggtcagaactatctccgtgttgtggctcgtacagaacaggtcggtctccagcattctgtcgctttctgtcgctttctgaccaggacagtgttgatgtccctttctcggctgatgatttcgaccatcctcatcgttctacctctcgctctgtgaattctacagaatacctcatcaaatagactatcagcagtggccgaggcacctctcacatatcctgcaacctgtatcgcatgggagccgtttccctcccatcggtcttcgtctgccgccaattcatacagggagctcatcgcaactaccggcgatgctttgcatatatgggaatatatcgcgcctcctccgggaggctataatcaaggcgggctgaaagaagtcgggtcattagctcatgttcgtcttctcgctttctcgtttatcacttatgctactccatactccgagactgtcactcattctgtacgcaaaccaaacctggactcgaacagtccaaatcagcgtcttcatcagggacaaacgcgtcgacaggtgtatacaacagtccggctccgctcacctcactttcatggaatgcgttcaatccgagtagaatcgtaacctccagtatagatactacatgcaccgtctgggtaagctgtctcaaccgctctgtgttccttcacgtcaaacatgcccatagcgaagcctgacggaacaatcatctcttaccctattttgttcaggatattcaaacaagcacggctgtgacgcagctgattgctcatgatcgtgaagtggtaggtacttcaatctcttacatgcacctggtattcggctgtgttgatttgctgagtgctcttcctcactttgcttcctttcatgtgatagtttgacgtagcttggttgccgggtgggacagaagtgtttgtctccgccgggtctgatggatccattcgagcgttcgaccttcggtctctcgaacattccaccattcttttcgagtctacacgagcaccttcatcttactcttctccctcaccttcctcgtcattcaacccgtccaaggcgttgatgcggatcgctttcgatccgtcaaattctcattacctggctacgttcaaacaggatagcggagatattcaggtcttggatatgcgaagcccaggtactccggtcgtcgaaatgagaaacggacgggatgggggcaaggtcggatgtatatcttggggcgagaagggcgtccgaggcaagggtggactttgttcaggaggtgagcgtgctctaccacttctgtgctacattcatagagaactcatcaaactcctctccctctctttctttctgcatgtgccaggcgatgatgctctgcttcgattatgggactcttcgatgcctagtcttccacctcctaactatgcgcaccagtcgtcgattctgccttcgaatccatcaactccgtcatcttctctgcccatatcccgttctacgtcggcttcgtccgaaaagccaccatcggtcccatcaaggaccgagcctagagccgtctttgaggcgccgaccgaaatcgacaacatagcctgtggattgggaggtgactgggttgcctgtgcagggggcggaacaagctatgggggc

SEQ ID NO: 271 - DNA, 10117 bp, Xanthophyllomyces dendrorhous
gaacaagctatgggggccggggctgggtacggtctgtaaaaatatagagcgattcatatacatgcctgtgaaccttttaatttcatttccttccaatttacttgactgtatccgccaatgcttctttctcttcggaggtaacaatcagttgataggccgtttggcaagaacagtatctgagatgaagagagtcatcatcccatgcgctgtgtttcctttccggttggaaacgcgtccagaagctctgaaactttcaagatcgttaaactcctcaccaccatcatcatcatcatcattcagcttgatcatccgttcgatgaaacgttttcttttcttttcctttctttccttcgtactcccttcagctctcgctacccctctcggacatgaatcgcagactcctttcgtagaaccatcaacgatcgagaagtcttaccggccggttgtcatctggcatgggatgggcgactcggccttcgccgatggtatggtaagcaaagctaagcacttcactttcaagattgcttgctgctcacaaagttgtttggatatcatcgtctgacggttggttcttggaacggcggtattgtatacatatgcgggatcttgtctttgatagataggagtaaaagaggatatagagaaactataccctgggatttatgttcaccttgtagccgtcgaaccagacggatcgagcgatcggagagcagggttcgtgagtcccctctttctctacaagtccgatcatgcggtggtagtttacatggatatgggttgatgctgatctttcgatttaacggatgggatatgggaatagtatgggaatgtgaatgatcagatcgataaagtcgcggctcaacttcaagaggttgaggaactcgggcaaggggttagttcaactatatacacctgatatgttgtctcgtttctttgggatattcacaaaggatcaaaaaagttattgaaacagctttgattgtgtatgttgggatcgcaatgggcaacagttcgatgccatcgggttctctcaaggaggccaatttctaaggtccgtcttgtctctgtgctcgaggttctttcagaaccaaacgttctcaatgtgtttccgtgtttgtacgagcagagcttacgtggaatggcacaacgatcctccggtatctaacttgataactgtacgtggtcatgtatacttttggctaggtcggtgaacgtctgaacgagactgaccagttggtaatctcatatttagtttggtgctcaacatatgggaattgcggacctaccggcctgccgaccttcggacgtgagtgctgacatgtgcttgaaccgaacacacgctcatcagtcgatcgtgcgagatgctcacttcgaggtttgtccgacatacgaccaaactagttcttatgtcggggggctcgatctgccgctcgtgctagggtctatacgccctgggctcagaggaacctggttcaggctcagtattaccgcgatcatgatcgattggatctttacctctctaccaacacgtttgtctttctctttccgtttggctttatgtttttcggcaaacttctcaagtatgtgtaaacagtctctaatctcttgcatcggacggacagtttcctggctgagatcaacaatgagagagaatacaaaaacgagacattcgcgtctaacctgggctcgctctccaacctggtcctccttcgattcaccgaggagaccacggtctatccagcgatctcttcctggtttggttcccttcatcctctggactctagtctggactcggccgatgtagcaccagatgaagagagagaaatcccgttatacgatcagccgctttaccaggcggactggctcggtcttcgttcattggacgagaaggatgcgctcaaattggagtggtgcgagggccagcatatggagatccaaggttgttggcacagagtgttggaccaatggatcggaagcgatgtctgagcgacgagactgttcttgtgtcgatcgagtatcatctatccgactgttgatttgtcgaacgtctgccggatcttccgagagagtctttttttatttctttattttaatctttcttcgtaatgttggacatgttttctattccttaaccgcagtgtaacccacacgctgcgggcaaaccagtttctcttgtctcggtctcagttgggtgaactgatccagaacgaggagaacagaatagcccggctaaggaaagaaggatagagaacacgaaagaaacaaatgacgacgtgtgaggagcgaccgcaaagggaaggcggagggaactgctaagatcatccagtgttggttcaaaattctacccggctgattcggccagtttcttccccatcctctgttgtgtcgagccttctgttctctttccttgttgggtgttgttcactgtcttcatctgcgttctttccggttctgatagttccctgttccggcatagtttcttaatatcgttgtttctttgtttcttgtccggaatagagagtcacgaatttcttgcctcgtttttcaatctacttaaaccctatcgccgctttttcctctctctctccttctctcctttctttcatccattgcacacacaaatatcatcttcctcccttctcttccctcccttcttccctaccattcctaaccaaaccttttgatcacccccttccccttccccttccctttcccaatacatcttcaaaagaggcttgcctttgaatctacgctctttacaacaatcacttttgcaaaccgctatctttgaattcagcctctgccttaaaagagaaaaagaaacacccctattaactcacacaacacaccgaaccatgtttgcttctacttctaccaccaccgtcctctccgctcttctgctggcctcgtcctccgcgatggccatgccttcccttggtcaccacgccaattccgctttgactacgctctcccatcttcccattgttggtggatacattgcacccaacggcttgattgagacctccgttgaggctgcctccaagagggacctcgatagaaggtactatggtgactctagaggattcactcgacgtgagttccgactattttttctttcaatatcattttctctcctgttgttgttgttgttgttgttgttgttgttgttgtcttctgtttgccaagaagccaagatcgcacgtgagggaagacgcgtgagcggtgaccgcgccaagagacgtgtcaagatttttgttgaccctgttttctactattcactttcattctaccagccgatcctcttggtccggaaaagcgagcgctcgctactggctggtcttcattgggctgtgtgaccgagggaaagaatgtgagaacgttgagcggatacgcatactacgctgggtctgtcactccagaaacttgcatggcaaactgtctgcagaaggggtacaccatcgccggtgtcgaatggggagatgagtgggttcttttctttctccttttttcccggatcggtagcgatgagattacccgtttagaacttttgtctgatcaattactgatcttcacaccttttccatcaaacaaggtgttattgtggaaactccttcgctggcggaggaggggctgcatcgaccgcttgcaacgtggcctgtgtcggttcgttcgcttttcttttcgtttctcgttccctcgagcaatcatgagaaaaacaatcagtagctgatcttctgatacgtctgttcctcgacctcttcaggtgattcgtcgtccacttgcggaggaaactatacattgaacgcttaccagtacaattcagccagtgccagtgcctctgccggttgctctgtcgcggctgcgaccagtgtgacctcgtcaaagagtgcttccgcttccgcttccacatccgcatctgcctcgtcgtccgctttccaaacctctatccgatcgtcctccgccgttgcttcttccacctccaccgcctccgccgcttctgccaccagcacgagtagctcgtcgacgacgaccgaatgggaagccctcggatgctttgttgataacccatcgttacgaagcggaaagaacgtcctgctcggttccaagttgacctcgacgaccatgacgatctctacgtgccagacccgatgtgccggacagggctacaactttgccggtctggagaattctgacgagtgctggtgtggagatctgaccactgctgatgtcgcgggtttgacgtcgaacacagtttggtgcaacatgccttgcactggaaagagctcggagagctgtggtggtggttggtccctccagctatacgagcaggtcgatgtcagcaccagttgttaaatatcgtaacaacgccaatagaagaccgaaaggacacgcgcccctctccctcttctcgtatcctaccctatcgtcttttcttatttatttagtgttctgtgaacgtctggtatatttttctctcctttttctctcttcttccttctctctccaccttggtgatcgccttggttggtcggactggttccctccccttatctctgtatatatctcgaagtacgctagttcgtacatatctctagctttgatcgtatctatctcgatctagccatatcattatttccccatctctctttcctctcggatttctctcacaagctggtcttgataagagttgtttcgaggggacaagatatgagcaaggaaaagggggctccctccgtttcttaatcgtattattattattcctcggtgaagatcttcgtctgtacggatttgatatctatcatgtgctttgctttgcgttttcacttgttctgtattgcgtaaaagacgagacggacgacaacgacaaaaaggggaggaagagagaaaaagaaccgtcttgtatatacctcggactagccggtttacacacacacaccctagtcaatcagtctgcgccttacgaagacgacttgattccctgaatcgctttggtcaactctgggacatgatcgtagaggtcacccacgagtccaacatcggccacttggaagatcggtgcttccttgtccttgttgatggcgacgatgagcttgctctccttcattccggccaagtgctggattgcacccgaaattccgacagcgacgtatagttctggggcgacgacctttccggtctgaccaacctgaaggttgttgtcagcatatccggcatcgacggccgctcgggaggctccaatggctataacaagatgaaatcaatggtcaaccccttgaaggatgaaacttgctagacatgaagaggaagggcagaaggaacgaaccggcaccaagagcgtcagcgagaggctccatgagtccaccgaactgctccttgttcttcaaagctcgtccgccagaaacaaccttggaggccgagccaagatccggtcgagccgacacggtttcacttgtcgacacaaacttgactggggctagtgacgaaagaacaaaagagacgccgtcgacaagtattcagcatcgagcgatcagaatagatttgagcaagacgacgacaggaaaacgcacaggaagcaggaacggcctcaacggtctcagcttcggccgcgccaccctcgagagcggccttctcgaatgcggtcggtcggatagtaagaatcttgacggcctcggttgatttgatctgggcgatgatgtttccagcgtctaagaaggagaaacatagaaggatcaccaaccgagagagacaggaaacgttaggttcctagaccgtgaagatagaagaaattaaaagaagacttgcatatcggccgagtgaattgctctccgccggcttcgatcttgacaacatcagagatcatcgtggtgtccaacctaacatcgaacgtgaccaacatgattagcgcgcgaaggccaagaacgagaaaatgagggaaagagtacgaaaaactcacaaagcagatacccgggggaacaagtccttgccgactgccgagtgagcacctacaaggtgggagaatcccttggtgggaacgaccgaggccaagagaggtgccaacgcttgattgagggaggataaatgagaacgatagaaagttgagacgagaaagaaagaggtcagaagcgacattgtttccggtgcgagcacgataggaactcacgctcagagaggtagtgctcgtagtcgggtgatgttgacgaaaagaccttggacaggccagggatgctaagggaaggaggagagttgaatagatcagacgtgctgcaacggggtttccagaagaaggtgcacgacctacctcttgaccttatcaacaatagcctggacgtccccttccttgccggtgacgagggccgagacctatgagatagaggtacacattcgtacaaaaaagacaccaatcagagggattagaggcgaggtctttgttccgatgcttgcaaagtaacaagcaaagacagaaggatagaagcctagtgatttctgaactcagagtagagagcgaccgtaggaaagaaagagagagagaaaaagaggggaaggatgataaagagaaaagcaaagaacgcacgtcgtcgccgatagccttcgcagccgtgatggccgagagagacgagggaacaatctctcctcgtttgtgctcgacaaaaacgagagaagaaagcgaccgggcctgaagcaaggaagacgatctagagataagcgaggcaagagtagtagctgaccgagcacttgatcgaagggcgagcatggctatcgacgttgtaggatggtgtgggatggacggagaaagaaggaaggaaggttagatgtcggtgttgcatggcgtgaatcaggcacgaggaaaaagagacgattcattaggaaaagtctctattcgttttgccagatcgtaataggagatgtctattgaggcgatagtccgcccgagtattagagaaaatcgacagacatactagagaaaatgtgtagtcgagggagttgcatgtggcggtaggcaccaggaaccagagggcgtaacaacgtgtgtaaggcggtgcttgcataaggcaatgcaaacaccttcccccttccatcacttctcgagtcgtcgatagtcgcttacttcgactgttcagacgctgatcacttgaacttgaacatcaatccgttcaccaccctgacatgtcactctcgatccttgtcccgatcgttctgatacttccgatggcctatgtggcctactcgatcgtatttcctgctgtgagtcctggttatgacggtctggactccgtgccgaattcccacaacgaaggatacacttggattcctctggaggcccagcgagcgctcctgttgaggacgtacaccccaaaggaacttgctccattcgatggcactcagagcgatggtcggattcttttggcgatagacaggaaagtctttgacgtcaccgccggtcggacattctacggacccgatggaccgtacgggaactttgcaggtagagacgccagcagaggtatggcaaagcagagctttgagttgggtacgtttgtttgactcttagtgtattataggatgtgtatataagattaggtactagtggatgagtgaatactagagtaccaaggcatgctcatctcgttcatcctattaactctctaaacagagatgctgacaccgattgatcagccgatcgataagctacaagacctcacgccttctgaaatgtcagtcagctagccagtttgttattctttcttcggttttcagctcacaatcatatctatatccaatttgcttttagtgaaaatatgaacggttcgtatcggtcttacggtccggattgaactttatcagaccagtcaatctcacttctatctgtctctttctcttaattcctctcaaaacaccctctctaggctggatcgaacatttcacaaacaagtatatcatctgtgggtcattgatagagaacaccgattcatgaactacttttagctctcctttcgatcagcaaggtatttgttttctcgtcagatagtatctttcaagaaggaaaaaaagacagagcatacatagatcatactggtacaacctcatcaaacccacataaaaacatgtagaggaaaaatggaaagctcatgcctagggaaggcaagagggcatagacggtctatatatacagaggaaggttgaagaagataaagctctcgcgcgcgcgtgttgacaaccatactctcaagctgttcgggagctgatgggcatccccatgaatgacgcacccgtatcggccattgtaaattgaggattcagtccaacctacacacacacaaaggaaaattgcgcacaaaccaagaggaaggaagcctctccgtggtcagtcgggttaaatcaggagcaattggcttgaatttatcaacataaatagtgcaaatgtccttactaaatgagcggtctctgacttttcagctacctcatccatagagtaaccgtgtcccttcttgtccgctggcatagcatcgtacacacttctggcatactccggagcgacagcgtatagctggatcagatagttcctctgtacaatcgaatctgcgttctaatattgagagtacagatcggaaaggtaaagacagaaatgaaagacgcaggtcagtagagaaggaagacgaccaaccctttggacacgtcactcatgaatacactcaccttgagcaatctagccgtgtttgaatgcaagtttgctcgctgttgatcgttcatcacccgtcggtaaagtactctgacctggttatattctgatggatgaccttgctgtcgatagtaactctttctcgatactacgttcgaaccgacctgcatcggaatctccgcgtaggcttggccgccaaagccaggtgttgaatttgcgcttggctcggtggagtgatacgagttggggaagtagtgtggttttccagagccgtttccatcagttcgcatggtgccattgaagttatcaggcgaatggaacttgctcatgaacgggcctgcccgaatgtgtacatattgcgggtatacgatcagctttagctcttgaagtgcacacgaggaaataatatgggagagaatggactgacagttgacgggaatctgatggatgtttgcgcttcccaatcgatgatactgagcatctcggtagctttggtgatgatgaaaagcagctccagtaggtataaatccctgatctgagaatgagtgctattcggcagatggatgctttgttactcacaagaacattctccattggagaagtgtatctgggctggcttcgattcctggaacgagtgatccaggggagaatgcagcttgctcaacatccctatccgattgagggaaacagattttattttattttccttgttagaaagccaagtaggagtttgagatacatgacagattcgaagtcctcaccgatggtagtcttcggggttccggtttaatatgagctcgccgacttcggtcatcgagtattctcctcttggcctgtaaacaacggttgtatcagtccgttctagacaaaatcactctgcctcttgcgcgaagatgcgttgcagaaggaacaaagggttggaaaggacacttaccagaccttggtaacatcgaatggatcgaatgcacaagcagcagcctctttgggtttcatcacctggacgaacagtgtccacctagcatcacctccactttcgatatggtcgaatagatctcgtttcgcgaagtctgggtcctctccacattgaatcagcgcttcttcatgggtaaactgtttgacgccttgttgactcttccagtggtactgatgagaaaaatagatatgtcagagaacgggtgattcagcacacacatgcatatatttcaagcgtcaggagatagctctgagaaatgaaccaccaaaaacagaccgaccttgacaaagacagactctccggcgttattcgtccatcggaaggtatgacagccaaacccagacatatacctccaaccgaccggggtaccataatcgctgaacaacatcagaccagcatgctgtgactctggtacgttcgccagaaaatcaaaccaggcattgtaatctaacaagaaagatttactt

SEQ ID NO: 272 - DNA, 41978 bp, Xanthophyllomyces dendrorhous
atgcaaaatcatcaaacatgaggagatgttggggaaaacgtcagggacagttagtatgtgtaacgtttgtggtagcaaagactagagcgcaaagacatatgtgagcattatttcactcacgggtttcgctgttgagacctgatattgtcagggcctgacagaaatgaacaagaatagccgcgcacatggttgagacttaagaaccccttcccgttacccatttagggctgtacaaaccttgcatgggatcccggacaaagaacactggccaagaaagcccgacgagatcgtagtttccgtctataatccggcgagaatcagaaaccgtcagtgatgaagagaacgataggtaaatgatgttgacaaagatcgttcgatttgccttcagtgtaaaattttgtagcaaaccctcgaggattacgagcgctatctggatactctctctacaggtgaggcgggcgcacaagaggaagatcgagaagatagaaaagagaaataaggaaaacgatgtgagcagtgccggatcggtaagagagaagacaagagtacaccacgtacaccgtatgtaacctataccaatgaacccagaaccagaagtcagaatttcagcgcaggaaaagaaagaatttgaaaggagaaaaaggagagaaactcccttaagaaacagagacacacggtcgagaacctggtataacaaggagttgactttcccatctggaaaagctttgctttcgtcaggtgagaaacatctttcgttgtggtgaacgttccaaaagctgaagatccagctgggtgaacgattcgttcctatgacatcccagatagaacaaggattcaagtcaattttactctttctatagcgcgctgtctttgctcgtcccagacagagagagacgaacagcaatcttcatacgatcgaaagcctgttgtttctccaacaaaaggggatctccctggtacggtattcctccaatgttgagcgcgattctttgtccgttccgttttatcgtacgtgaagacagaaaagaatcagaggagatttacttgtcggatcaatcaatcattccgagagcctaatacctccagatggcgaaacctgatgaagacaaaccctgaatgaggaataacttgtccaaagttactcgtgtagaatggagagttatccttcgcgtcctccttctcaaccattcctgccatggccgatcccataccatcgagagaagactgtgatcaacatactcgtctaaaaaaaacagaccaaaacacagaagacagagaaggattgggaaaggacaaagacagagggggttactaaccagcgattcgagaagcagtcatcgccggcccatcgttcaaacctgagaacgtctgagatcgttgagtaggcctcggatcggcgcctgggatgtttgaaaggattgatttagcaaaatccgtcatattcgttcagatccgatgagtgtatatatgtggaggaaacctggttgagagaaaattgatgaatggaggattggagttgaggagagggagagaagatggatctatacgatgggatagactgtctgtcgagagctttataagtcacaatcgatgagtagccttgtgtcctctgtttgagatcgcgtacatatcgagtcgatgaccttattcgatctccaggacacgcgcaatcatgggaggtatgcaagagatctcgttcgagtggctaccgagagcaggattgaacattcgacgggcgaagagggtgaagaaatgatgaccataaaggacaggcaagcaggggaagagagagaacggaagcaagggtgatgtcaggagacagtctcatcccgatgttttgtacactccttctgcatcacacgccggcaagaatagatctcgaggcctggcggcgatcgaacattgaaagaaaagacagggatgtgccgactcatgcgttttcgacaataagagaaaactcttgcagtttcacacctcaggacggcccgcggagattaggacattttgaagggaaaacatcatgttaaaagtaggaaaccccaaaaaaacaaaacgaataggatgataaatacgaatggcaatggtagaagggacaaatagatgcgggtgttagatgtacaagttatttattacaacaaatgatgagtatagatgagaaagccctgatcgggaagagaagagaacgcctttttgtttgtcttgatctagataacgtacgtgaactcatcgttctggaaatcggtgatgtccaacgcagcgttgctgccgaccttggtagcctgggcagtctcctcttcagtctgggcgtcgacgatgggcgctccgtacttgatgtccatcgatcggtcgtgaatctttgccggctttccattcttaattcgagtcttctcctttcgcttgttcattcccatgaatacgaaggcgaggagtccggtgacaacggcctgggcggcaaagatacccataacagagccaagacccttgtggtaggctggtgcttggttggcagtgaacaagagaggaccgacgatgtttccggcggaggcacccatgttgtagtaagccaacatgaccgatcgcttagtctgaccaccggtgttggcagtaacccaggagacgaggatcgggttgatggcaaagagggcggggaagaggtagtatccaaacaacagagggccggtactgttcggtttggaacgtgggatagcgtataacaaagtgctaccgacaatacagacgacggtcaaggaagcgatcataatggacttgatcttgaacttggtggcaaccaaacaggcgaaggcgatgaagataagctggagaacaccgaaggggatgttgagcaggatggtcggtctagccttgaagccaaagccgttgatgatgagcgggccgaatacgttagaaacactggcgcccaagttgttgaacaaggcgagggaaacgtagagccaggtgacgggcgaccaggaggcctcgatagcgtgtttccagttgaagtgggtagactctgaaccggcctggttatccttgactcgctgaacagcccagactcgctcttcttcggtgaggaatcttgcagaagcaggagaattatcaagcctccagtagaggataggaccagtgatgacggtgatgactccagtaataaggaaaagaatctggtagacgtagagacttccaccgtgagcgaacgaaacggcccaggtgaggaaggaaccgatgatagaagctcctccgttcattccgtaccaagctatattgaatcaaggaatagtgttggtaatgattgggaggcgcagaaaagaattcatatgaagaacgtaccagcaactcggataggctgttcacttcgtcggtaccaagtagaggtgatcatggcaaagagcggcaagcaactggcctcaaagagacctgtaaagaaaaaagaccgagagtgattgtcagacaaaagtgcagccgaaagaatcgcgaagttttaaatgactcaccaaggaggaatcggcaggcaagcaaagctcggtagttggttgatgcagccaaaccacacctggaaagagggagaaacatcagttttagatacagtcaatcgagctgatttatacgagacgagttcgtacattgcaattccccaggcagtaacgatgaagggcatgagatatcggacaggaacccggacgatgacaaaggcggaaaagggttgccaaccaagttgggcctgtgtgacaacagcgacaatttggtgatcagttggcgttgtgacatggaagaatgtgagctgtgaggaagatgattgaggatgaacgaacccagtaaccagctgaaccgatgacactatactggtttcccaccaacttagcctcagtcttcattccaaagacggctatggaaggtaaagggaaaaaaacagttcattagcgtcgtcaccaagaggaaagtgagcgtccgataaacgcacctccatatccgatcacagacttgtcgagaatctgcagaaagtagacccagataaggagagggaggataacctgtttatttggtagagggtaaagcgactgcgcgtcagccacaaaccgctctcatggatggctttctgggagaaccgagacaacgaccagccgacgacatgattgggagaacgactgaccttatcaatctttcgtctaaccagacttgactgaatgattcatcagaaacagagagtggatgtcggtagttagtatcggagagggatctatggagcgcctggacagacggatgagcctacctgttcgttcgtcatagggatcgatccggcagagaatccggggacgtgtctatagaagagaagagaaaatgttagatataatgacgatgaagagaagtcaagtcgacaagagaggaatacgtactcgaggtggctctgggttccactcaactcgaccttctcaatcgagctggtcttttgaagcgaatcgctcatcgtgaaaaagagaaagctgcgtcgactgtgtgggtggggatggttggatgtggatgctaggtgctaggtgtgttggtgtggttgtgtagaacgagagctgaaaggtggattgatagtagggtgagagaaaaaaaaaacagaatgagagaacgaactgagcggccttatatgttgatcggaagagagaactctgtatgggatggattaatagacagattcattcaacgcacgacgagaacatcggaaaaaaagaaacacacgcccgctctatcgctctgagaacgcgcgaaggtctctcagctcgcatgcaatgaggcaagatctagccaaacaacaccggtcggctatcgatggttagtgtttctctctctcttcaatcagccaagacgcgtgtggaaataagcagtggagaagaactaattcggcgtgttaggagacgacgatgagaatgcatgtctccggacgtttgttagcatggccattggatggcggacgagatctcacaccagttgaagcatccgacggtatcatcaaagtctctcccaccagtcttcgcctcgatccccgggtcaattggagaaggtcggaccgagttcaggagaaaaatccaacgttaaccgagaaaaacggtgtaaagtggattgtaacccaagaaaattcgttcggctcaccggatcgattcgccgaagatcctaagttctggacttttgttctctctccgcgtgcctatgtgctttctatatgtgcctgatggtatgtatctgtccctctctctatcgggcatagcaggatcatgtgtgagcgattttaatcgccatggttctttcgatcattgaaacatgaatcaagactgatagcatacacaaagcgaaacttggcagcacaggccagaagacagcacactggttgcgtctgtcctcggccggtatccagggagtaagccggtattccggcccatgtatccggatgtgagtctgtcgagtctacatccgttttataccgtaccataccgatggtccgtcgtccgtcgtctcctctaaggtacaaggcctgcatcaattcgcgtctttacacggtgatcggcaagctgaactggggatcagctagggcgaaaaatacaatgaacgagacaaacgcaggtaggctatgacgacacctagacagataaaccccgagaaatcttgaactggggatcagaactctgttattcttctttatctgtccttctctgcctttaccattgaagtttgctactcttcttcctcgtctctgaatgctcttctgtgtacggtacatgattaagctttgtctgtctgcaggagaggtcgaggaagcaaacttgagatggtctatcgataaccgagaaggacatgaacaacaaacactcactccccttcccactatacatcacccacaactgaatgacacaaaaaagataaagattcagaggtatagacattgatattgataagaattcgttcatgaactgcgtatcatgtcaaccgagtggagaccgaggtcttgatcgaaaggcctttccacgttcggaaatagtcggaccctagcttagatgttcacagctgacataacacaacatgatatatatatatatggtgttggcccatctttcttaagtctgtctgaatgattgcttgcgggctgaatgctgtgtagattcgaatcatatcgacttaaagaaagaatcatcggcattgtgtatagtaaagtaaacaagatagggacagagaacaggaccttgaagctagcagcagccttcaatctcgcggcacctcttactggttcttcttgtcggcagttacagtctgaattcccttcacgttatccatcctcggcggcacgctcacactcgtcaatgccatgatcccgaaacccagaatagggatcaatattccgaacgacacacccagcatcgtcaggatcgaagtcgatgtgatatcatatcgggctaacaacgctgtcttttctccggttgagtggttaccgtttcctttgaagggcgcaacaagattcgagtaatcctcagacgggacctcgagggtagattcctgtcgacgttcagcctggacagcagccatctctccaacagcaggatgaccggtcagcacgaccaagtgcgagtctggatacgcctccaagaaagacttgaccattggagccagcagagcatctaagacagtgagtgacggcgatagtgatgatgtcaaacgaaatggcttatcagtatcccatccaggcacatccattctccataaaaggatgaaccctgaaacataccctcccaggcgagcatagtctcccgactttcaccctcgatctcctcccgcttggccatcacttgaaccaatctcatcgatctatccatctcgagtggcttcaagtcggtgatagattctccggccttcaacgtgtctactcgggctccacacgatctcgagagcgactgaatcgaagcttctaagcggtcaactgatccagaagctacgtaagggatcgagagcgaggatgtctttaggaacggagagagaagaggagtcgatcgcaagtctgatgcatggagctgatgtcgcggaagagagaagagaaagagttgagacagagtggattcttagcattgacaactatcaataaggagaacccaagagaaagtgatttggaagaagcctacagattcttgactgatgacgagtactcccttcaatccacagagttcatcgccagagaggagttcatcaaacacggaagatgccgaaacgataggacctttagcttcgactgcttgttcgagagattgaagtcccgatagactgcaccagaaaacagcccgtccagagtggaaaacacgtgtcaggtggttgattcagtatgtttagaatgaacgatatgaagagtagaagagctgaataaagtggaaagaagaaaagagaaagaaaagggatcttacgttgaatcactcgaccaagcgaccaatggtgacgtcccaacaaacgccaacacagctggtgagagagtcagagtagaaataagagaaagagcaagaataggagatcgcatctttcgatagaacggtgttctttgaagcaaagtagacaaacgaaagtcaaggatggaagcaaagatgtagtatgtatggcgagggcaaatcgatgtaaccccacaaaagcagtcgatagcaatggtcacgcagtgttcgtaaccctaattcgccaccgtatcatggtttcaatcctaatttgatgtctgtcgctcgttagaatctatcgtttatcgacagatttttgcccttcagatgattagatataactgaggtcgaagaagagatgactagatttccaatggaaattgctgctctttctcatttcttttaccaaagagatagagaaaaaataatatataagatacacatacataacgaagttcgtacctagaaggagagtctaagcgaatacacaactacacatatataactggcttgctcgtttcgacaagctccagaatagaatagacgtcagaacgacaggccgaaaagaccgacccaagacagaagaggaagaggaagaggaagaggaagaggaagaaggagacaaaaatgaagaagagggtggttgaaggaaagaggaaaagaagcaggcatgtagaggaacgaatagaatccgaaggctcgatcttttcgattcaccgaagacagaaatcgagaaggcagggagagaaaactcggaaggaagcaaagacagcaaatacagggttcaaattcttgtaagaacgaaaaggcatcgaagaaagggaatatatggatacttttaatgaagagaccgaaagagtggacggcatatgatgattgctcgttaataaataaataaatagaaaacgaatataaagaacgaacgaagaatgaataaataattataagagaatcattttgggtgatatgtcttgggttttcctttggacaaaacaggtaaccatgcagagaagagaggacgtgttggacaaggaaatgaagcctgtagttcagcttgacttccaccttaactttccacgtgagcaagcttgtttttaactagagatatcatacaacaatctttattgtcagctctcgagctatgcttgccatgtactatacgtcagacttacagtctctgttcttcttcatgctaatttctaatcgggcccgtagatctttgatgatgtcgtctcgttctgctagtcgactctcgagcgtggtaatgtattcttttcttcgctctctaaatcgacgggcaccaattttatttctgtggtgccgacagaaggcatcgaaggatgaaaagttagaacaatagaaagaagccaaagaagaggattgcctgaatgactaaagcttacctgagctgttttcgggcctttgcgttgagcttttcatactcctccttaccaacgccccagtaatcatcctttccactcaagtcaggcgtggtggctctgcccccattctgttgacccatgcaaccaaaacccatgtcgatgtcgccgagatcgttgaaccgactaggtctgtctggaccatatgaatcaaagtcgctcggtaggacaggcagaaagtcgtcctcatcttcggagagttctcggatcgatcgagtgtcggacgagtttgaaggaaccactgaggaggatgacagtttggatatgctgtctatcctctcctgtcgaggggacatggtgtttgatggcttagaagctcgagaaagcagattagtgggttctctggccgcgttggcaagcgaggactttcttgaactgggccgagatgaagaacaggaacttttgagagcgtgtcgtgtactgtcgtccggcgggagctcggtagcgaaggaggaaacggctgaagggttgggtgcgttatgtgacgcggtgaacggcatggggtccgaattgtttctgtttgcggcatattcgttaggccgaggttgagttctcagtggcagacgagagagatataacccaaacatgttctttgttcgctgctgttcctgctgctgggctggctgatacgatgggtgggccggcttgttggaaggaacagagagcgaggaccaaggtctttccaaggtattggttcccggacgatgggcgctctgaaagggtgagcttgcatattgatcgacttttgagccaggcgcgggagggacgacccaatcacatggttctggcttgaacgctcgtatcgattgggcatgatccgggtatgaggagagtgaagaatgagtggagtcttgatagaaggttggaaagtagctagcggtctctggttggggtaaaggcgtgctgtgtggcgatcgagagacaagagatcctgaggatggatcactgtccgggccgctcgagtttgttgagcaatcggtgttgtgagctgtgcttggcagacgggatggaggaatgccagcgtacgagccatattcattctttcgagatataaagaggagaagcaacgaaaagggtgcgggttgatcagacagataatcatccgtttgagaggagataggttttacgtacattgatcaggttgtgcaaagcttcggtcgtgggtgtaagcacagggcctgttccagagaactgaagatagcgagagagagctaaggtcaaagaagaatgaaagggttggtttcagactggataagaaaattgatgaatttgcagttcgcatgagagtgaataagagcgacttacaccatgtggatctattaactttccccagacgtccagggtggctccaggaaacgggtaagcgtcgactgtgcccagtcatggtcatcaagacagatatatggaatgtcagcaaatgcgcttgcgtgtatagagagagtggaccatgaagatatctagacttacaatctcgagaactgattgtgaatcaaaagatataataaaaatgtggaccgccaacaattcgagataagtgttttggtcaagtcttgaacaccaatacaacagtaagacgtacggtgttccccaaaacatgtctgtcgttgtggcggttgcgtttggcgcttctaacaggatccgctagttttccgggtggtgcctttttaaagggaatttggatcaagtaactgagaccgcagcgaatgtattatctgcacaggcaagcgaaggtgcctaagaaaaagattgctaaggccgaggtgacagagaagagagacgaaagcagaggtggaagcgagcaggtaagaaggaagagcacgacctgagtgaaacaatcttcggagagagagtgtgcgtgtgtatctgagtaggtagatggataagtggatatgagtatgtgagtgagtatgtgtaggtgagtgtacgccaaggcttgaatggagaaagatgtacggatgtttggacgtgtgcgagaagaatccaagtagaacagagaaggatgtgagcaattccaagaggaaagaggtaaaagtaaagaggtaaaagtaaagaggagaagggaaacgctggaaaaagaagaaggggagtgtttattaagaacaggaacagcaataggagtagggacaggaacaggaacaggaacaggagttagcgatcggcaaagaggagactgatgatcagcaagccgagatctatcaggatcaagacggccgtcgagtgatgatctctcatccccctccataccgggctgagggaggagaggcagattacacataagattggaaaatcaattaaacccaagactgtatacggggatggccatcagaagcggccgggcggacagtcccgggacggctcgatcggctcgcgcctggctgctggctgccgtcgtctgtcatcgagaatggcggaaaaagaaggaaagtggaggtcttgccgatgaagggtcggccggtgaagatcgcacaaacgccggtttgaaaagcgcagcaaattgccctcctcgcgagatgccacccggaaggtgagttccgtccaggatcccgatatcctggaggaaacttaggatgagtaaaagaacgacacaaatcgacagaaaagaatatgtacgaatgttttgtcatcctgtagatttcgggtgtgggtgagtgtgattgtgtttatgtgttcttcctcagtcgttactatgagaaagttatgtggtctatctgtctgttggctcgatctgtctactccttccgtcgatgttctcattctgttcgtcttgatcaatcgtccgtctaagcatcgaacttgcttggggacaagtaatcaccagttagacgacagtcatccagaatgaataacgtgggttttttatgtatcgtgtctgaagagttttaatatgttgttcttatcactttcttgtttgttcaacaagtaaacaatgcctatcatctgtcgagcattggactttttaaagatatcctagtccatccctcgtctctcgatggggcatacatatatatatttatcttttctgagccatttttgattccgacgagaccatatgcgtgtggtgtcgtcaacgggctcacgtatggagttagcttttagccctcgcttgttttctcggtacaactaatacgtcgtcgcctgattgctctatccgattttctagttctagttcatacttgtgagacatcttggcacaagaaaatcgaacagataattcagagtcttgttcattcggtctacattctcttacgaggaggagacgaagaaacggtacatgacaaagtcttgaaacgtaaaagaccggtctaattgtgtcgatatgaccgccgaggtggatgattctgttttgtcagcatcgttccggctttctccacttcagtcgagtcagcaactcggccaattttttttttcaattgctcgatggtattggaaagcgtaaatagatatcacacacggtccgtctcgtttgtaaacaagaaaaggaatcttcatgaatttatagtccactaatccgtttccttggtcttcgcttccctctcctccctctaagcggcttttggtttccttttgcccttgccgacagctccaccactctctgaaatgatcccgaaatttcccttggcgaactcatccttcatccaaatctcgcattcctcaaccgaactcgtcggatgatcaaatccccaagacacaaccttgtccaatatcgtttttatcatcggtccacccggcaggccaagagaagactggatggcgttcccgtccatcatcggcttggactcgattgccgcgggaagttccaatcggacaacgtcatccgtgaatctgttgaacctttcgaccacttctttagcttcctctggaggtcatatgtgtattgggtaaataagtgagtccgtttgtgttttcagagagggtcgcaacaaccagagtagaagccttttagcatctagttcgttgatgtgagacattttcacacacacatgtatcagaaagataggatcatgacactcacgtcggaaggcgtttgtctctatttggtatagcggtacgagctccatcagcatactccagaacacagagacatcccatgtggtgctcttagacgggtcatgcacataaggcatccgaaggacgttccctttattttgattttaaaaaggataattttcatgttgagtgaaagaacaaaaaaacagggttgtatccacagactgaccgatagtcgacctgcgtctcgggtcagaagcgtcccctgtagagatagcatggattggacgctcggactgatataacttagatacaaactgtgcttctgctccacttagctgtttgtatatatcaagattgtcagatttcgaaaagccaccttcagtttgagattcccttgttaaaacatccctacgcaccttgatagcctccttgatcaacatctctggcgcgctttgctcagtcttcttcaccttgactcgaacatttttccaaggcgctgcgcaagctgccaaaaacaacttttttctgatgtcatcctggttgatatgagcaaacagagccttggccgggactggaagctcctctccagattctaaccgggccggttggggcaaaggtgatgacgacagaaagtgagagaggacatagccggcaaccaatgcggtcgaccgaggtccgggcgaagcagtctgggttgaggcgagaacaggtgggagtacaaagattgagtcgtacagatcaagagaatcgatcagactaaatgcgtagagcgcattcttgtctgcagtatcacaattcaggattctcatcagctcggtcgaagcatttttccagagttatggaacacaataaaagaggtagaagaaacgcgagattgaaacgaacgtccaaacatcttctcaatctctatcccgacacgttctctactgatccgttctctgagtcctttcttgagcgcatcatccttgcatgcctctcgaatgtcatccgtgagctcaaagttataccgactggcaaacctcacgcatctgatcaacctcaacggatcgtcctcaaaggtcttgtgcgcctcgattggagttcggatcaaaccatgctcaagatcggtcaaaccctataagagatgagtgttaaaaaagaggaagagaaaggaagaaaacgctccgtctgggtcaaacacgctcgctcagatgtaaaggctctgcatagacgaaccatctgcgtgtgatcttcgacagctcgagtgtgcacgttgtaaaacagagagttgatggtgatgtctcggcggagcgcatcatctagaggtgtcccaaatttctgacggcgtcgttcgccaacaaaagcgcgaacatcttatgagcgttcatgaagagagggccatcaggttcaagaagagtgctggcctgcctgcctacctaccatttcactagggatcctgctgccatccgtgtattcttcgtttctcaaattcacgaagtccagatcgagacccatgataacctgcttggcagtctcgagatgtttgctctgttccggattagactcgatctttgcgacggacgtccggggaatctctggatgatgattcgagagaaatgaagaaaaggcaatagcgaatgggtgaccggtatggttggagagtgcgagatcgatgtcatcacatggtagagagaggagctgagtgaattaaccagatatacacatcaatcactgccaacgaaccgtcagatacctttcataagtgggttgaaagaaacgaaccttgtcccggacccagcctcctgcaattctgcattctacttgaggacctgacggttctgtctttgcgataaactctctaaactcttccaacagaccacacagcttgtcttccgccggtgtgagctcaatctttctgttttgattgatcatctttcggttcgctttatcaaaaggtagaatgaacgtggagggcacggaggaggtgaacgtcttgatatgcggtctgatgatgtacggtgatggcctggttctgatataagggagtgtgttggctggcagtctcatccaaccgaaatgtgtcgagctggaaccagacagaagaaggtaaacaagagacgaagagtcaagctctgttgtagagaaggaagagtctctgagtgacgattgatgatgctgatgatgataggatttgaagaatttatggacagaaatccacaagaaaagactataaatctttgtagttcattctcctagtccatacaacgattttctatagcctccatcaggattctcaccttcactcggaactcctcgagaaaaccacaagcagacgacaattcccagatgtctttcttgaggacagggaatctaaacaaaatcatcaatcttgatcagttccctgttttcaccctcgctataggaatcactcttttggctgggttgcacatcatgttctcaattttgaaaccaaagtggaatgcaaagggcaaggtcagcctactcctcttattcctcatctccgttctatcaccagctcctcgctcacagcttattgtctcctgacatgcaaatacgttctctgatatgccatgttcatttgttgtgatgaaatgtagcattgtatcgtgaccggcaagtctcatcttgataacaacccgctgttgcattaacactcagatttcctgatctaatctctgtaacgttcccaacaggtggttcctctgggctgggattcgagctagcggctcttctcttgcaaaggggggcggatgtcaccataattgccagaaaccagcaacgcctagatgaagcgattgagaagctcaaggttggatcacctcctcagattgtgtcttccaggggttgtatcaacagataatacataggaaagagctgaaagaatgattgttttgactgtttgaatcaaccctagcctgtctcgtcatcctctcaatcacatctccacgccatctcgggcgacttgtcttcttctactggtgcccgggaagctttggagcaagccataaaatatcatccagaaaataaggcagatgccgtattcatgtgcgccggtgtatgtcgcttttctgtctggcgtttcacagccgtgtccaaaccaaactgaactcttgtgattcatccctcgcataggcttcctacccaggcttcttcctctctcaaccggattctgactttacttcaacgatcgaccagtcttactataccgcgctctggacatccagagctgctgctcaactaatcgcccgtcagatcctgtcaccctccacttccaaagctggaccgccttcatcaccacccaagcttgtctttgtagcttctaccctgtccttcttgtcctttgctggctattcatcctattcacccgcaaaatatgcgcttcgtggtctctcggacgcgcttcgaaatgagcttcagctcgtcggaattgacgttcactgcttcttccccgctgggatcattactcccggatttgagaaagaaaacaccacaaagccgcaactctgcaggattatagaaggaagcgacgagccgctcatgccagccaaggttgcttctcatctctataaaggtttgtctctcggctgtagctgctcttgtctctcacttattattgtcctcgctgtttgtagcctggaagtttctttgggttatgtacatccactttcttcatcgcagaatagagctgactgacatattgttcattcgggaacgatgaattggatttaggtctcgaaaagggacagtttcatatatcgtacgatatcgcgactgagattttccgatcatctgccggtggattagctccatctaatggagttgtccttgataccttgctatcgttcatcggtcgtgtacgttccttcttctttctttcgatcgtttgaagcaaagccgatctgactcttggtatgtgtttgtgtatatgcgtttgttatcgtggtaagatcggaatcccaatctggagaatatgggctgacaaacaggtcagagattatcgggcagagtatcttcaaaagctacaagccgatggattcttcaactagacatgctcggaccgtttattcgttcggtttcttcatattcatctgatcgaattattcttttttctcttcgtgttcaatctctaactctgaaatgcttcatggaaccagataccacttttgcttatgacagttcaggcgaatgaatgagatgactatctgactgtctcaaacgatttgagatcaatgaaaatctcctatgttgaccatccaaaatactgttacaacagatgttacatcgcaaacgaagcagcccgcggagagcgatggttaaaggcagagaagagaatcaggaagaagataagagtgaagagaaggattaaaaaaagaaaaaggttctattcccttcgccgagctttttccaccccaagacctcttatgtccgcgtaaggtttatatagctcgtcgttgtggattcgtactctgccgcaaagatccttcgttgctctctaatcatccacctacgatttgttcaggcaggtttgaaggccaagtttaaaaaagacagagagatgatgagctatatccttcctctctttgagcgaagagacggtagaccacaagaagatgactaacttcataaaatcttgaatttgatctcggagaatgttgacggactcggcatccatgttgctccccgcgagataacttggcaaatttacttcaacaatattcgacacgataaaagagaagtgagacaacgaacgaaaaaaaaactcataaagtggatgctagacgcatagaaagagattagaaaagtgagaccgaccgaaaagtctcagcaaatgctccgcgccataaatcttactcggctcgaactcttcgccagtagtgacctgacctttggaaatcgcataatggtctcttcgctgggatagatattgctgtctttcgaaccggtacagcaggtttgctccaagtgacttgtcaaaatatagctgaaggccagacaagacttcagtcagaattgctattgatcgactgattggacatcggttcccattcaagagtcgtatgaaagccgtttcatgttgaggtgctagcaaatgtcagtacactttgaaacacaagcaggtcaacaagaaggaaagacgaacggaatatcaaccttcctggaggctgtggcggcttcgagtgcagcaagcgcgtaattcctgtattcttggatcagctcggctacattgggcgtttttggcaacggaacaatctggcgagaagcacactcagacaaattcagtactctctttcattcttgcaaaagatagaaagaaggaacgattcgagatagggagaggatgcttggaacggacctgattgttcttcgtgacattttcccaatcatccaccagctgaaccttcagcggttcaggtatcggaattttgatgtccagtcgtttcgcaggttctccctcctaaaagatacagtctcgaatgaatcaacagagaagaaagactgtgattgggaaacaaagacagagaagactgaccacgtctccatctctggctctttttcgtcctactccagcagctccctctgacttccttcctcccttctgaggccctgttgttgagcctcctaaactcgctctgcctgtgggtgctgctgtaacgactggtggtggaggagctgccgtcgctttagctttgtcgattaattctttctgcttagcgagcccagcttggtcaaacttaatgagcctcgaagaaggcacattctcgtcccaactattgaaggatacgtgatgagcaagtgaaagatccatttgaggaggccaaggtcgaaaacatgcaagttagttgaactataaaatctcggatagaggtaaaaccttgaatgaagacgaacctctgtttccaacccttgtaatgcacgagatacagagggccgtgatcatctgcttgcttagccgaaggcttagtcttctcggtcaccttgaggatctgatagatcaagtattcgaatatgagtgcgatgttgggttttagatagatcacaaagagaaggacaaagatagacgcgcgagagaagataaagttgcggtgagctcttgactgaaagaggcgaaagtaaagaaggaacatactttagcctcatagagaagaggaccatgaaagcagaggacttgttctccctgtgagaacgtggtcgacatgaagccaaagaggaagaatagaagataactggtttgatgggtcgctcaaacgagggaagtatatggttgtttgaggtcgacaaaggaattggacgcgttcaaagtcttctcaatctacaccttggcctttgccgcttgtccatcatcaaccgtcaccatcatcatcgtcgccgaacgcttctgtactctaatcttgcctgcttatctttctgttcgctgatatctgtactacgagttgacaccaatgcctccaaaggtgcttgctccgttggcgccggcaaacctgcggtctgggctgaacaattactccaagcaaccagagacttcatccacatccccctcgactaacaagtctactattccggccaatactacgacctcaattacgaccacggcagctgcatttcaacctgtcaaaaattctatcgttgtttctgctagacaggtaagatgatcgtgcatttatgtaatgaggtcattgctcgtgactgacatctatcttcatgtcttcagaggggaaatcccatcatcccacatatccggaacgtccagtgggagtacggggatgtcgtcccagattatgttgtcggtctccagactggtctactatacctctcgttagcttttctattttgattttaacccttcgctttctgacttagtagatctgcatacaaccacagagataagctcaaattcaaaaactgttttcttctaggttgagatatcatcgacttcacccagagtatcttcaccagcgaatagaaaagttaggaaacatgtacgcgttaagaattctactgatcatgtgtgatgtagtgagtttcctctctgtaacttccgtcgtctgtccaaacgctaactaatacatcgagtggggcttgtttgctgtgtgtcaatctggcgcggtcgtaatctagaatgatcatcaggatcctatcagagagatcaccaagatttgcataatcaataacttaactgttgtgattgcctggacgtatgtctatcttcactctctcccttaagcctcgttatgactcaggcctgctcaactgaatcctcaatcatccgatctgcttcggtcaaatcttgaccagtccggaggaagcaggacagtacatcgcaacttataagctgtacgagaccaagccaccgacaatccttcaggagagaacgtccaaggattatgcctctcatctaaacaaggcgctcactgccgtcagaggtgtcaatcggacggatgtcttgacattgagcagtagctttggggtttgttcttctccttctcgtaaacctgaactgtctgacggaatgcacaagtgaatgactaacaagagacctctgtatccattcttgtcctcatcgatcatccgacatctatcatgtttgtctactactctgagaacaggctttctcaaaaatggtccatgccagtcgcgaagaaatttcgctgtgccctgggttaggagacgtgaaagttcgccgattggtcgaggcctttaccgctccactcagaggatcgtccataaacaagcgaaagggagtcgatcagccggtagatctccaaggaacacgtcagaaacgtagagagaccgatagtggcgagtctaatctgaaagataacggggaatcaaccaaggtaggacaaaatgaagttgaagaggagactgaaagggatccttcgcctgattggccgtctgaagatggacaagacccagagttggaagatgcagaatcaacacgttcaacgtcctggtccgcctcgcctccattgagtaataaaccggaggactctgcgttgacttctcgggcagaatccccagattggccggacgatgaggaggtagaaatactgaaggacgtgctagctaaagggcccttatagagctagtcgagttcaggtctcttgcctttcttgattggaaggtcttactgtagcaaatcttgtaccagtccgttcattttcttcgtatcttccttcttcttcttctccttttatcaaaagactctgattcatactaacatgtgatgatggttttggtttcacttgaagtacagccatataacgatgtatcacccagataattatcgcttggttatgagcttcaacccgtataagatgttgaaagaattgcccttagaatcagaagtgaacaagaaaaatcccataatatgtagtagataaccttcctctcttccttcttcagctgtttcatctcgcgatcgagggccttccttctgtgccaagatctgactagaagaaatcaccgttgtgcgtactttacgcctttttaaagttgttgagcttggaggtcgtgttcttaggaagctccctgtttcgtccaaagaaaatgatgaggatgatcagcaccaggttaacaggggttgcttgatcacgatggcctagaaacaaccgcttacttgacccaaggcaagaagtctcgaccctgcatatacggtcggaggacttcaggaattcgaagaccctatgtatatcaagtcaaaagaaacaagagaaaagaagtttgtcaaaactaaagagacctgctggaagtcaagcgagtggggcgtacatcgggagtctggtagttctcaaccacacagcctgtttgagaagaagcaaacgaggagaagtgagtctcaactcttggtggacatacgaagagagggaaacgtacagagagctcgctcagtagcacagagagttccgttgagcatgtggacgtagttcttcttggtctctcccttgaccttgacaccacaccgaacttctaatgatcgagactctgtagatcacgaaacaggttggcggagccaatcgttggttagtctcaccggtacgtgttgatacacaagtttgatgaaggaaggatggtgaacacacggtaatcggctaagaacaagaagaaagggatgctttaggtcagactactatagcggagattcatgaaaacacatgactgaattaacgtactgcagtttgagatagactggagctccttgtaagctccctggaatgggaaccaagcctcgacatcgtacttaatcgccgcagcgttgttcaacgcaccggagacaataccgaccactcggtacggcaagccgagagactggtagaactcttccgagttggcaaccatgtgctcaaacatctccatcgacttttcgggctcggtgatacagaactagatgataggagtcattgattggatagttgtcaggagggccaagcagaatgaattgggcggtcggaaactagaggaactgacctgctcgatcttctcaaactggtggactcggaagattccccagacatctcgaccgtgggaaccggcctcctttcggaagcaggtagagtagccagcgaacctggtagagagcaaaaggagtttcaaagatttcagtaagggaacatctaactgcgccgtgctaaactctccctttaaccgggcgctcatcagagcgcaggatagaggagtcagagaagggaccgaacgtacttgagaggaagatcggttttggggttctcgaaccactcgtccatatacatacccgacagaggctgctcggaggtggcaatgaggtacttgtcctcttctccgtccataacctaagacaagccgcagaaacagagcgttaattcaagttcaatatacatcactacattcgataatgcatatcaatggtcgaagcacaccttgtaaagctcctcatcgaactgatcgctagatatccagagataagcaaacggaccatgatatcagctttggtcctaacagacagaccaaagatcgagcaagatgtcatatattccttgacagcgattggttccacttacagctgggcagtcttggacatgacgtctcgcttcataatgtaaggagtctggacctttttgtattccttctttcgaaggaaatcaagtccgtagttgattaaagcctggttgaggtcgactccatctccagtaaggaagaaccctcggtgaccagagatcttggcacctgggaggaaacgaaacgtttaagtttgtcttggtgagtggtatggaaacgggtcaacgctcattttagattataggttcttacctcgctcgagatcgaaagcatcaattcggtggaggacctcgtggtgagcgatgatgtcggttcggtgaacgggctgagcatcagggccgtcagggtgccactgtcggatgagggagttatcatcctacattacccgagtttccaagcgagataaatgtagaaggtgatatccatagagacgcagacacgagatatcagccaagcgagttacctgatagttccccctccttagatatgtttctacatatgttcaggcaagaatcgggagtctaatatgatcaaacctacctcagtcaaactgatagggcatccctcggcaacaatgttaccaatcgttccacaaagctttcgcatggttttctcagcctcaatagcagtctgcttgagctcggcgagctctttatcctgggaggtcttctgtgcgactaaatcatcagcgggttccttgttctagaagaagagaagaaaagggggaagagtttagaaaagaaagtaggtcagtacgaaaaggattgtgaaagggaagcacacttgagcccatcgaagggcggaacgagagaaatgaacgaactctcttcttcaatgagatttccttctggagagcattgatctccttggccttctgagcggcttgaaagttgactgatagaaatgaagcaacaaatatacagcgagcaagaagaagagcagggttcagaaagggaatgaaacaagataatatcataagcacaacctagcaagtgatctgatatgactctctttcgccttctgataggagaaaagaacgaaagagagaactaacgcttagtccagttggtatatctctcgagaacatcgtccacaagctcaaccgaggctcctctctttcgctgagactctcgaacgagctccgggtcaccgcccttgtctttctggactgtttttttcatagtaagaaagtgaagccccgagaatcagccaacaagtcccgacagtaacgtcaacaagacaaccactcacgaagaatgatatcaatcatttaggaaaaagtgggaaaaggaataaagaaaccaaaggagaaaaagtgtgtggttgctgagaagaagaaagtgagaaagatgtaaagaggattccatatgagcgtcttgcctgataaagtcacgtgacgtccagattctcagccctcgaacacctcaagcgttttctacgcaaagaacttcaaaaaatggaccatgatatgatgagaatagtgaaagcctgtcgtaaagtcgtattgagaagaggataatcgaagagaagaaggagataaactcggaaagagggtgagaggataaagtatatgttatccagaagggattctgttatctgaagctcgattggaacactaatgatcaaaaacttctagaagagtgacacatcggaggaagaccagaggatgggagaagaaaatactgcgacgagtcaaagaaaaggagggtcaaaaagcgggtatggccgaaagaaaaggtgagagcgaaaacagatgatgaatgatgcggaccaaaaacaggcagtgagtggaggacgagtgaatgaaaatggattataaactaccagaagaaggtggaggaagaaaaagagaagaaagatgcgagaggtgggggagctcaaggatagtgaagcccaaaaaagagagagagagaataaaggcgcatgttaaaactacaagagggtgcaagggtatgggcaatgacgagcggtcgagtggatgctggagatgaacggggaaggaggaatgcaatccaagaatagacaaggcgtggcgtaaaagaagaagttaagaagacaccgaagaggtgaccgaggtatgtcgtagcttgaattgacgtacgatgtaaaagaacgagggagggagggctgtgtgtaagatggacgcagttgacgactataaaatgaatatttagacaaaggaaatgacgaggtagcgacatcaagctcgaccggaaagaggatcaagtaaggtcgcttccagctcgatctgttgtgaatcaaggtctgccatacacacttcccagtcctcttgtgttctatttgtagcagaaaagagtgaagatgcgaacgagaatacttgttattgaacaagatcccaaaagaaaagagaagaaaagaagtatgtaagagggactaacttcaacagaacaaggtcttcatccaagtctcggtacttcatctgaagtcgtttgctgttatattcaggccgcccccgagcgactggaatcaaatttgtcacataaggcaaggaaagaagtcaacaaaccatgtacccaacaacaagagcaacagagaagagcagtgaggtgatttttttcgactaactctttttgaacactctcgtttttaagctctctatctcactatctacgggtacgttaatcatgagcacatcatcctcgaaatgaatccgcatcatcgttgtcggaccagtaagattcttcaaagatgtcatctgagtgtttgaatcctcgctacccatcctcaccggaatgtttcgcctgggcccgctgcttccaaaaggtgtcgccggggacgattgactttcgtctgagatcgaagtcgacgtactctctccgctcgctcgcttgtcgacttctcttcctgagttggccagagatgacttggacgagttcgtcggtcctatgactaattgttcaaccagcgcctcggtagatgagattgaggactcttggggtgtcattgtggtcgggggcgacgacgacggcatagggggatgagccaagtccttctgttgttgacgttgctgttgctgctgggcctgatacgccatggggctcgaagctgatcgatttcgataaggaaccaccggcctggacgggttcggcgccatcgactgaggatggtttcgatgttcgactaaacctgccgagttgggctgacgagaaagggcctgtacgccgtttcgaacaacagttggtccattgttgaaagttgatggtgggccggcgggtagatcttcggcatgatgacgacgggtgttggacaaagacatctgagtccgagagcttttggacagaccaccgcctgttccaccagtaggaattacattattccatgaaggatccggttgaatcgatgatgtgctcgaaggcatcgaaacgtttctaggaaaagaaggcattgcagggacgggctgttggtgcatttgcatttgtgattgcaactgctgctggagttgcatctgttgctgttccgtcctccagtcatggaccaagttacctcggaactcttctgttcgcgctcggcctcggcccgatagtgtctgtgtaacatcggatgaattgtccctagaggatgtggtcggccgacgagagcttccaatctgggattgagcttccgaccctctgcgcggtctgggcacgccggaaatgacggactccccatctgtttcccaacctccagcggagtgatcagtctcgtcatgatcgttgtggaccgaacggggggagaatgcatcggttgtgaaggatggagtggaccgatgatgcggctggaaggatgacccagcagattgctgactgtggtgggaatgatgattagcccggttggcggcggcctgcctaatcaaccggcgttcctgttgaatcagtcgtttgacctgactatcccacttccgaagcgattcgtcgttcttcatgtgaagtacaaacgaagcactcgtgtccggagcttcttgactacgccaatatacttggagacctagtccaccatccttcctggtgacaatctctgtgtgtgtcaagttgttacagtagattcgacctttaacgaaatactgcgaacgctcagcattcttgttaaatccattcgagccggtcttggatctcaacagtttctgaccctgtgaagatgaagtagagattgagtggaataaatatgagtacttgaagtccagggtacgaagagcaaatggatgaacaaacctttttgagcactttgtctcctccctatagatgatcacacatataaagaggaacatctgagggatcagtatcgatcgaacgaaccaaacactatcaaaagaagactcacatccttgcaacacagcaacatcttctcaaacaaaaacacatgatagtctctatcggatccgccttttgtagcgatgagatgttcgtcaatgacaagatctccaaacaagagcggatcgtgatctttccaatccgaaactcgtttcataagttcaatttttgtctcctcgttttctttggctcttcgggtttcgttcactttctcggtaatccgcttgacagcctcgacaccaagtagaagggactgatggtgaatattgtccgagggcgaagacgctttcaccaaggactgatcaagacaaagagagagcgcatgtgtagttttcaaaaagaagaataaggagaggaagtgagatcatgaaacatgtcagctgtccaagtctcaagagatgtggatcaattatgtacaaagagagaatgaaaaggaagaaggccaacgcaccgaaagcaacaaagggtacttcgtgatacgctggatcggtttaatcaagaacgcttgaacttccctcgttggttcgagaataagatccgaccgagacgacagctgtggcatgtgcgtctggaccatctcgagggcctccgtgtaatttgcgcagaacgggccgtaacattcgaattcgcgttcctattttgcaacgaagagagagtggttcagaggaaatacctccagtgaggtgatcagtatgagtcaaggtttaaatgttctgacgcgcgtatgaaaaacaatgagaatgagaattggattgggaaagcacgaacatgtttgatgaaaggtttaccccagtcgcccatgcgccagtttgaaccgtctgccttttcggcctctgtttcgagagaaatctgaaactttcgctgaaagtcgagcaagacgtgcaggttagagaatatatggtgtgccgtgtcgagcgagatcatatcgtttgccaggagagattcggaatattgctatttcgtcgatttcgtagtgcgttttgttagctggggtaccatgatggaaagaggagcataaatagagcaaaagaaaaaagacagaacgaacgtgcaagacttccagctcttggacgtattttctctctgtctcgaccagttctttgaccaagttttcagcttcgcctatgctcaacggactgcttcccaactgactggccgatcccatccctcccatcagggctgctcctcccggggtgatcgctccaggaatggcatggatgccagtgaagaatccattagaggcactcccaggcgtattgggatacagcggtttgggtcccagagagtcaaacgcgttgtagcctgtggaagcacctggagtcgggatgggggtctgactggacgactggtagccgaacggattggatgacccgacgtcgtttacaggggaaaacgattcgtcggtgggcgattgagtagcgggtagtttgtcgagcaacagtgtggcggtgtgaaggatctttgtttttgaaaggataagagatgtcagcaagttatgtgaaggatatgacgatctggagagaagagagaaagatatgcaaaacaggaggagaacgactaactttgacgaatgaatttgtatttggtttgtacagatcggtgatactccataattcatcgtttggccaacctccgacatccttaagctgcatcaagaacgagagggtcttgtaaagaggcttctggcaaagtaatttcttctttgggtcgcctaaacgagagaagaaaatgatacacaagatgatcaagatgggaaataaggaagacgaaggtcagtcgaataaatcggccaagtagagaaccacataaactcacccatttggacaaccatccaattcaatgctttttcaccagcggccatgtcccacttgatatcttcgccctcgatgtttacccaatgtgagctaccgtcagccctcatctttttcagactatctgcccaaacgccggtctggccgactctgttgactagaaagacaaaggaagagcctgtccggagagaccaccagacatgttcgactacagttgggttgatctcgccttctgaaaacccaaggtcgggcgagggattgtagtcaaggtagggactgaagcctctgagggtgagcaagcgatgtttgatgtgcctggcgatttgaaagatagaagtgttgccgttctgaatgttggccgagagctgtgccgtcttgagggccagagtgtttggttggttcggaggcagagaaatctggatatggccggggtgagaggatgaggagccagtgggagagagggcggttggttgtatggaaagctgagccgagcttcggctggcgatgctctgcccgtaaggggatgatttcggatcctcgattgtggtagatgacgaggatgcggtcgaaccaggtgtccagggatgatatatgaggttggacgaggacgaggccattggtaagacagagagagaaagggtgtaggaacagaaaagggtggtaccgaaggaaacgggggaaaggctggagaatgaacaagggaaggaactaagggctgatgaggagagagtataaggaagctgatctaatggaaggatgtcgagaaatgctgtttgtccaggtaaaaaaattcacgagacatgcagtcgggactgggaggtgttcagagacagggatagaatgagcgagggacaccgaggcaagagagacgagaggggcgatggatggggttgctgaaggtcgtgtgaaaagaggaggcgcgcgtgtgtttgggacgttcgcacctgtagaacggacgtgtcgttcttctttcctttctgttcttttctttttctctacgatcaaatggcctggacgaagaagaaaggtctgagccagaagtatgaccgatcgatatgatgaccgggtgagatatctggagaaacaactcgatgtgaggatagactcggcaaagacaagaacgaaacgcaacgaggctggatgatgggtgtgtgaagaaacaaaagcggctgatgagaacaccgggaaagatgattagagaacgaagacgagacgaccgacgtcgttccttgatcacaaattctggtcaagaagggcagacttccagcgtcgagcacttgcaacaccaaccgaggagcggacgagacgagtgagagagggtcaaaagaatgggcgagcgagaaggtgaaggtggcagaggaggagtgaatacgatacaaacaggaacacaagaacaagggcgccagatcaattacgtaagctagaataaccatgagccctgtgccctgtgccctgagccctgaggcccgtgcgctgtgcgttgaaaacgacccagacagtcacaccatcattcgatgggacgactaggagcatggtgagaaagtacgatgagacggaacatggagaaagacggcatcgtgggatgcatatacacatcgcaagagtctgtgtgtgcacttcaacatgaatcctatttacatgatcctcggtcgacagttagagatataaatagttcgagtttgtcggacaactaggggttctctctttcccatcatctccatctttgccttccaccatccgatacatcatcaataatactctccatcactatgtcgtctttccaaatccccaaaacaatgagagccgtcctggtaggcttcttcttcttcttctttttctattcctctatctgcttcccgtcctgggtcgttcttactcttgttttctacatcatactgatcctatcattgaccgtacagatccgcaagaccggaggtcctgaagccattgagactcaggatgattacccagtgcccactttggccgaggatcaagttctcatcaagattagttacgcaggcgtcaacttgtgggtatctctcaatcatgaagtgacatcctcgttttcgtctttctcttccttgatcacacacccggcccggcccagctgactcatctgatgttctgcatatgcacatatatatgacctccagcattgacacctacaaacggtctgggctataccaatcaaagtacccgctcatcctcggagaggaaggcgcagggacaatcgtcgacattcatccctcagtgaacagttcagacatcaagctcggtagacgggttgcgttcatttcgaccggatcttacgccgaatatatcgcaatctcacacaagaaattagctgtatgttgccactcgcggattgcgtcctatgtttttaatttatccgtttttccttactaatcttctgacccttaaccaatcaacagtaccttccagaccatgtatctttcaaggatgccgccggagtcctgctccagggattaaccggtcagtagatccctatcggatgctcccccggcctaatcatttgccctcctcatttctgatccctccataccctccttcaattctataaagctttgaccatgcttcaagaatcctatgctgttaaatctggcgattggatcctggtccatgccgctgctggtggagttggtctcaatttgtgccaggtctgtccaatcaatttggttttcatcaatgttcgacccgctttctcttctttttaaactcattttgatcgtcgttcttttcgtttctttcccatctcgatcttagattgcatcttatctgggagtgaatgtcatcggaacgacgtcgacattggacaaagccgagctcgctagaaagaatggcgcagagactgtggtcgtcaatggcagcgcagaagatctcaaagccgaagttgataaaaataccgacggaaaaggtgttcatggtgagtatctccaatgagttatcgagtaatcttttccatcaagctctttacgtgcgcaaacggacactgacaattctatacatttcagctgtttttgacggtgtcggaaaagcgacttgggaaggaaatttccccttgttatctcggaaaggaacgatcgtctcttgcaagtccctcactctctcttcacataaaatgttgatcccaagaacgccactaatgttatctttcttgtgtctcctctctccttccttgcttcttcctatcagtcggaaacgcatccggtccccctcctgaaatctcgcctttgattttgggtaaaggaaattggaaacttactcgtccggtgtaagcttggtccagatttgatctaggcataactagacaaacgtaaaacaatcacgaatctgatatccgacaggagttttcttttcttttcttttgctttgcggatctctctgcatacaggttgaacaatgcgatccatactcctgaagagtttgaatactacacttcagagctcttcaagttggtagaccaaaaagtcgtcaatgtacgtcccgttcaatcctatatgataacacacgcatacagctaaaccaaggaatcttctggcctcttggttgattgacagctccttgttaacggcacatatcccctctctgctgaaggacttcggcaagctcatgcggatcttacaggaaggaagaccgtcggaaaactcgttattcaggtcgccgacgaatgagtttcgtctcgtcttgtgtagtttcgttcccgcttggtgatagtaatgagatacggtttgttctagttggttgtatgtataacctgtttcgatgtacaatgtgcaaggttccccaatatgagtaagaggctctctgtaggaacctgaagaaaaaagctaagtatacaaaagagggaaactcatgacataaaacccagaaggtttgtaagcaagtaatgcaaaagataggggagagaagagatcgataagtgagatgcaagaatatcagtctttctttaagataaggagaagggcaggaacgattcgtttgaagagaaaagatgatcaataggagaagtgaagtaggttgatcgatcagtcgatcgaggagaaatgcatgacaagtttttgacgagggaatgattgattgcggaagattgtagaaacaggatggcaagatgtggtttgtgatgaaaaatacccaaaaagaagaaggaaagaccaagaagaccgagaaaagagaggtccgggagagtgaaaagaacagatcgtaaaacaagcaacaaacccctaaagaatatcagaagaaacccatagagatggcatggttgaaaggaaacaaaggcagacaaaatcaaaaacatagaagcccagaaaggtggagatagaggcaagaaagacaattggacatagtctatctcagaaagaaaagtaagtagagcttagatccgcatgtaaagcttatggtacagcacaacaagagattttgtctttgaattcatatcttctgtaaacaattgtgaactgattcaagaaaacagcatcagatagaccgtgcatcagaataccgaacaacataccccacaagacaactgggagcaataaaaagaggacagacgtacgccgtgctatcagtcactgtgtgcttgttgaccggatcgattacagacctgacgacctcgccgttcttatcgagcagagtggcttctggagttggcggtgaactatctgtccatgtcatgtctctgtattcaatttgaaagaaaaggcagcaagagaaaaaatcaagatgagtatataagagacgagattcgaaagctataaaatcgttaatcaaacgccgatgtctataaaaagacgaaccggaaggccatgggccatcgagggaaatctcgatgctttgtcttttgttcaagaagaacatatacagcatggtgtcgttgatcttttttgattcttgagaatgttcgtttgactcgaggttccgatccttccagaatctgaacaaactggccatctttgctgtaagggagagatacttttcagaaatcaagtcgatgcgacagaaaggaaagtgaaggtaactaactacatcagcagcccgctgatagcatcaattgcattgtttctccggcaaacctctatgatgtctgccatatcagctttcgacaaggctggcgatactgacgacgagcaaaacacaagctggaagatatccgactcatcaacttctcccaagggttcatgttcatctatttctccattggggtcgaatgaagaaaaatctaattccagggcgtcttcgctgtcgtttgagttgccgtcgaacgtcgagaaaaatgttacagtagaatctgtcgaggctgttgagagtgttctaactagatgtggcacatctaggctaagagaagaagagccgtccatagtcgaggaaagaggcgagagggctgatgggggatggttaggatgagataactaatcttccttcgaattgtacaaattcattgttacaagcacatcttgaaaatcccatgttatcacttctttgataaacattcattccccttccctcgttcagcaggcttccagcaaacgaacaacggacatatgttgaaagtacagcagtcactgaaagaaaatataaccaaaagaaaaccacatagaaatgaagaaaacagaattcaagacagtacaggcacatagagaacaaacacaacaagggaacataatttatattgataggatgggggacgcaacaggacattatcagaagggcataaatctaggtcaagtgtagaggaagacattgcgatagacagactagaaaaacatttagagctttataatggttgcgtggaccacgtcaatctttcatttctagagctgacctcagtaaactgaagatcccacgcgttcgattccaaccgaaagtcatttgtctgattacttcttacgtggccatacaaggatccttgaggtgaaccccctccgtttgagtagccagctgcgtaaacaaacgccggatcaatcagccgtacgctcggaggtgttatccgcaaacaacctacagatccggacgagattaaattaggcattgcaacagatatattctgagagctctcttggaaagagcacgttgtagacgggaaagtccctagagcattcgccaagctcgacacaaatcctgattggtgagaagtgatatcaccttccgatggggtttggaacggaatattcctaagctgattgaatccacaagcggccgcaaattgagaaggactcgattgataaccgtcagcgtacgcgccagacggagtggtgacgaatgagaaggtttcataatcgtagcccgctgggaccggaagatctacgtatcctaactgatcttgactcggttgcgataagtatttataagcattttgaaggatagaaccgggcgaaggcacaagtcgaccagagtacaacttgaaactatcgcgtgtcgtatccgacacagacgcacaaagggtttcgtcctcggtcagattgtgaaaaggagaaggggcagtcggagatgacctgcgtttgtaaccatgtctgcgctctcctggatagaaagacttgtacacgaatgactctagtgaggtgcactcgctcgagatcgattcatccgagtttgaagaatgagttccgaacggatatgacgagtccgtatcttctgtcgattcagattgctcatagaccgcctgattgggcaatggaaaatgatttggctcggacggcaagagaaatcccgttatcgaaggaagtggtgcgccgttagccgaaaacagcggaaagtaggacgacttggcgtggcgtgacggaggattctgagaaagaccgaatatgggatcagagagcgaaggaagaacttcgtccgacttgccgtatacgttgccaacggaagagcgcgatcgtcttgttgaacctcggcttgaggagggcgaaccagaaggcgtcgaatcagagttggtcatggatgatggagcggatgggcttggacttggcgtctcgaccgtcgagaacgagtctcgtttgtcagaattcttggcgacaaggtggggtgacgttctacaagaaccgtcgtacgctttccgagacccaccagcccgttttggtgttttcgatgtacattttgagaccccccgagtgagggtcttgcgatgggtcttgaagggaggctcttcgccgatccggacacccttctcaaactgatcagattcgttggctgggacataaacacatttccggttggcccggatacaattggcacaaatctataagacatgatctgagtatgaatacaacactggccatggtcgcaaaaaacctataaagcaatcatgaaggcttacatcagacccacagcaccttatcttccgatatcggcagtatgcgcacgcgattccgatctatgacaaaatgggaggaacttatgtcagaaagcagacatgatgagtttgacctgatgtaaggcttgacctactcgtcgacgggtggaaaccttggaaggcatgcttatggatgcagaagtacaaggtggcgccttgaaaataagttctaagtagggtggtctattgttatttaagaccgaccattgtaagaacaagtgccttccgcatgtattgtgaaggtgaaagacatactgacatgaaacttgtctcgatgttgttaggttgaatcggatatgaattgattaatgctactcaaggttcgaggtgagctatgcaaattgatacagaagtggatatatacagagggacagatacagggtggacagggaatgggttgatacaatactttgaatatacgaaggaaggccagtaagaatgatggtgggggtcaggatggattaacaacgaaaaaaacaatggctagagaaggacaagcgacgagaaagtaaacacgaacaagggcaagggaaacctccatggatgtgaatctcaggaacgatgacgaccaccgatgatgttaaggatagttatacaggtagcccttgtatttgatcagcggagtcatgagagaatagacatcgtgatactcaaaagaaggggagagaactcgggcaagtcactcctttgatgtcgaggaaacccttcaattctatcattctaaatctattgatgataacagtcgaaccaagcggtcaagggaagaaagaatcaacagtaagctgaaagatcttcagagtagacaaccacccttgttccatacgcgcgattgtatttgcatcgtatagtgcgcgtcgagcactttcaggaacgcgtcttacaaggaacacttatcaagaaccttctctcacttttcatgctcacgaccagcaaacactcaccaggagcaatctttccatccgaatagtttatatgaccctgtcttccatatgagtattcaggaagagcatcattattctgagctcctggctcagagaatattcctttgaaaggaatcgaggaaagaatcttgaacggcataaacccagatatattgacatctggagaaactcccttgatcggcaaataaagatgggtggtgtactacgtcgttccatctagatgtcagcaaccaaatgtgtaactaagactgtgtgagatggtacatacagaacaagtcaattttccctcaattccactatcaaaactaggtataagaggattgtccccagttttcatctcgcctactaccacgatctctgctttcattcttctctcgatcattttgttgggttctacatgatctgtttcttctgttggacagtaccagattcgagcctcattcttgatatcaaggatatcttcatgaatggtctggcggacggcctgtctcatacccttggccgtggtagtgatgacgcggaccagactcagtttaagactggaaggtgatggtcgatatgactgagaaggagattgagtccgatcagtgatcggcggagacaacgtcgtgatagataagtagtatgggattttctctttgacgactgcggctagtggctccggagttgtaagctttcataggaggaaaaaaagttaaaaagacttaaacaccgaatctttggcaagtacatggactctgtatcggaaatagagacgaacagcgacttgcacgaagcggatttttccaaagatcgttgagcgaaagtccttctcgattcgcgtagtgtgccacccctcgctttcagatggacaaggaggaggaagtataggtaaggtctgttggtcactttccattggagggtagatgggaggaggcattggttcataaggagcccagcaaggaggactgagatacagcaagcaaaacatgagaaagaaaagtaaaattcggatcagttcgctcttccgtagagcatttctcaggtcaaatcaaggtcgcgctcagatcgaatgatgaccaacgcataggtgaatggtatagagacgcgctcatttatggcgaacgacgagggtcgacggccaattacatcaatcgtatctacaccatatgaccatcgaaagaagaaccacaggctcagatatcatcgctgcaagtatgtggaaagtacgcgagatgtagcttacacacagaagaaccgacgtcagttcccgtcggtttccctctacctgttggaccagcttctgagcgagttccagcttcaaatgacggtggaaggcttggcaacaacggaaagtgaaacacgaatggaatctccatccccttggatgcgcttggcaagaaatcagacgatggttggtataaattgatctcatcgcaatagatcacgctcgtctcgcttgccaattctaaagatgagtcaatcaaagccagatattggtttcgaatctgaagaactataatggctggagtagacctgatgaaaggaaagggtagatcccatgggctcaccatttccacccaaagggaaagctgaaactgaagtgttgaagtttcgatatgtcgaatacttatcaatcataacaaaatcgggaatagcaaggtcttaaaattactgtcatcccgtatcgatgatatgcccggtaaaacaaagcaaggcttacctgagtacaccgaagctgaactacgatctggctgatattcctcttgcttaaatctgtaggatcaaacagaactagacctgagagatcgtccccagccgtatagacctgatcagaatcgaattggacggagagcaggtggtgattttgcagtttggatttaagacgcgacaacatcgatcaaacctggctagtgaacggtttcactcggtttcgtacagagacagaattgttgttcacggatagcttttacctttggatgatctggaagtggttaggatgtaggagtctttgctcgtcggacatattcaaatcgtcatgcatggcatgtctgggcttaatatatctttcggaccgatccttttccttatgtatctcatcttcgggcccagagttgatcaagagcagacgttcaaaacggatggacatttgatagcaagaaagtagaaagtttatgcaaatgatatgatgcaagatgggcaacatcggttgaaacagacactgtacgaaaaatgtcctttctgccggttgtttgctcgtcatcttttgtacaagtgatccccctcgatcgctccttgagcaaccttcaaagataagagagaggaggcagacgtcgtcaagccaaagtagaaagggttggaagtgtcgagaaaatgccactcggaggcttgctaatggggaaaaatgtaagcattgaggggggttgtcgaggggaccggaaggatgtatgggaaacttgacgtcatacagctacagtgtggatgaagatgcaagagaaacagaaacagaaacagaaagaaagcagtcatgcaaacctcaagtatgatcttgcacaattagagcggcttaagacaacgacagcagaagtgtcgatgccctctgggccacatccgcgaatgtcagcgatctcgtactcgactctcgcgctgctcggaccactactcggaccttctcggctgacacaatcggcccaaatcgatcaagtaggaaagctgcgatctcgtcgtctagaagaaaagcccccagaggtacgagagaaaaggcatcggtcgaagaaagaaagaagaacagtggagaatgagaaaagcagactcaagctgcctaatggatgaagcctaattttttccatagggagactcgtccgactaggagacggcggaggaatagatatgattatagaactcgagaggacggacctgttggctcaatatccttccaatgcgtaaactggcaggttacgtccgaacagcttccaccttgtagttcccactgacaaagcgctcgagatgggtcaagatgtcttttcgaaagacaggatgttcgtagagcagggacaattgactctgactgattctgcgtaggctgagagcgcgttggcatcaagagaggaaagaaagctaaaggcgacgtatacgtctgtatatagaacagtaaagaaagatcaagggacgaattctttacatcagtaatggagaaaagagcagaagcttactacagaagggtaatcaggatttacgcgcgatgtcggtatctcggttatatgctttgaagtagttgatcgaatctagaatttgagtgtgtaagcacagggaaccaaatattttagaggagacgtccatcaacaccgaaagcatcttccaatcgtttacgctcaaccgagagagactgatctgggtcagacgcctaccttctcgttgttatcgttgttcactggtcctacatgatgtattcaaaggaaaaagaaatgaccatttcaaaaagaaatcagtcagttcgttcacctgtatcacgctcagtgcgcttcgatctagcgtcaccaatcaaaaagaatcattcgaaccacctggacctgcatcagagaaatccggaggtgagaatgtttgagcaacaggagaggtagtcttgaaaaaaattggatatacagcgagaagtgtagaaaggacatgctcacttatatctgacgtggacgttattgctgaaacaccgcgatttcaactttgctattcagatactgactcaagttaaaagaaaaatgtgcactgaccaactaaatccttgtctttctcctgcccgaattgctctgtggtctcgtcactatcgacatccattccacctttcaccttctccaaaagatctttcctctgctccaaagcttcttcgagtcttcctaccgctcctgtcattatttcgtccacctcgcccgccatattgctttctgccgtctcagaggattggtatgatctaagcatctcctgggcttgatctacaattgctactgttggtagagggacaggtgaagccctcgttgatgaggttccttcagacgtttcggtcgaaccagatctgatactgctgtcaatggatggaacgggtgccgctggctcaggttccaaagacgatttggcaagggaagaggaagacacactcggagccggtttagtcttctgtttcttctccataacggcgatcagctcgaccatgcgtctaatctcagactctttggcttctagcttagacttcgcttccatatctgcctcggctgtagacgcgccatttaacccaggtggtgaaggtgcggcagttgtggtcatcgagcctttcttgcttgtagttagtcgagctccgggaagaacaaaaggtgtcgtccctccgtcctcttcatcactagcctcacaatcggaaatatcgattacaaatctccaagcctgttcaggaacaagcggtttagatttgctgaacgggattccttcgacagatgtatgattcgagttggatgaatatccgaacgttgtgggtgctttatggtcaaaatcaagagcggagggccgcttatgagctgatgcagatcgtcgaggaaggataactagctgttttggaccgagcaaactacgggtggaagcgaggcgaggcgaagagggggcggaagaagatagagggggcgccgatgctaaagt

SEQ ID NO: 273 - DNA, 1062 bp, Xanthophyllomyces dendrorhous
atctagaggcataagcttcctctgcggttacgaccgcgtcttctctaacttcaccttcttcgatttcctcctcatcatcactactcaacacaacaacatcgatctcctttgaactaggttcagagagaagctttcctgtcttggccgtcttcttcattgcactcataaccatcctttcactcttctctttctcttcagacccagctaccatagccttggcggtttccttagctgcctttattgccctaaacctttccgctagctccttttcccttcgagccacctcttccttcttctctcggagtctttctgataaagttgactctgttcgtttgtcttcttccatccgcttcttttctaagagcagagctttgcgtgcctggagcaccgcctttcgatgggcttccacagcagttaaatccacctccgtcagagtggctatggtggttgaagtcgtgggtgcagtatctgaatctgatactgaagcttctggagacaccttcttcaaatccgcatcggatgaaaacagtgacatttcaggaatctgtttaggtgtgccaacaggtgaagctacgcctattggagtagaggaagagttgcttgtcgatgataagaggtcaaattgatgaggtcctcctgttctttcttccaacgcctcgtccagtggcccaggtgaaggaacgccatatactgcaggatgagtcaatggatggtgagaacgaagatctggaaagacaacttgctgctgatgttggtgttgtgggtagagagggtggccttcgaccgcaccagcatcaacgtaagaaccgtacgtccctgcattcaaagttggattaagtctatctgaataaggttccaaaggagagcgtatcgtatgatggtgattcgagcttggcgggaaagaataggcgaagtttgggtctagaggacgctggagatggttgttcggcgaagggagttgcagttgtggttcggaagatttaggaatcaaagtaagatttcgagaaacaggggacttgattggcagcggtggaggagggctgataggaggaggaggagggg

SEQ ID NO: 274 - DNA, 103662 bp, Xanthophyllomyces dendrorhous
gaggaggagggggggtgtcttgtgttttaagaggttttgcaatcacgcttgagtcgaaggttctaggcagaagtgctgcaccagcagcggaaggagggagactatgcgcagcatccaaggcaagagttggagatactacagcaaacttaggaggggagataggcgcatttgaattcgtcctcccctctgcatctgcatccgaggttttccttttctttttctttttggaggacttctctaaggagacatccgacttctcagaaacaggcaccacggcttccttagtaagaccaatctggttctcgacagctaccacaggggatacttcgtcggatataggtacagaagtagagggagcagcgttggtcatgactgtgtccagagtctggtcttgcatcgagattcgatcgaagagatccatacgagatttgaaagagtctgaaagtgtgattccatattagtggttgaaaatggcaacggctatggtcaaatattgaaaccacaagtatgttaagaaaacaaatctgaacagttgctgaccagttttctcagctgtatcgttcacttgactgagtttctcttgatttagattagtttttcttttctcagcagtaagaatcccagctggcggaaggtttgtgggtagtctaattttgagatccctgcagtacactagaagggccttgcgagagaatccttgggtcacaaagtactctggctccaccccccatgatagaagttcgatgagtaacgttcgagactctgcatattcttcctcagaaacttttcaatagaaagaggtaagaattagcgagcaaaaagagtgagaagaatcagctacgttcttagatagatttgagcaccgctcaccgcctggaggaaagatacgtactctgaagttcatctgctcctgccttgacgggatcaacctttctaggctcctcaatcatcctaggttggatcttgatcggaactttcgatcctttagccgtcttggtcttctttttcttaggaccaaccggcttattggtggcctccagtaaggcgggactaggtggtggaaaccttggttcgagcgccagcgtcgggggaggtgggagagggaatggtggtaacggtggaagtatgagaggattgtttgagcctaaagaaggggcattatgagggtaaattgttggtggaagtatcccaggtggacggatattaggagtatacagcgtaggggaggctggcttaggagacgcgagtggttcttcgtcctcagagatctctccatcctcacgatcagctccctcgtctccaaccttggacgaagcttggccggataccgagagcttagatcctgccctcaatactggttcgatcttggcagcaggcgtcgtaccttgttcaggggaagaagtcaaggacgaaccactagtaaggttcgcgacggtgttggaaacaacgggcggacgtgaagaggcttctacttcgtctaccttacgtttctttgtctgcaaagcaagcgacctgagagcggacacatccacaggtgtagacatgatgagcgttgtcagtcaagtacttcaaacccaggtgagagacgaggacaagcaacgggaggatgatggtatggggaatgagggcaacaatcgaattggtagggcgaactggggcaggagaaaaggaaggatgacttaattgaaccaagtatttgaattgtgaatttcatctataagtccaaggaaactccgtgtgagatttcagttgagatcgtcaacaatcaactcatcaaaatccatcagctcagtacagatcgctatggatcctcaggcaggtagctcaatctttgacgacgaggacgagagatctgtgagagtttgtttcgtttttttgcgcttggtcctcaagcgtttttgatattctgactgtcagactgcccaccaaaactgctatagcctttcagctcacctcaaactccagacccgtttccaaggatcgttcgcgaagctcctttgcctacggacggagaacccgttggattgtccactcgttcgtttatgaagcgatgagatgagctctacatagacgaaataaactgatcgtatcttaatcgtttctttgcagaggaaatcctggattggcaagctcagcagcgtcaagcccgtctgcagggtgaataccaaagaagcgcccggctcttgaatgatattgttcgtcttctttagatttataaagtaatcgagttatgataataacttttttctcaatctatctcacaggtttacgataaccttcagacgaatttaccccttgcctccctccgagttctcaatactcggcaaactaggtcaacctttctctcttctctactcaccccgcttcttacggcccgtcagccagcctcagaagatccaacattaggttccctactggaacttactcaagaagttaagcaagcactcgttccattcgggcttttcaaacgaatcgatgttcggttggagcaggctcagagtttgcttgctagggagggcgcagtcgatgttgtggtcgacgtggaagaagccggcagggtcactttgaagagtgggacagagtttggtcaggctgaaggaagcgctgtgagtcctgggctacattcatctgctcatgcatttcatccttgccggtctagagttcttccagtctgagctagaaactgtttcgattgtccaacagtatataacaggagacgtccgtaatgtctttggaggtgcagagactctctcagtgtcttcctctgtggggacgaaaactcgatcagcgtttgaagtgagcttctatgcctttttctctctctatatttgtcacagactcatcgaacgggatcctttctgactaccatctacacaggctagcttgaaaactccgctttttgcgtctcctcttcaaagtcttgtactctcggtcttttcattagaccgagacaacacttcctacgcttctcattgggagggtcttcagggtggtaaactaacttgggaggtaagcgtcttcttcggtcatcaagtgactgcaaccaatactgatcagttgtatcaaatgatcatcatttttcggcggcatcgtttagaaaaggaactttttcggtggtcattccatcacttatgaggccacccagcgcacactccaaaaccttttgcccaacgcttcactctcgttcgttatatcgccgtctatttactctttcctgccacaaggcttctcatactctctttcactcgttcaatcagtgttcgagaggctgctcggccagggccttctctcaaatcctccttgatgtatgcatacgcatctgacaccagagataaaaccttcctcggcacgaccggacgcctcttcaaggcctctcaggtgagatatctatagacacctcttctcagtccaaaatcttgaattgacctctgaccatgagaaccctaattcttttttccatactcgtttgataggaaatcgccgggttaggaggttctgcgtttttcctcaaatcgacgaccgagactacgttctcgcgggcaataggaaccgaagggctatttgcttccttttctgctcgggcaggagcggtcctaccgatgtttaaagatcgaccggtccatcttgccgatcgattgttggctggcggtccgaccggtgtgagaggtttcaagatgaatggaatgggtcctagggatggtggttcgttcattccacttttctttgactgatcccacattcgagaaaacttattcaatgtctcttacttccgcatggcactggactggatctctgtagaggactcactaggaggagacttgatgtactctattggggtttctctattcagtccattgcctatcaagccggaatggccattcaagcttcacgcgttcgccaacgccggaaagttgacttctctcggcggtttgtccctttcttttcctatctgcttcctttctcaaacccggaggccaatttacggatcaagcaccaacatattcttggtcaaacgagatgctcattctttcctctttctgttccttgatcagctacaccaaaagaatcgatcagtccactattcgctaccgctccatcggtctctgcaggcgtcgggttggtgtatgacttctcacccgtccggatcgaagcaaacttcacattacccttagtaggaagtcgaaaagaaggtcttagtaaaggatttagtttgggcatgggtatggatttcttataaaaagattgggcagctctgatgcatccttgattgtgacgtagaggaaatcagggatatgagaaggagtatcgggcaggaggaggagaaaaagaagaaggatatacaaatagcgatggtgaacgttgatgagattcaagagaacttttcgtgcgggagagaagaataggagtttgcacgtatcaacttctcgaagagagcaagcagagaaaagaaagaaagaaggagagacaaagagagagagagaagattgttcaagattgagaagagtgaggtaacactgggctagagatgtgaattacgattatagatttagaagaacatccagtatgacacaagtaggaggtgtctatttcgaagcggccgataaatcactgagcttgtctccaaactattatacgccaaacaggttctgaagatgctatctagatgtcaggcccggatcaggtcatattcgacgagaaggaaattgaacatctgaccaaagcgagatgagggtgcatgatgtgctgtacttacagttcgcttcgtgacatctgtcgttatatcaccagcagtggatggagaaccaagcgagccgtaccgattcgaacctgttcctgtggtaagtgcaggttccttcgtgagataatgagcagtgatggctccggcgatgacgaagagcatcacgaataccatcaaccagagaatcttgcccattcgggaatcttttgcctttttcgcttgtagccagccggcatccgattcgacagccgatgcgttgtgtgctatgatctggaaggaattcatagagtgaggatgtctgagaaaaggtgtctgatgtagaaggaccgcgtttttatcaaacaaacaaaaaaccttttaagcgagagtggactcaccgagaacctattccagaacacagactttctctctctcccggtatctcctcctccgatcatccctctagatacgccttcttctttttcatgtgcggtcgatccgactggggacctggtcggaccccaggcaagcgcaggactaggagctggggtagaaaatggggacacgaacggatttgtcgggctctcggtcggtaaggatggagaaggtgtctgtcgtccagaatcatcggctcccgcgtttgggtgataggccctttccggtgaagagattggagctagaggggtattcgcagaaagatatggactcctttttatgaaaaacgaacaagggggacaacttgcgtcaacgatcaaagtcaaggggatacattggtactttcgtgatctgctactcaccggccaggttgctgctgctgttgctgctgccatgactgtttttgttgctgttgctgctgttgttgttgttgtgcaaatgtcacacgatgatctccgccggtcgttgagagataagtagataacatttaagggaaaagagagtgattaagaataagtctttcggattgtgttgtgagatgtgagtgtgaagaaaagggatctcagcgaggaagagacaagagagaggtagtgagaggttgattgatataagtcaagaaggacccggtatcgagcgtgtcagtaagtttcttccaactgatgaggtccagacgaagtcaagaaggaccaagggccagggtgagtagattggttagcgcaaagagtgaataacgttaagagagaggaaccggactatccatcaggttctgtcctgaaaagagaaggtggttcctttgttgcgaatgtcaacagcaaagtttctgcaggcatgcaacaactagttagttgattagtctcaaacggtttctcaatacattcgtccattcgtgatcccaaacagaccaaaccgagattgagttggtatagatcggatgggacaagactgaactgaaccggattgtaaacatcatcggccgattagggccagggcattcaaggggaatgaaacgtggttacatgccggtcatgcaacatgtcgtaacaaggacaagattggggtcagaaaaccaacgttcgatatttttcggatgagtctgatttcaatttattgctggataaggccgagtatgaatttccattcctcttgcttattctcttattcgatcacccgaaaattaaacgaaacaaacgataaaaaggcccaagagattgagacaaagaactgggtcgagcccgttggctttagtttctttggcgtaggtcttgcgtcgatttccttcccgacggcctttttcttgtgtgtgtgttgtcttttgtacaatatatccctctatactctctcgcttctttcaagcttcatctaagcgcccgccgccgaggcttttctagactgggctctctgtcttggtccttcttccttttctctctactttctggttcatcatttttccatgcatcctcccataagttccgatcaaaggaagagaagaagacagacaaacaaatagatagataggaactaggatagaacggaagcatacgagaagggagagagcaaattgagaggaaaaggccttacacgcacgcaagcacacgcacacgcacacgcacagacagtcttgccgcctccgccttccagaaatggaccgaccaatccttcggctttgaagcggacatgaaacgtaagagagaagagacgcttggtattacagacccgagagagtgtaacatccaagcaatcgaatgtgctatctgttctattgtttcctctcctttgtagctcaccttttccctcacatccacgttgggcggcatatatagatgcgcactcgaacggtttctagctctgtccggatccagcgcttctttgagagtcttttgcagaggtagatgatgcatgaagacgaaaatcgagagaagtaagacgaaacatcgtgaggtcattgtgcttacaacttacactcccacggccggccgcatgacttcaggcgtgagctatcagccagagggggttgacacagagtccatggagagagagagacatacatatccagagaaaggccaattcgggtaatcgagagagagaagccgagcgattgaattggtcaactctagccgaatcgccgcggcacgaccgggagggaagataatcattgcgcagttccaaaaaaagcgacggaaaggaggtgaaattggaagcatcaaaaataaagttgattggggccccacttctggaaatttctccagcggccgacggcgtagacagacaaagttcagcgttacaggtggccgaccgcgagagcgacgacgcacgagagcgcgcaaaagaaaagagattaaaagaaaagaaaaaagaaaaaaaggcacactttccctatccggttcctggaaacccaaatacccacactctctatctcggcctctgccttgccgcccgtcaactctgacaaactcccagtggacacggcaaggaaaatctgtgtgaaaaaaagatacaaagatccccagtccttttagttggatctttcgtttcttttccttctctcgctttcattctttcttgacatccctccatccattctagtcctcgatccagtcttcgttttcatccctacttgtactccctttctcgacaaggcgtgtcgtaaagaagcgtcaaccccagtagctcttccctctcgctgacagtgtccccgttcgatctatcgatcgacagctccgttctctgcgacagacgggttcattctcatttccctaatcttaacatattcaaaagtcgttcaaagcgcatacatatcttccaccatggacgagaaaaaacatacacctgatgtcgttcctggtatgtaccctctgttgtttcttgtcggtcaaaaccgtcgactttaagcttggaaccagtttcttggcgttctttgttctcccttttctgtccctcttcttggtgccgttgagcgacatcccttttttgcgcaactcctagatccttattcgtccccttcttggctttttttcttctgttttgtttttccttcgctcccgtagacgacgctccgatcgaggagaagaagaagcgagagtacaaggatatggagcacaagagtgatggtgataagcacgctcttgtcgatctaaacactgttcgtcctcccgttttttcctccgttttcccttttcttcccattagtattagattttgccaactgaacagatctcactcatacgctttccattccatttagattcaattcaccgccgatgacctttacgacaaggataaggtcgatatcgagcacgtcgtgatggaggaggtcttccagctccttcagtgcgtaatccttatcgcttccgattatacagttttgatctgaggctttcgcttcatcatctgactccgttatcttaacttgcaacacagatgtgacgaaaacggtcttacctctgccgaggctgctcgacgaatcgagatctttggtcccaacaagctggccgagactaaagagaagtacgtttatcttctatttataaaagtccggaatccatacatcctgttatgcatacacgtatgcctaaacgacagtcgttgacctggtccacttctccccatatcacagtgccttcctccagttcctctctttcatgtggaaccccttgtcttgggtcatggaaggagccgcccttgtcgccatcgccctgtccaacggaggaggacgacctccggattggcaggatttcgtcggtattgttctgttgctcatcgtaagtttcatcttttcatcaaggccatctttaacgaagaaaccgagacactcacgttgtctcttacacagatcaactcgaccatcggtttcgtcgaggagaggaatgccggtaacgctgttaaagctctcatggattctctcgcccccaaggccaaggctaagcgagacggctcgtgggccgagattgaggttagtctctccgttactttatcagtggccacgatcacaaggctgatctatcgatactcgatcttccacagtcttccgagttggttcctggagatcttgtttcgttcaagcatggagatgtttgcccctctgattgccgattggtcgacgctgtggatgtttccatggatcaggccgccttgaccggagagtctcttcctgtcggaaagaacctcggtgatgagtgcttctctggatctacctgtaagcagggagaggccgagggtatcgtcatctccactggacccaacaccttcttcggtcgagctgccactcttgtcggagctgagaacgattccaccggtcacttgcaagccgtccttgccaagatcggactcttctgcatggtttccatcggtatctttgtcctcctcgagatccttatcctgtacgccgatttccgatactcttaccgagatggtctcgacaacatccttgtgctcttgatcggaggtatccccattgctatgcccaccgtgttgtccgttactatggccgttggagctcagcagcttgccaagcacaaggctatcgtcacccgaatcaccgctatcgaagagttggccggagttactatcctctgctcggacaagaccggaacgcttaccaccaacaagctcacgatcgatatgaacgaagtcaagacctacggacctttcaacgctgaggaggtcatgatgcttgccgcttacgcttctcgagtcgagaacatggacgccatcgatggatgtgtcgtcggatgcaacggaggacctgaggcttcccgaaagggtatggagcttttggactttattcctttcaaccctgttgacaagcgaactgccgctacttacgtcgagaccgccactggaaacatccgacgagctaccaagggaatgaccggtatcatcattgacatttgctcccgaaacaagacatccgagatggaggatcagctcgagaaggacgtcgaggagtttgcccgacgaggtctccgagctcttgccgtcgcccacgaggatgttctggacaactcccgagagaagggtgctcccggaaacggattcgagcttattggactccttgctatcttcgatccccctcgagacgacaccaagcagaccatcgatgacgctcaggctcttggtgttaaggtgaagatggttaccggtgatcagctcgctatcgctaaggagaccggtcgacgacttggtcttggagatcacatgtaccccgccaagattctcaaagatggaccccctgctggtggcaagtactccagtctcgatgagatgatcatggatgctgatggtttcgccggcgtgttccccgagcacaagttcgacattgttaagcgaatccaaggtctcggacacctttgcgccatgactggagacggagccaacgacgcacccgctctttctcgagctaacgtcggaatcgctgttgagggagctaccgatgccgcccgaggagctgctgatatcgtcttgaccgagcctggactctccaccatcgttcacgccatccgaggatcccgaattattttccagcgaatgcgaaactacgccatctatgcctgtgctgttacgatccgaattgttgttggattcgccgtgcttgccttcgcctggaagtttaacttccctcctttcatggttcttattattgccatcttgaacgacggaacgatcatgaccctttccctcgaccgagtgttaccttccatgactcccgatcactgggatttggccgagattttctcatacgccgttgcctacggactctaccttactctttccaccgttgttctcttcatcgtcatgcacgataccaactttttcgaaaacaggttcggtgttgaggccatcaaggaggtcaacgataagaggggtcacatggttatctacttgcaggttgccatcatctcccaggctttgatcttcgtcactcgatctcacggatggtccttcatggagcgaccctcggttgcccttatgctcgccttctgcctcgcccagctcatctcttccatcatcgccgccttcggagattggggtttcaccaacgttcagtcgatctctggtggttgggttggaattgtctgggtctggaacattgtttggtacttccccatggatttggtcaagtttgccatgaagtacactgttatcgcttggttgcgaaagcgatctgctgccaaggccgaggctgttgcccaccaggacactggagctcccatgcagcgaaccgtctctcgacacgagtctttgtactccaaccgaacttcgttccttaacaagactgctcgacgagtcggacttggaaactccaaggtttcgatgtccaaggctgagcagcagcgattcggagcggcccaggcttcccagactggagctaccctcgctcgacacccttccagagtataaatatcggtttgaggccatctttctttgtgcttcccgtttttttgctattgctcgcttctcttttttcctatcctagcatttctgttttacttctacccgcctgtcatccttgctttgcgcctagcttcgaattttctctctttcccttctctttgttcttcctcttctactagtatccgttcattgtatgagtctcaatcggtgttttctcctctatcccccccgtccccccttatactggtcatagacgtcaaactgcattgtcttgaccctcgcgtttgtttcaagatcgtgctgtttatacttgctatcatcatgtttgtagttaaaacaaaaaatcagaaatcaaaaagaaagaaaacaattgaaagacatcgaaaaacggtagaaagagaacggcggcagccggaatgttcggcccggtgttccgagggaatgccgaatgcataaatgaagactagttaataggttgaactaaacccgttcttggaacgaacttttatcccatcatgccttctttgctcagtcctgtgtttgccagaaacttagccaggtctattctccgtcgtcgtgctgcccaacgatcgttctttacggcagcactcgaacctctgacgttcggtcggcaagccttgattgtcagtgaacgttacattctttgctttttatgtcttgatctttacaagggatcagtggaggttgatgttgtaaaccattctttcattttctgcatctccatgttgtttctgtaccagacggtcggggtcacctcgatagtcatcgggacgacgctctactttaacccaaactctcctatacatcttgaatcatccacgaatgtgacctccgatggaggatccaagcgaatgagaaggtcggatcttatcccgatggaggaggtagaaaaacacaataccgaagatgatctttggatcgtccttaatggtgaagtttgggacctcaccgagttcgcagcagaaggtcatccgggaggaaacactccgttggccagagccgcggggagagatgcgtctaatgttcgtacatgccattcgttcggttctcattcggatgaccgccctcacttgttgtagagctgcagaggagctaacgatatccatgtgggtctttccttattggcttcttttggtgtgctctttggtgtgatcgaccggatgggtgggttgcccaggtgttcaatccgcttcatccgccagggacaattgagaccgcgttgtcgaacgcatcgttgccggagaccgccttggtgggaagaattaatccggcgaccgttaaaaagatcgaaaggcctgagcaaggagaggtcattccggtcaaggctgataaagccgaggagaagatcgatctagggatggtcattggtttaccagacttcacggtatgatctttattgttcgctcacccttctattgtggtagagtcttactaaaatgaaaggaactatttatctatatgtcttgcaggctgcagccaagcagattcttcctgctaaagcgttcgcctactattccgctggaggtacggatgagtacacattaggacttaaccggtcttcgtataaccagatcctcttccgaccgagaattctagttgatgtaaaggaggtggatacgtcgacaaagttcatgggacatgacgttagcctgccgatgtttatttgtccttgcggaatggccaagctcagctcgcctgagggagaagccgttcgttcttcacagtcttttattttccttgtttaagagctcgcccgagttcgtgttctgtatcaataactcttcgatttctggggttgcctcgtttcgtaaatcgatcaggcgttcgctagtaagttatctctgagggttaccattcatttcagacgaagagattgactatatcatcgctttgatcttctctagctgctgccggcaaatgcaacatcgctcagtttgtttcgaccaacgcttcggctcctcttgcagagatgtgggtcatctttcgttctctttcctctctatcacctcgtgtctcgctgaactagttcgacttctgtccgttttagtatcgctggggctgtctcgaaggagcaaccattcttcatgcaactctacgttgaccggtaagtacacatgtccccttatcaactgtcggcttctcgtatgtttgcgttctgagctgtatatatcgcgctttcgtctgcctatagaaatcgacagaagaccgaagcattgatgcaaaagatcgaggctagcgggcagatcaagggatactttgtgactgtcgatgctgctgctcctggtaaacgagaagctgacgagcgagttagtcgtttccctttctcatcttcagctctatctttgtcttttttccggagcttgatgagtttgcttcgtcttatcatttcttcttttctttactatccagtctcgagcagaagttgaggctcagtctgggatgtccggcggtcgaattcaatcagacaacaaaggtggagggatcggtcgatctgttggaggattcatcgacccatcgttaaattgggaggatataaaatggctcaggtctagaacaagcttgcctattggaatcaaaggagtccagacggtggaggatgccaaaaaggttcaatttgttctattctccttgtcccgtcatattcatctatcgccttcttccataagacttgtggctgatgataatcttctggggttgttgtttatgatgcgccacaaaggcatacgacgtaggtctagatgcaatttacctgtcgaaccatggaggtagagcgctggacggcgccccccctccgatctatactctaatggagcttaacaacttttacccagagataatcaaggacaagaaatgcgagattgtacgtcaaccatttctttcttccctctctatattttgccagagcaaagagaacatccaaacagcattctaaaacaattgtccgacttaatagtacatcgacggagggatccggagaggaaccgatgtcattaaagcactctgtctaggtgccaacggagttggagttggtcgaccattcatgtactcattggtgtatggccaaccaggtgtcatccatgctatcgaaagtcagtctcttcctctctttacttcctcttcccatctgttctccgacaaagaggatgattgactgaagcaagaaccggatgcgttgtctttccttctttcaagtcatgcgagacgagatcgagacaacgttgcgcctcttgggtgtaaccaagttgtctcaattgggacctcacttggtaagcctttcctcttacactaacaccttgttgataactttaatcgcgctttaaatatacttcgagctaacggcgcactttttcttccttactttactgataccacgcctggcatagcttaacactcgagcgttggatcctctgatcgcccaaaaaccttctttcggtccagatgaacaaaagcgctaattcatcatctacccgcctgtcttttaatatcctcttctttctttctgtacatgatatccatatgatctctctgttctttctatattgctcttgtcgatgacggtatgttgtaccctatgaatgtgtctatctttctcgagcgatcaaacggatcaagacaaccgaagggtggttcgcatgtatatgatccttcttgataaaatatgagatatgatcgattatttggacagaaaacggcaacgatcaacagtgactatcaagaacaaacgaaacgggaagaccggcagatcaagttgaatggagagagaaaagaaaaagatgtttgtacaagaagtgagaaatctacatgctctttacagtttagctttcattcctcaactttctgaagaaggaggcagagataagaaaggacctctctaaggtcttgaattttcaactctaccaaggtgctagtgaccaaaccctctgactccttttgggacttcatgcgcggccgacccgtttggctttgcagatttagttctcacacctttggtgtaaaacagataaccgcaaggccacgtatgctgtctccgtcctgactcccatttccattcggtcgggtcgatcaggtcagtcgaatcggacgcctggttgatgagatgttgcatctaattgagaaaaatagaaggattggactagtcatcagtatagaaaagaattggaagctggggaacaagagggaaactcacatgatcaggcgttcgaaccctcatagcggacacgtacccatctagaggaggggaggagagaaagaataggatttgggatcgatgagacaagatctttgtgagaaagcatattgaaagaactaacccatgactaggaagaagggaatgataggaacaatgtaggtgaagaagagttgagctgatggtaaagggcattggaatgatgcgcgcgaatattaattcaacccgaatctcgtacagaggagaagagagagccggagatttacctagtgtaggcttcgtgaacggagtaagaatccatgtcaaaggagcaatcagcgtgatgaacacgaaggatgcaaagtctactttctgcagttcgaatatgctgtgtgtgatggtaaatatcagagcatgacagaaatcagacaacgagctacttctttgatctcttcagagaaaaccctaccagacagcatctcccgcaatcatcgcatcctttatgacttgtaatgcgagttcttcattgaaatggtggaaagcaagacagaaggttcggatatgtgttcctagatcggaaaccaacgacgcaggtggctgggttgcatcaactggatttggatgatagctgatctgatcagaagtgaaggaaggaagaggcgatggaggaaataagtcggtacaaagaaaaggaaccggacgaagagattgagcttcacggtgagcgctgaagggaatacaagactgttaactttctgctctcaaccagtaggcagtccattaagagatacatggcgagagatggagagagggagatactaacttcaaggcagcctcgattttcttcatcggaccaccgcctcccgaacagaagtcaaccactcggaccttctgacctccaagctcttgcacaacctctcctagaacttcggctgcacactcactcggtgctcttgtctgaatcggccagaaattcgtaatccagagcatcgtcaagatcttttggaccccctctctgatgggaactggtgtgtaaggctgttcatggaactcgatgagcctgggtagttgctttgggtatgagtctcttgtcgtcagatccggtcgtcgaagatgggcgagctctacattaattcctggtccaaaggcgatccctaggatatctttccttcctccgcgttttcgcccttcttcgaaaacataaccgatcgaggccgaggacatatttcctctgtctttgtagacggcccagctagctcgagagtggtcctctgggctgattccaccaagagattgctcgacggaggagatgatgagtgatccacctgggtggatgaatgcgtccatgttgagagaggacagcgcaagggtctttgattccgaaggagctatgaacgcagttactaggggctcaaccaaggtgctagtcaccactggaaccttgggagtgatgaccgcctgtcgtgtttgaagagatttgctcgttaggtctgagccgagagagaggaaacagtcatagaagagaatggagcacatactcgccatccagtctcacaaacgtcgaaagcaagctctcgactcgtctctgggattacttctactgccgtctttatgatctcgaacgaaggtttttctacggcaaatcaaaccagatccagatgcttaacgatcagcaagatcaactgatgaattgtgaagacaagagaaagaagagccatgttatctctttggacaaaccaaatggatgtaggtctcgtccgccaaccaccaaaccacttgctccgtcagcaaagagtaggacggggatattgagcttcgagaagagaccatagaagaagagcgtatattgatttagtgactatcgcgagaggatgtgatcacaaatggaaacacacctggcctgattcatccatggactggatctcagtcctcatcattgaactcgtgatctagatacatcgatcgcgtatgatataaaaaagtagataagagaagaaggagataagcgagccagatatgctgagctatctatagaccagatcgaacatacctcacaagctacacagagcactctggcttctgggtcagcgttgcatatgtcggctgccagccgaaggatcgataagcctccggcgcaacctactccggtgatcattgtctttctgagatgagaagaaagttctagtgcctcggcgacgaaatgatcgaacccagggtatgatgacgcggtgcatgtagctggtagattggaagaaaatagatggtcatgatgacattcgacaagagggttgcggtaaagagtgagggagagaaagagagagatcaagggtcgcgcacgtactgctcagcatgtgagtgatacccttcttgtctcctccccagtcatccagggcattcttggccgcttcgatagcgatctgaacgcccttgtcgagaaagacgtcgacaatctcgcctatactgggaggagcatccttgttcagatggttcgagtccgggctctggacactctttcgatgaagaatctctgttcggtggttgatcatgatcgtcttttcaagcctgccggattcgagtacggaaagagagcgtgaatcagaaagtcatgttcatacacacacacacacacacacacacacaaaagccttgtcagaggctgtctcggaaggacaagtagagcgaagaaggaatctgagtcgtcctggacagtgatccagcagccgtccatcatactatcactgcttctccctttgtatgtatgttcgaagttctgtgtgagtattgatcatgaatgaatcaatcggccggcttgatgtgtctattccgatggtgtgccgtgcgtgttcgatcagattcttccctccgcgcgctgtctcatcttgaaagagggtactcgacgacacacacacacacacacacacacacacacacacacaccttgtggaacccacatatggcacagacagcatatctacacatacgtagcacatgcacgcgcgcacacacaaataaatatatatgtacagatgaatcactcacgctgaggacggaacagcgtgcttccgaaggagcacgtcgaaatcatcggcagaaacagagaacggtggttgagctgtacctatgccgagaatacttggaggactcgcggtgggcatggtatgagaggactgaagagaacacggaggaagagagcggaactaagagattgaccggatagagaggagatggaaggttagtgtgtctgaatagatcgaatcactttctggtcgatctctcttgagtcaaaagaatatgcaaacccagagtcaattgtaacgcttcgaatggatgcccggcaggccatgacgcgtgtgttggtggacgagatggtcatgatgcgttctcgtcaggcttcgatggcttcatctttatgtctgaacaccatcacattcatcctctgaacagcgttgtctcatagccatggccatcctagcttccgtccctttgctccttcacactcttcttcttctgcctccgtcattcaaattcctgcttgatccgcctccgtctccgcctgccgtccgacctctcgtcagatcttacgccttcctccttctctctacccacctggcctgccttgttcttacattctcactccgacctggctcggttattctggcccggctcgccatcgcactcgctgtctatcatttcggacccatcggtcgagcgtggggtcgattgaagaacggagagttgacaggagagatgggtggtccgggcgttcatctctgtctgcacatactcgtcctgggagctctgtgttgggaaggttggagatctggcttgggcaatttatgatatatgtactcggcgaacaggtcgatcagaaatctgtgtagacttttcttaacaacagatttgacagaacgccccaatagtctggcatatcattcgtcacacccacacccgcgtctacagatagatcgaaatgtcatgtatcccgcatctgtctcaacctgaccttcgtctcgagcggacgacgagagatgacttctcggacttgtatctctttccctcgttgctgctgctcagacttttcggccatagaaggagagaacaggtcgtactcttgcacgagtcgagcgacaaacagccgaagaaaaagttgctgttgagcgtcgacctgacggatcagtcttcaaggaaaaacgaaccaacgaagagaaaagaacttgagcagacaaagaacaaagatagacgtactgcgaatcggatgccaaagcaagctctggtacccaatgaaaacgggtgactgccaaccctgctggcatcgtactctccgctctctggatctagccatcggtctagattaaaggtttttcccgcctcgacctcggctccctttccggtcgcatctaacaataaaacgatcgacgtgcctttctttatcggatactgaatagcctccgccgaatctgtggttgaaaggaggaaagtatcccgaatggcctcccgagaagtcagcgggattgttcccgccagtcgaagggattcggaaacgaatgatgaaagaacaggaagagatcctgcaaagagtatgcacccagatataccgaaaagcgagtaccgagacataagacatcaaacgggtgtaaaaagaaaaaggagaaactacaaaggaaaaaaaaagaatggggagaaacgaacgcgacagccccatgatctctgcataagataattcgggttgagaaggaagcatctccagctcttctcgaatcctgcgctgtgtgtctggattgaatatcagatggttcagaatccagcaaagctgggaggccaccgtatcgtctccggccagcagaactgcatgcaatttgttagtccacaggatgagatggaatgacatgcatggaagagttgttcatcgaggtgaaaagaatatgacatacgagtgaagagctcgtctcgaacttcattcgtggatagcccattagtctgatttcttctcagacattctttcatcacactccacggagcagccattccatctaccaccatgggcacagattcatcttctgccatacactgatcgatctgttgccccatccatctaaaaagtctaaatcttgcatagtgataccgaatattaaacgtccgtttgaatggtgtgatgatgggtatcggattcaatgtcttgaggaattcggaaatgggatcgaacgcgaggagatagatcagatgcaacctatgtcagtgattgtgtttgggactatagagtcgtataacgatacccttattcttcgatagactgacatcgaatacaacttctatccaactaacgacctggtgagcttgttgcgcgttaccatcgctcttctctaaaacgcccagatcggctccaaatataaagcggagcataatctctttcgtcaagagtgagattgatctctcagcatccatgagagggcctcctttgtcgttaccggcctcagcgtctggaatggatgaccatagcttgaacagccggtcgatgctggtatgcataatgggcatggcatgtttatcaagcgaggacgcggtgaacgacgggacgagcatcttcttgtgcgccgtgaaagtcgaatctgatggcagaaaagatttttacacaaaaaggatgagcagaagatgtttaagaagccttgaacgatgcatgccatgagaattctcggacgagacacgtacctgagttctgacagagcatgcttccttgacccaacacacctcgaaagacgcccataaagaaggaacctctgtcgaaggaagccttccattctttatcggccaggacccgttcgatccccacacgatcacataccagcactagtggctcgccaaaaatggagatctggcagagtgggcctagggatcgagcgaactgagctagaagcaccgacggggaagaagtcgagaaaaggaaggtcagggcatctccaaaaatcggaagtgatgtctttggacttggtatccgagagagagtctgatgtgaccgggacttcctgagagtgagtgccagctgaacaactaaaataaccaagaagcagccaagaagagccagtggtgagaagaccattgatcgtccagaagtgatcgttgagttctcaagcgggaatgttggcagtagaagtgtcgtcatgatggctgggttagggttagtttacatcaagcagtgcattcacgtgattagccacaatcctgtacaacacacgtgacgtgtttttttctaagccctcctttcctttcgtttccattcctttctttcctctctcctttctttctccctctctcctctttcttctccttcttctccttctttttttccctctttctgtacaaactcaaaactgtaaaaacctcgttaattaagaatcccaaaactcgcattatgtcagtttttttctccttctcccgaacatgtcttcatttctttcaagagtgatctgcttggaaaggaaaaaaaaacttttctctatgtccttttttctccttctttatgaagttgcaatgtcgctttcggatcatcctggcttgaaaaaacctcgcggtatacgtactggtgaactgacgaaactcttcgccttggtgtttttccatcggcttacgaccgttgcgatctacagccttggacgattctcatcttgtgacaaggactatctctcaggactattcaggacctaagagatctgtcagtgaacttttttctctctttctcttctttcctctccttctttttacaccttcggaggatctctccttctcatttcatcaccaaagccttttctcggctcgatttgcaacgattcaagtcatacaaataaatttcgaaaaataaaaaaaagaatatgattggaaaaattttactgacaaatttttgctcgtcgaactccgatgtatcggacattcgccgataattaattttacccggtaaaagctctttcgcctcttctttcatcacacttcacccacatcccgggtttccgttctcccaagaggagcatcgtcttccttgtcagtcctttcgttcccactgcgacctgcttgtcaaacactcctgtagctggatccttgtcttgatcttctctttggaggaccgctgctgacctttgccactttggacaaacaaattcggctttcagcccacgatataacttttgtctctttccgctcttttctttgaataaataaaaaagacaaaaatgtctgcctctccttctggtcttcctcctatgccggctcccccggtgccaagctcttcggagtctcaggctccttccgctcctgtcgctggtcactcggccgttaacgctgacgagcccgtggctttccccactggcgccgtcgccgtccaccctcgatatcccgtctccaacactgctaacgtcgccggctcttctgacagccagcttttcccgcctgctaccggtcgaggactcacttcctcgaatgagacctccggagccgaggcttgggaggatgaggaggctgatatggtcctcgagctttcggacggaaccgctttcgagggtcttggatttggtgcctctgataagagtgccggtggagagtgtgtcttccagaccggtgagtttctattgttccttctctatcaaacaaaggaatcgaactgaccttctggtcttcttcatatctcgataggtatggtcggttaccctgaatccctgaccgatccctcctactcgtcgcaaatcctcatcctcacctaccccatgatcggaaactacggtgttcccgctcgaccgtcatcccttgatcctgtggatgtcaaccttccgactcttccggtcgagttcgaatccagtaagatccacgtcgctgctctcgtcgtcggcgcgtaccacacttcgttctctcactatcttgccaagtcttccctcggcaagtggctgaaggatgaaggcatccccgccatctggggagtcgacaccagggctttgaccaagaagattcgagagaaaggagttatgctcggtcgagttttggccaggaaggactttacgccttcaacccaggagaatcgaggacgaagcttgattgcctcgatctcttctctcccggaacgacttctcggagacgcctcgaacgcttctcccactccgtccccttcgaggcagccctcgtcggagtggagggagaagtaccaggttgtccccttttcggatcccaatttccgtaaccttgtcgccgaggtgtccgtcaaagagcccattctctacactcctaagggggtttctggagttgagcccagtgttcaccccagagagggtcgacctttgagggtcttggctttggacttgggaatgaagtacaaccagatccgatgcttcaccaagcgaggaatcgaggtcaaggttttgccttgggtcagtttttcctattcctcccccaccccttcccctttgtctcgctcgttcgcgattgaagcagccgtacttaacttgtcctgttctctttgtatttgacaggactacaacttcaacaagctcgagcaggagccgtatgatggtctcttcctttccaacggacccggagacccctctattgtctctgccactatcgataacatcaaggaagccatcactgctgccaaggttcccatctttggtatctgtttgggacaccagctcctcgcccaagcttctggagcgaagacctcgaagatgaagtacggaaaccgaggaatgaacattccctgcaacagccgagcgtccggtcgatgctacattacttcccagaaccacggttaccaggtcgacgtttccaccttgaccgacggatgggaggagctcttctacaacgtcaacgataactccaacgagggtatctggaagggtaaggacggtctcccgtacttctccgttcagttccatcccgagtcgtctcccggtcccaaggataccgagttcttgttcgatgttttcatcaagagcatgaccgattgcgccgaggccgagaagctcgtccctgttcaaatgcccggaggtgacatcgaggagaatgcgtcgaagaaccccaaagtcaaggtcaagaaggtcgtggttctcggatctggaggactctcgatcggtcaggctggagagttcgattactctggatcccaggccattaaggcactcaaggaggagggcatctacaccgttcttgtcaaccccaacatcgccaccatccaaacctccaagggattggccgacaagatctattaccttcctgtcactcctgactttgtccgaaagattctcaagtacgagaagcccgacggaatctacgtcaccttcggaggacagaccgccctttccgtcggaattgccctcaaggacgagttcgaggagctcggatgcaaggttctcggaacccagatttcgaccatcatcactactgaggatcgagagctcttcgccagggctatggaggagatcggagagaagtgcgccgaatcggccaccgccgtcaacttcgaggaggccgctgtggccgccaagaacatcgggtacccggttattatccgagctgctttcgctttgggaggtctcggtagtggattcgcctcgaacgagagtgagctcaaagccttgtgcgacaaggctttcgccaccagtcctcaggtcttggttgaaaagtcgatgaagggctggaaggagatcgagtacgaggttgtccgagattgcagagataactgcatcactgtctgcaacatggaggtttgtcgttgttcattttaaaatccagtctgtcagcctttgggctaatcgaaactaatcaccggttccctcttttccagaacttcgaccctcttggtgttcacaccggagattctatcgtcgttgctccctcccagactctttcagacgcggactacaacatgctccgaacgacggcgaccaacgtcatccgacacttgggtgttgttggagagtgcaacattcagtacgccttgaacccttactccaaggagtactgcatcatcgaggtcaacgcccgattgtcccgatcttcggctcttgcctccaaggctaccggttacccgctcgccttcattgccgctaagctcggtcttaacattcctttgaacgagatcaagaactcggtgaccaaggtcaccagcgcatgcttcgagccctcgctcgattacatcgtcgtcaagatcccccgatgggacttgaagaagttcgccagggtttcgaccttgctcggctctagcatgaagagtgtgggagaagtcatgagtatcggtcgaaccttcgaggagaccattcagaaggccattcgagccatcgatgattccttccctggtttcagtaccgttagtgtttatcccttgcttgttctgttagtcaaatgagagcaaacatgctaattaatccttttacttaacgcagaacgactacgtggatgacatagactccgagatccgaactccctctgacaagcgactcttcgctatcgctaccgctttcagccgaggctactcagtcgacaagattcaccagatgtccaacatcgacaagtggttcttgacccgattagagcgacttagcaagatggagaagttggcttcgtgagtgattctccgtgcagtttgctcccgcttgtcctttatatcttgttgacgcctatttattttctatctgtagcacctactctccctcttccgttccctctggtttaatccgacagtgcaagcagctcgggttctctgatagacaggttgccaagttcttgggttccaacgagctcgccgttcgacgactccgacaggacgccggaatcgctcctttcgtcaagcaaatcgataccgtcgctgccgagttccccgcattcaccaactacctttacaccacttataacgctaccgagcacgacatctcgttcgaggaccacggagtcatggtgttgggatctggtgtgtaccgaatcggatcctctgtcgagttcgattggtgtgctgtcaccgccatccgaacccttcgaaagctcggtcttaagacggtcatggtcaactacaaccccgagacagtgtcgaccgattacgatgaggccgatcggctctacttcgagaacatctcgctcgagaccatccttgatatctatgatgccgagaggtcttccggagtcatgctctctatgggaggtcagacccccaacaacatcgccctccagcttcaccgacagaacgtcaagatctacggtacctcccctgagatgatcgatactgccgagaaccgatacaagttctcccgaatgttggacaagatcggagtcgaccagcccttgtggaaggagctgaccagcttcgatgaggctgaagttttctgcaacaatgtcggatatcccgtccttgttcgaccttcttacgtcttgtccggagccgccatgaacgtcgtcttctccgccgacgatcttgcgacctacctcaaccaggccactgccgtctcccgagaccaccctgtcgtcatcaccaagtacatcgaggaggccaaggagatcgagatggacgccgtcgccagagacggaaagatggttatgcactacatttctgaacacgtcgagaacgctggtgttcactctggagatgctaccctcatccttcctcctcaggatcttgacccggagaccgttcgacgaattgaggtcgccacccagaagatcggtatggcgctcaacgtgactggtccttacaacattcagttcatggccaagaacaacgagatcaaggttatcgagtgcaatctccgagctgcccgatctactcccttcgtttccaaggtgaccgacatcaacgccatcgagcttgctaccaaggtcatgcttgacttccccatcactccttaccctgaggtcaagatgcccaaggattacgtcggtatcaaggtcccccagttcagtttcagccgacttgctggagccgatcctatcctcggtgtcgagatggcctccacaggagaggtcgcctgtttcggaaaggacaagtatgaagcttacctcaaggctttgatctcgaccggaatcaagatcccgaagaagaacattttgttctccatcggatcttacaaggagaagatggagttgcttccctgtgttcagaagttgcaccgaatgggctacaacatcttcgctaccgctggaacgtctgatttcatccaggcaagttcttttccttatgtttcaaactagttcattcatatctgatgttttctcccgcttgtctacaatcctctcgttcaacaggagcacggaatccctgtcaagtacctcgagtacctggaggaggatactacccacgacgcccagaagtctgagtactcgttgcagcagcactttgccaaccacctcatcgatctctacgtcaaccttccttccaagaaccgataccgacgacctaccacctacatctcgagcggttacaagtctcgacgactcgcggtggacttcgctgttcccttggtcaacaacgtcaagtgcgccaagctcttcatcgaggctatcgttcgaaacccctctatggagatctccagcgtcgacttcaagacttcgcacgagacctacagcttccccggattgatcagcatccagacgtttgttcccgaggtcgctaaggctggctccaaggactttgccgaggtcaccaaggctgccatccgaggtggtttcaccatggttcaggtccttcctcagggtgtggagtctcagatccacgatgaggcttccctccgagtcgctcaggctaacgctgacggacaggctcactgtgattacactttcggagtttctgctaccagcgagaatgcttccctcatctccgagagcatcacctccggtgcccggtcgctcttcgtccctgcctcgtttgcttctaacaccaacaaggtcgcgaccgtctccggacactttgctgcctggcctgctgagaagcctatcgtgacggatgccaagactaccgacttggcttccatcctccttctcaccagccttcacaaccgaagcgtccacgtcactaacgtcaagactcgatctgacatcgagctcatcgctctctccaaggagaagggacttcccgtcacctgtgatgttgccgtgtactcgctcttctttgcttcccaggatttccctgctgccacctgccttccttctaaagacgatcagaaggctctttgggacaacctcgccgtcatcgacaccttctcggtcggaagcattccttaccagctcggtcttgacctcaagcaggtcgtttctcctttggctggtatcgaggagacccttcctttgctgctctctgccgtgaatgacggtcggttgactttggaggacattaccttgcgactccacgacaaccctcgacagatctttgatcttcccgagcaggtctccacctctgtcgaggttgacaccaacaggagcaccgccttccctacccccaagcactggtctcctctatccgagaagatcatgttcggaggtgttcaccgagtcgtccacaacggacaggccttcttcattgacggtgtcagtacctccactcctttcggacgagatctttccggagaggcttcgcctcgaaccaggaacctcggaagccgagcctcgttctcccgagctcgaccgaccgttcagacatacccctcgatgtcttcccccaagattagcggtcgatcccccgtcctcaagccttactcgccctctcctggccaggtgtctcgaatcccgtcgttccctgacctcactgctgtctctactcctcggtttggtgctatccagcctcacccatcgttccaccgacgacacgtgttgaccgtcaagaactacacccgagaggatctccacgccatctttagtttggcctccgagatgagaactcaggtcgagcgacacggaagcgttgacacgctgaagggccgagtgatctgcaacttgttcttcgagccctcgacccgaacttctacctcgttcgaggccgccatgaagcgatgtggaggagaggtaacctcggtgagcgttgaccgatcatcggtcactaagggagagtccttggccgatacaatccgaactgtcggttgctacaccgatgccattgtccttcgacacccggctatcggatcggctaaggctgccgctaagttctcgcccgttcccctcatcaatgccggtgatggtatcggagagcaccctacccagagtcttcttgatgtgtttaccatgcgagaggagcttggatccgttaacggtatcaccgtcacgatgagtaagcctctttctttgtctttgtcttcgtcttgttgttctgcaatcaagattttttctctttactaataagactttcttctcttttacttcttccttatccagtcggagacttgaagaacggtcgaactgtccacagtttggtcaagttgctctcgctgtactctgtcagcttgaactttgtgtcaccaccttcgttgatgatgcctgagtctgtcaaggctgaggcccgaaaggccggagtgtccgttcacgagtgtgttaacttggatgaggtcatctccaagtctgatgtgctgtacgttacccgaatacagaaggagcgattcgagaacgaggcagagtacgaagccgtgaaggacatgtttgtcatcaacaacgaggtcttgactcgagccaagccgacgacgatcgtcatgcaccctcttccccgtgtgaacgagattgacccggaggtcgactttgactccagggccgcctacttccgacagatgcgacttggtctcttcatccgaatggctctcttgactatggtgttgggttaaaaggaggaacgaatttgaccaaaagtaaaataaattaaaataattcattcgcatcttttcaagagtctttcgacttgttctcttctttcagtcattcttctgtacttccttctcattcgctattcgcctcctctttctattctatcattatctgttcccttcatccttggctctgcattcggaacgttgttacaagcacctagattttctccttttattctatgatttatctttcttccgaactgatccgggtcttggttcaattcatttgcgagcatctgaacaaagagcaatgacgagggacatggaaatacaacacacaacagtaagggagaatgacgaatggcgttttaatcgactctataaaaaccccaaccgagcgaaccctgtgacatctcccaaacgaccttcgccgcgccctcttcctccctctcggaatgctctctgacggatccgagcgcaacgaacaaaggcatgaaatgatccggttcaggcacagctttcttgtagtttggatctcgttggatctcttcgatcttctcgagcgcgtttgacggtcggaacgctcggacgagattgccgactgagcggatgaaaggaggaccgtacgtatcatttttgcctgtgaaatagtctcgtagattatgaaccctggcgtgatttcgttttatgatgacaaatttcgagtcgagtcgagtcagcatctgatagcaacaaagacgagaagaagaagacaacaaccaaaaagttgtttctcacggttgaccggatgcgatgatgatgacgccctgctctcgaagtccgtccagtgctttcccgagtttgtatgagctcaccaatgatccatctcctggaagagagatctgaaggattgggaaggactctttggtatgatttggaaacatcactttgaacggaacccaagctccatggtctagacctcttccttttccttgaatgcctacatagtcgatcccagctgaggtcagtcgatccttaacggcagagacgagccaaggagcggaacgatgtggaaactgttggacgtagtagtgagcaggaaagccataaaagtcgtagatgagaggagtctcgagcgcttcgtttacttggtgtgcatgtttatgaacataatgtttagtaagtggctgcgtgcttgcggagaagaagaggtctaattgatattaaaaaaaaaaaactaggtgctcgagcaaaacattccagacatactctctacagcagaagaatgctcttgaccttcccaatgagccgaaacgaccactattccttgtggctgaagagcttgaatatcttgacctatggcttgccattgtttgtaagctcccgagaccgtgtcaaacaaagtgggcggtccgcctggaatgattgcgtgagaacataagattgggctgaagtgagttcttagttctgtttaagggaaaaaaaaagaagaaaagcgacaaagaagagagagagcgcgcgcgcgcacgcctgaccgtgagaaataaagaacgaaggcatcatgttgataaccttggatacgaattgtagagccatctcgatgtctgtgctgatgagactcagaacgaaagggaatgagatttgaacgagtatataacttttgaaagtttcagtaagccggcggcatgaccgaagttcacattacgcgtgggaaagatgacggtgacggtgaagcccgatcgttggataatcattgttcatgattacataattagcctcttacctaagctacatgactccacctaagcaagatcgccaagagatttcccacggacccggccgagcttccgggccggttggagttccagaggacaaacccgatccggcgatctcttggtaaggaagaagcattgggcgctggacatcgggtgctgggtgttgagaggttgagtgtcgagtatcagatgtgagcgttactggaacagctgatcagttccagcttgttcgtcgaccagcggcttgatgcctagcaccagtatatgtatgtgtctgtgtttctttccttttccatgaaggcaacagattgagtccggtagcaaacaacgggatcaaccataacatgttcaagaggcagaatggagaaagaaaaacaagagggcaaagactgagtgaagctggataggatcctggaactgaacacgacaagcgagaaatttgttgtcacctccttctctctcaatcgacggtcatgtgaagcaacacctagctgtaagtgctccaattcaggtgagtcactcttgaatctcccacatgtacaaacacccacactcagacacatacaccctctctcattttcagtgttggcctagttgatttccgttgtggtgatgaaccaggagaaagtccgatgaatgttcttggctagatatgtttcctttcggtcctgcccttctgcagtctggtgacgcatctcttgcgtccatccgtcattgatctcccttcttcacattcggttgaagtttcgcacggctttcgtcacaaggctgctcttcttactcctaaacttgtttcagtcaagttgagccgtcgtcaccgatcgatcctctctaatgaattcttagactccaaaccagcgacatacgtaaccaaaggtgaccgtaccaaatcttgaagaactagtcaggaggctgtatggacaaagaatcaggaggaatagggaggattcagtcagaaagaggaaatcaaagaagcataattcctcttcaagaatttgtataaaggaacgacgagaatgggctgaatgttaacctttttgtctctcattccaatccttcatactctcagcaaggcaagcatattccaactagacccaacaaccatgctcacttcactcgctctcgtcctctttcccgctatggccctcgcggcgccaacgttcgtgacctcgcctcaacacatatctccaggaaaggatagcaaattggtaagtgtgtgcgtgattgagaaaatcttggtcatagcagcttaccttgttcgcactccttattcgtccatagtgtttggccgttgccaatcagggcgccttcaagaatggagatgctgtggtgtccgtgtcatgcgacacttcgtataccgatggccgacaactttggagagtctaccctggagactctcagatccaattgatcggttcgaacttttgcttggacgctggaacagacaactcaaacaaccagcctttgaagatttggacttgctacccaggtctataccagcagcagtggtattatactgatgacaacagaattgcgatcaccggaggcaacaagtgtcttgatctcggaccgaacggtcctcagacctatcagtgcacccccaacaatgacaaccaggtgagccttgcgcataattccaacattcttgtgtttaaattggcggtaaaagtcaccactggacactgacagcgcagtccttttcatcggttttttgaatgcttcttcccctcccctttcctcaaaataggtctggtacactcctggtacagtggctccccctgtgagcagcactaccgtcccacccatcacgtctacgttagttccctcggtgacaacctcggtcgctcctccggtctcgtcctctgctagtccttctccccctctcggtggacctagcttggtgattcacccgaacggacgaactgatttctgtctggaggctgtatctgcgaacaatgtcccggtcgagggaagtctcgttcaggtcaaagtttgcaccgggcgatccaaccagcgatttgatatttaccgaggggataatctcgtcaggttatcaaactcgaacttgtgcttggacgccgggtcaaacatcggaaacaatgtggcgctcaaggtttggacgtgctaccctggattgaagcagcagcagtggtactacaccaatgacaacaggatcgcgatcaccggcggaaaccagtgcgcggataacacgaacgggatcttgagctctgcaaacacccttcaaacctatcagtgcatcactgggaacaacaaccaggtctttaccgtgtccaactaaaaggagttggcagggttgttctgttcggctctactgtatcacactttcttttctcactgtcttgtatcactagtctatcttttcactctcatagccttatgtgtcggttaagccttcattcaagaaccattctgtctatccttccttttgcttttccaaggacagtgcacggagtttcctttctctctcctttgctggttgatcttagtttacgtccatcttttcttttctaaagaaacgaatgaaaagaggacgtccggatgtatatctactctccaatctatgccatcacgctatctactgatgatcggatgttaaatcataaatctctcttttctgctacctcttcatggatctgaaaagtctctatctctccgatgtgaaccatgttggtcttgctgtcaaatcctcaagatgagaagggaatactctcttaatctcagaagtcggcctttaagtcgctacagagtcagacgaatctgagcgaggatttggagttctgtattttcatcgcctgtcgtgtcctcctacctcagcgttctcttttaaggaagaaaaaaaagaagaaagatagaaaggaagatctctggaacaaagcctttgaagaatccaaaaaaaaactaagatcggttgaatttgaaagcgtgatacttcatgtttatctctgtactgtctggaaagacctatgtgcgacctcaattacgaaggatcaaaccgcctccaccctcatcgcaactccattcgttttctgttttaatctttgggctttcctctggacgcgaaggcttccattccccatggtctaggagcatgagcgaggtccatcttgaaggaccacttcattcggataccgttttgaatggccagaccgtgtctgtgtttttgaatcagcgagagaggaacatgaggagtcatagtatgaagacgaaaagagaagaagggaggtactagcagttagtgatgatcaacaaagaacaacagaggaaaaaaaaggacgaaccctctgatcttcttcggcttcttgggttctctagcaatgaaccgggggtcaaagccctgtctgtacttttcagtgatccattgaacatatctagaaaacaaaaagcaacgcaccaaacatggacgtccttcagattagtgtatagaagagagagggaaggaaaagaaagaccagaaaagaggtattgagaactgacttgacgtccttcgtgacgagtccagcctgagtccagccctctgcctttctagtaaagagctcatcccaggtgacctctcctttgactttgttcttgagatttcgaccggccgctcggaagaacgctgccggatctgttatcgggcctgtgaagggaagtaaagaatgagagaggagcgagaggtatcgagcgaagagagggagaacagatagaagaaatccaaagcaaccacgatcagagaactcaagcttttctcggcacaacaaatcatccagaaatgacttacctttcggttcagggatctgtctctttactttggacccgatgacgaccggagggagttcttctctgatggcctggtcgatgtgcttgaagatctttgttgaccgtgcctggagagctaccggagcagttgtatggaagctgcgtgagcagaccaggcgagaggacgaggctagcggaacaatatggcgagagagggacattgacaggatctctgggctgagggttgacgacgacgacgacgaggagagagcgaacggagagagaaagagagaaagtagaaggtgaggagagagcgtgtgcgtgtggttacacgtgtcacgtggtgtgatggctacattcacaagtcaacatggttacgattgattgatcgatcgatcgatcgatcgatcgggtaagccatcttgccgctgagtacaaagcaagcgcagaggacgagacagggcgtggaagggagcaagaggggaggaggtagagggaagcaagaaggcagagtgaaaaagacatagtagctgagagaaaaagagcgtgtgtatcttgcttcgtctgtgtagacgatcttatgcgagaagctctcgatgggaatgtgcgcgcaaagagtgcgtagcgagagtgagagcatacatgtcattgacgccagccagagcgctgaacatgatcatagagaagaagaaagagcggagtgcgtagagaagcaagaacatactcatacccacactcccataacgagctttccctcgtttgttgtctgatgtctggtgtctgtcgtctggctctggctccagctccggctctggatggatcgtacgatgtttgcgggggaaaagactagacaaattttgtaacgatcaattagaaatatcaaccgattttcctaatgatttttcacccaacactcgaacacaccggaacactccactacttctttttcttgttctcattcttcctctaccttctccccccgagtgtttgaaacgttcacctcgactatcggcttcgactttcaccctgatcattagttctactctcttctttatctttcgatatcatctcgggccaatttagtcttcaacaggcacacgagcgagtccccttctcttccttttttaaccttcacgctttctttcctctcttccgatcaaaacaaacacatgggcaagttcgatatcatcatcattggtgcaggcatcgctggatcgtatgtgtcgttttgtcttgttctagttctctctttcatctatcacattctcacgttcttcgtaatatatcatacagtactctggcgtactcccttggccagtccggccgtcgcgtactgtgcatcgaacgagacttgagcaccccggatcggatcgtcggtgaacttctccagccgggaggttgtgcctcccttagacaactcggtatgggagactgtctcgaggatatcgacgccgttgccgttgagggttactgcaccatggttagtccctcctctctatgtcatcagtcttgttctttcttgccggaccactccgaccacgtgccctaataagtacaacttacacgactttttgatcccatacttaatcccaaatagtacgacggccaccaggtcgaaattccttatccgccgtgtccatctggttctggctcgtccgccggaaagactccatccggaaggatcgaaggcagatcgtttgttcacggtagattcgtcgacaagctcagagcaaaggcacagagctcaaagaacgttgtcatgcttgaaggtctgtcctgtcattcttgtctttgcactcgttcctcttaacttatccaaaacctctctcaattctttctaggcacggtcaaatcactcctcaactgcccggattcctccagagtcattggagtctctgcttctatgaagtcggccgccaaggacaccccgccccaatcgttctacgcaccggtcaccatcatcgccgatggctgcttctctcgcttccgaccgacgaatgcgcctcccccggttgtcagatctcactttgttggtctcgttcttcatgacgcgcctcttccgatcccaaaacacggtaacgtccttctcggctcttcctttggccctgtgctcctctaccaaatttccaccagagagacacggatgcttgtcgatatcaaaggcaagcttccctcgatcggatcgggtgcgctcaaagagtacctcgaacagaaggttgttcccggcatgccttccgagatggaagcctgcctgaaggacgcgttggacaagtccgagcaaggaggagacgccaggctcagagtcatgcccaacagctggctccccgccagacagcagtcgaccggcaagaaagaggacagagagggttgcatcgtgattggtgatgcttggaatatgaggcatcccctcaccggaggtcagttctttcctcttccttcgtctgcctatctccttgccctctccattcttttcgaatctcacctcacgatcatgcttttcttgatactacacaggaggaatgacggtcgcgttccatgattgcgtccatctcacaaacatcctcgccccgtcaagctcactcccggaccttgaagattggcacgagattgcgcccgcacttagaaattggtactgggagcgtaaaaacctttcgactgtcgtcaatgtgctttccatcgcgctctacgatctctttgccgccgatggtgagttgtgttgtttttccgtgttgacgaggtcagcaattcttactgacttcctttttcttccaaattcactcagatccaaacttagaggttcttcgacagggatgtttcaagtactttcaactcggcggctctgctatcgctggtccggtctccctcctctccgcccttgcacccagaccgctcctgctgttctaccactttttctatgtcgcgctgtacagtatttggtgtatgtttttccaccctcaacccgtccaccttcccagccgtgatggttcgtctcttcttctttgtcttccctcttctcacagccaagtctcatccaactgtatcactcggatctaactcgtcttgttcttttctcttttaataggcacgtcgactccgctcgaggaaaaacagttgatggagggcaaggaaaagccacagatcgtttggaaaaagccaagtgtgacagagtatccattcctggttgtcaaaagtttccttgtcgtgagttctgtcctgtttttttttccttctgtgtgggtgtactataactgactcgatcgtcaatcccgactgaatcttgttctgtgttcggcgcgagtacagttctggacggcctgccaagtcttgttgcccgtcatgtgggacgaacttcgataactttcctttctttgctctttctttcgttctcaaggaccctatctttgtttcttgtttctggtctcttttcatttcttaatctctaacctccgatctccgatcttttccgtattttacacgcaagaccaactcacttcccctctcttctctgggccatcgctatactccttttgctgtttcgctttctgttctctatccattctcatacctcgcaaaagggatcgatcccaaagtcgattctgttcggtccgtcggtccgcccgtttgtttatctatccatctgctctactctaccaacatagatctagaagaccagaacttgtaaaataatagtaatgatactttcttccaaccagtacagaggaagaaggttttgggggtctggtctcgattggaagggggttgcgaaatccagaacgtcaacgctgctctcggtgttgatcgagtcttgttcattgtcatatctccactcttcgtcctccgcaacctgatctctgacctcctttcgccttgttgtatcataaagacaacattccagccaggcagatgtgcaagaagaggacagaataagaattcgaattcatgtcccatgctcgttccggatctcttttacgattacacatattctacatgcacctgactcttttctgaaagatgcgctccaatctcttcacttgactatctaccaagacggtcaatcgatcagttcgccaggtgatcagaaacagagaagactgaacgagacaaagaagaaaaggcaaacaaatgaaacatacatctaatcgtaatctcttcctttgcctgatcgtctctcgttcttcttttcactcctccgatctttctcgaccctcacccgtttcttctgagcgacgatcagcttctgaaccgtctgtgactgagcggtcgtcgtcggttttggtgagagcggtcttgccagactgagtagatgcgtttgaatctatcggatcggttcgttttggtttggtatgtcgacagaggcaaatacaaaggtggttaacagggcagttctcggtacacagattagagggaagaacgtgaaaggacgaaagagtttgggttgatagccgattcaaccgaggcgcaccttgtcgaagcaatcttgaaggttttcggattgtgtacggtacgaagaaccggtgatgagcagtgaattagacgaagccgcgtagtatggctatacagagcagagcagatcaacaaagtcatcacagtggcagatgagaagctggagaatgacatgaaacagatcataaggcaaaggacaagaaactagcagagatacatacagagtcacgaagacaagataaaagcgaggaagggatccaagaagcttgatctatgttgacttttaaggtcgcctttgtattgaccttagtttctcagttgtcaacaaaagtgaaagcagaagggattggatcagcttcaacatcatctaggataaacaagacatacaggttctcactttgttaacgttctgaccacctttacctcctgaacggtcaaacctgtattcaggtcgaatgcgactatatcgatcaatcctctgcatgactatcttcttttccattctagaaatagatattcactcgcctgacctcacacccaggtctactcttcgacaaccgttcccgcttgaaactctccatccagtctctcagggcgagcgtctcgtccggagggagcggactttgccgagggcctgttgagctaggtaagtttgagatgaagcgagatcttgtaagaaaccccggacagcagcgagtgcgctgagagaacgaaacaagagagatcattctgaatcaagcaagaagtagataatgagcagcctggtatgatagtcagacttatggatgtatatcgttcgaaagcctggaggaggatcgcccagttcacccgtcacgtgaccgtgctcatatgttcactcaagagcacacgcccaacggaagcgaggagagcatatacagatccttcatatcggtgactctcatctcctcgtttccctttctgggtatcccaataacgatcatggtcatggcgttaaacactatatggaacgaaggtaggtcttgtttccatctgctttgttcgttcacttgagccttgtcttggtgtctggcagcctcgtctcctttctgtcccctcgcgtgctcatgctctctcaacgataacccaaacctcacaggcgggttccagatccaagttgaaaactatcgggatagatacaaacaaacgatcgactctcatcaaaccgctagctatgttggcgccagatggatcgataaaggaaagggaaaaacagtgatcactattctcgagtctccatcggcaagtcgaccgataggcggcaaccaggctcgaccggaggagtttgtcgatcgtccagatcggaaccacatgtcggatagtcctaaaagattagcggtcattagcttggaagacataagatggcatcttgtcctgaagggtgatgtacatgaaggttcgtccgatgccacttgtccggtgagattatccttaatcatgccaatctgagcctgctgacgttatcttttgccaggcctgtattccataccggtcaacggaaacaaagacttcgacttggtcattcggaaggatggaacgctctcagttagatgtctgggaggaagcttccagaacggcgtgattgaagctaccgtcaagatacctcctcttcaaatcccgtgggtttcccaaaccctcaattcctcagttcgagacgaatggctaacctcgaggtctcatctccttatgcatttttttctattgcatgaatgaacatatggaaaactctatgctctctttgaagatcctctccaccagataccctgaccgcctgctctgccgttccctccgacccatcgaccgatactcaacctgatctccaatcgtgccatgctctttctcctaccgcatctgagctgaacacacctccttattcagaccgttcatcgaagaaccacccacatgtttcttccaatcggccggcctccaatccgtatactttgtccgaaatctcaccagatctgatgatgctcttggaagaactccgagcggatcaacgccggattctgcagaaagaattccaactggtcggcgctgggttcgccgaaaggttacttagcggaggaagacgtctgatgggcgtgagcgagcctcaagagtatgttatctactagtctctgatctattcccttttctgttatctgtcatccatcgtgcgcgcacaacggggctgattctaaggacgacgatgataccgaatgatgacgtctcctctacagattcttatggatgacagcgctgatcaacctgctggtgatacctacgatcctcttggtgatctatatgtataactctcgtcgacaatccaccacgttcaccaccttgtttttttcgtcttatgaccgggcacgtgaacgagtccgtcgggtccgtggtcgtgtgttgacgacgcctcctccttccatagctgctgtcaatttcatcactcccttctcaaactctacctccacctccacttcattctctctgaaccctttgacgttacctgtcgctggacccagcatttcctctttatctatacgtcctgttcatttagaagatccaacttcgttcctgatagatcgggtcccccaatgctgtctcgtcagtcctgacagagaaggagtgagggatgatgttttgcccccgccgtatccatgggaagaaagttcgccagactatcttagttgaccagggtttcttctatagattttactttttatattgtgtatttagcctttgttgtcttgcctgatacttgtatgattgatgatctaacgacctttttgtattgtgatctcttcagttgaggttgctctcaaccttgcttgtattgagatccagtcacgagaggatgtatgttgatcgatagtattgtaatttaaaaaagggaagcaaaaccgaaggtaggtgggtagtaataaaacagagttctcctatcaaggaaggaaagtgaagaaagacaaaagagacagagcaaggtaaatagaaagagaagccagttccttttcggtttctattaaacctcctgggaagcagcggccttcttgggctttccagacttggccgggagcaactcaggctggatggaaggaagaacaccaccttgggagatggtgacgtgtccgagaagcttgttaagctcctcatcgtttcggatggcgagctgcaagtgtcgggggatgattcgggacttcttgttgtctcgggcggcgttaccagccaactcgaggatctcggcagagaggtactcaagcacggcagcgaggtatacgggagcaccggctccgactcgctgggcgtagtttcccttcttgaggtctgggagagagattgataggtaagtgaagatcctttggaccaagacaagggcagatatatatgaacgtacgtcggtggattcgaccaacagggaactgaagtccggccttggcagatcgggaaagggtcttcttatcagtttcgactcctccagcctttcctccagactttcctccggctgactttccagacctatgatgagcaatagaaaacatatggatcagcatccagaaacgaacgaaagtgaggttcaagataggcaggaagcttacattgtgataattaggtttgggttggggtggagttaaagaggagttgttgtggtagtggtatggcaaagaaagtatggatgagagcagaagttgaggttcaaagtcgagagtgccgggttttatagagaacatccgacgcgtctgagaaccttcacaagtcgcgtcgtggccaaaaattgagacgcgtcttggaggtcgtgttccagatacactaccaaacctcattaaatattcatcaacgcccaaaaaatgatctgatcgatgcaaaatttagctgaggacgagcataggtaagttcttcatcaaaacgtcgcttgaatggatccaaaggatgcattcaaagaggagaaagaaataaaaaggcaggttttgcaacgtgtgtttccggatgtgacgcgtctcctgtcgatctatataagaagactttctttccgtccttcagtttcccttcctcccctcttccttcatcaatccaactttgctctctccaaactactttctcagccaaccgtttctccccactattcaaccttaaacaatcaaaatggccggacccgcttccaccgcttctaaagcccgtgagttcacctcgttctgttcccgttctaatggctttgagtcgtcgaactcacgcgtcctatttgcttcttttttctttcagccgcctctaaggctcctgcttccaaggctcccgcctccaaggcccctgccaagaagtccactacttcgaaggcccccaagactgagggtgacaagaagaagaagtccaagaaggtacgcaatcaatgcttttttaaattcatcacttgcgaactcaaattgatcacacctccttctcccaactctacagagaatcgagacctactcttcctacatttacaaggtcctcaagcaggtccaccccgacactggtatctccaacaaggccatgtctatcctcaactctttcgtcaacgatattttcgagcgagtcgccggtgaggccagcaagttggcttcatacaacaagaagtcaacgatctcttcccgagaaatccagaccgccgtccgattgatccttcccggagagctttccaagcacgccatttcggagggaaccaagtcggtcaccaagttctcttcctccaagtagagtgccggtccctctggtttcttctttctttttttacatgacctgtcgatatctttgagctctttgctattgataccacagtgtgcccatctctcccggaccctctctttactggaagcttttaagttttacctctaccttttgttgttaataatatgaacatttatgtgtaatctatttcaatgtctagatctagacatgaatgtgagaagacttgattgagacagtggtgtccggtaacagctcggtataaatcgtgttcgtcatatctgaagtcgatcgggcatgatcgataaacgttctgcaaaacccgcaaatctcacgtgaattgttacgagcaaatcatttggatatttatgatgtacaattacttctatatgttgaatgtcatcttttcttcttgttgtgtgttaagcttgggcttgcgattcctgctgcatggcgacaatctgagccaaacgcgaagacaagagaggacatgccctgatcaaccgctgagaaacgggtagctctagtggatgacagattcgtattcacgaacctcgagtttcttcttctcagatcttgtcgagagatctgcaagcgtcttttccacacgtacgctggtagtgtttgatacaaaggataaaggagaggaataagagtggaaggcaaggtcagtcctgatgattacatgctcatcaacggaaaaaaagacaagaatatgcagactgacatctcgctgttaatgaattccagtcgtttttccacgttcgatttggcctcagcctgttcttgcttgaccaagctgggtccaatcattttgtagatagtattgtgaggtttaagcacggcaaactccttatgcatgccatgaagtcgttgcagtcaaacagagataaatcaaagatcagtgacactcgtacacaagatcgttgtcatcaatctgtaaaactcgcctttagtacaccttcattctccgacttctgactgtctagacgttggcgagcttccacagcatttgatagatctttgtcccccaaacgtagtggatttacccggatagcaacacacagaatagcattttgtaagatgcatcatgtcactagccaaccaccattaaaaaaaagaggcaacactaaccagtctgcagtttttgaaactcgatggtagactcttctagccgactctctaaagactttgtactcgacattaccgctcgtgaactaatagaggatggatgccggaagatgatgacgatcaacaagtctgaagagaaggagcgacaacgaatagcaagagttgtgtaaccggccaggtgaatgttacatacacgtgacctgtgatctgacctcggccgacagctgccgatcaaatcggagccgagattagatagcgaatttttggccgaatttttcggagctccttcgaaactctctgggaatgtttagcaaacaaatatcgtctatttgacacacatccaacatacgtccaacacacatacattctcacaacctcgtagtctgtaccagtgatcgcgagatagcaagaatttcagtggggtctcctgattggtctgttcacccaagtttgattggtatgtgggtcaatttctcacacttctgaaattgaccgatgtggactgatgactcgttcaacatggttcgttttgactcctccggacacaagtcataaatagatcgccttttttgagcgtgccacccacccaactttcgtttacttcgacaagtcgtatagtgacttgcaatgaccgccgcaaaagcatcatccttagcagaagagagggatctcgagagtggatccttgaaggcagtctcgggcagcctgacagcctcgaatctgattcttattgtatgtctttatctcacaattcacttttgcgacgcgcttcgtccgcacacttgagctcatacctgatcacctccttgtttttcgaatgttcacctgcctgaacggaaacctaatgacagtttgccgtcagcttgaccatgattctcaatattatgaagtaagtccatccaactatctacctctccgtcttttactcttcacatgattcctcagcgccgctaacgccgcagcattgctccttttccatccttcatgtctcctttctgctagtaacacatccatcaacgtcgcattaccatctatcgccgaagaactcggcatatcccaagccgatctccaatggccagtcaccgcctacgcccttgctttcgttcgtctccacacttacattcttgaaggtctgtttgacgatcgttatctgatgtcatttcacatattatcgttctagggatgcctgctgttgctttggggtaagctggcagacttatatggaagaaaatatgcctacctaggagggatcgcatgcttctgtatctttgtacgcacatcggggttctccgtttcccgtttagcggaagactgctttgatggataatctaacgacaccgcggtttcacagaacatagcggctgccctttcccaatctctcatacaaatctcaatctttcgagccctccaggtatgtccatagacctttgtcactcaagaggtcacctcccaactgatgtcgttcttctctcttctcttttccgtacactcgggattttgatggaaactcatagggtgtaggcgcagcagcatccgttcccgccgctgccggaatcatcacggagaccttcccacctggtactcgtgctcggtcgctcgccttcgcttgtttctcggctggagctcctatcggttctggctttggttcaatctttggaggtacgctcgcggctcttacttctgtttcttccttaaaatttattagactcgcgaacattgattgagcaagttggttttcacgttttaatctgaattgccaaccctaggtgtctttacacaatattcgcctgcgtcctggagaggtgtgttttggttcacggccggtatctccgttatcccttgtgagtacttgctaccttgatagataacagttcgacttattcgttgaaaaatagatggaattatcagctgattgtttcaacgattcgtcttgaacagtcgccctaggtagtatcttcattccaaggatcaggttagacccaacccgagacaagcgagtggactggcttgggggtctgctttctacatctgggttaacccttcttgtctttgccttgagctctggaccctctgcttctaatggctggaagactccctgtaagatttattataaatttcttggtctgcgtcgaaatcattttcatctgtcatcaggcttcttacatttgaaaatccttcactttgactttcgcattcgattcgattcctgttttctctagatgttcttgccactctggttctctccatcttattaattggagctttcatagcttgggaagatcttttggtgcgatcttcgagattcagtctgaaaccgttgatgccattggagatttggactcggggtcggttggccgtcaatttggccgttgtatttgtcggatggtgtgctttccagccgatgctttaccacgctacacttgtgaggctcctcttcactcgtctgtctcatgtctttgcaaagtggatgctgaccgacggagcatcatactgcttcgattcactatctcggcctcttttgcctttagttcttccaagattaccaaggtctatctccaatcctgacaatgattcgattccttcctacagcagtgtccggcattatggtgtgcttggtgttcacactggtcgtaccttacgtttacggctggaccttgctcaccatcgggtctctaggagcatcggtaagtctggcttgcgcttccatcgcatgatgtagctttcctcaaagtccaactctactaactccctgttctattctctttttcagttcgccgccatgtgcatggcgctttgccggcctgaggatccgtactggcaatgggctttccctgccatgatcattagcgtttttggcgctgatttcatctttgctacgagctcaatttagtaagtcgtctttttctcagaaacctttcatagagttcattgctgtagctctccttcataatctcgtcttgagcatcatctgagatatcatctgacgatacaagattatttccaccttgatttatagcgtctcaagcattgctaaacctagtgaacaatcactcgctgcgggaatgcttcaagtcatgatgcaggttcgtcatacacctcttctgaatcctttctatcttttgtatcgagaaagagaatagtcattgacatcaatgtttacctctctcgaaccgtgttttcatctctagcttggggtggcaattggactggctgtgactggagtggtgaacgatgcagtggcttccaagtcatccatatcactaggtgtcatacccgatagtggcaacagtaacatccctaaggagtctcttctcgaaggtcttcaagctgcccagttagtatgattttctttcttgttccttgaaccgcgtgttcagttgcgttctatcttatatctgagcctgaatgtaaactgactactcaaccttctgattccttgtgctgttactaggtggactgctttcgcctttggcatgatcggtgtgatactcacagtcaccctacttcgtcctattcgagtcataggcgttcgacgaaccagtaaatcgagatcggcttcagaaaagccggatgctgtagaacataaggagacaagcgagcgcgatggagagaagcctctacattcagccgcagaatcgacagaaactgttgtcatctcgagggatgagatacctgtgttgggtatggttctgaacgaaaaggagggacaagaggtcaaggaatcggtgtattatcaaaaatagagacaaaatagactataataacataaaaccagctacggaagctgtctccactcttttcttttcaatccctctcataccataattattacacacttcctgggccatagtattgatgataaatgaatttaagaagttctggtttagatcgttgaagtggactgtagtgagtgatcacacgatgggtagtcacccttccaccgctgatttccatatacttacttgcttactcggccactcggttattcttccctctttcgacatccaccagatcaagaaattacgatgtcgggacccaacaccttccgacctgttctaaacccgttcttgacaaaacagatcgggaagaacaagtttcctctgataatgacggcgcgtgaagctttgtctttgtccgttcacggccatcctccttacctgctttgaaggttctcaatacgtctcatccgtttcactaacgcgatcctgtgctttcttcgtgatcatcaacagaggtcgttcgagaaaccagcttgatacaatagatacttcttcatcaagctctacaataatgcgtacgtcttcagaccgtgtcgagtctgatttgtccgctggatttcatgaggatggacaacctggagagtgagttgagatagaaaggaattcagattctgactgttactcttgcgtctgggactcgaacggaactttggacctgtataacaaacagctataaaagtcgataaaccaccttcaccgcctccgactgccgaaggaatgttcaagctggacgcagtcaccggaactctccccattaaaggcgatcaatcttggggatacacgctggacaaggaaatgaaagaggttcgtacttcctgttatcttttcaatctgttagcccggtcatgagagcagtagcttgaactgttttctctgtacatctgtcttgcagttttatatgttgaaagcggcagtagcaaaggagcggtataatgcaaagttggaagtatggcggaacggattgtccgccgtggatcggaagaacttgaagaaggtagaccccgaagtgaacaagttgatcattgcaagaccctcaaaatcagcatcgtgtgagttattgtcacacattttcactggcgtctcctagaaaagaagatcaagaaacaaatttccatcgacatcgctctatgtaaatctttcgatgatgtacgcatgtactaatcccatctttgactctctggcgccgccgttcgaacattggcagtgggtataccgtcgctcgatgtttcttcggatatctacccagattccaactcggattatttggtcgataacgtttcgccaaagtttgaagaaattgaggctgaagaacaaagcgaaatcaagttgtcgagccaggcgccatctaccacagaactaaaaaagcaagtgattgcttccatattggaaaccgaagaacttgcgagacaatctccagacgccaatttggcggatactgaaccaagacctgcatcatacctgacatatcgacatctgctagacgggaaagtcgggaaacgatgaagatgccatctatgttgctcagatgaattgttcctctgaagcaacgctttctcgtatctagacatctagaagccctctcttctggccaccgtaaccttcctgcttaacatttagttgattatatcctgctgttccctcacacttgcacatacgcatccctcttctcttcattctttgttctggccatattcttcacctgcacttctgctctctagctataccttatatatgtgtacaaacggccatttctatcatgatatgacaacatcacatttacaatctcccacattctcaagtacatccaaactctaatccacagtaggctgggattttctacgcgcaaagacgtgatagtggggaagcaactgcacgcgtgtattcgatgagtaagagcaacgacggtcaggttctgaaagtgggcaaagttcacatgacgacatcaacgaaccttgacgctctgaagccttggcgggttgaggaactgatatagaaggggagaacatatatccaaatgcaagagagaaatatcgttagtaccttgtgaaatacgttttgtttgaaaggcttatccttaaagatattcgagattcataaccacccacccagatagtttctgtttcgggccatataaaagaagcaagtcgaatccatatcagccaggatagaacaacgacagcaaagaaggacgaagatgtcgagaaggagcacgcaccgcaatcatcaggattccatctatcgttaacaaacattcccatttcccaacggacatcaccttccttccctctgatccctcccttctcatcgccctccactccggtaaaccctgtgacgccatcctgttcaatctcgggtgtcatttgagatttggaaacgaggggtaagggagtccagatcaagaaatgggtgaccgatcgaggtgtggagtaaggccagtctgtatatatcaatcattataacataatcaacaaataatttgaggaagacatagtatgaaaacggcagaatataccattcgcaatgatacaaaatcgagattctggagtagaccgatcgaaggactcgtccggtttgggtgaagacttgtccacgaaaaagactcgcttattaagaaggtaagattctgtggtacggatgaatttcgacaagggaacatacaaactccccggcgatacaggacgtggtcagtcaaagacgtggatcgattcatttatgtgatacgtctaggaggagcgtgagtaagcttttgatatcccccttttcaaacgcctctctccttctcctctcttcactcctcggatagaaagcggtttcgattacgaaaccaaaacaaaagtggtgcaaggagaagaagaaaccagtcgaaagaatagagagtaacaaacccgttgatcctccaaaatcagccttcatcttcaatgaccactcgtcatagatcttctgtagttgcttagggcgtttcaagagcgccaagtccctgtgtcatttgatgtgcatccaaccagccaccatgtacgagagacaatagtccggagtgttttagatctcgatcatctcactcaaagaggaagaagaaagatctccccacccgatcttgataatttttttgagttcctcccaggtgaacatcaccgggtaagattcaatatcctccttggtcggtaatccttcgatgtcagaaggagcaggatgaagctttgggccaaacttgatcgtggacgaataaggtagcgatttcgagatcgtcattgtttctgttgatgatgggtgggaaacagcgcatgatgaatatagaacttgtccacattgaagagtttaaggttagtaaccggtggaagccagggtgctcgcgaagtaagttcattcaagatacagttgagtttgatggaagaattggtaatgaagaagaatgaagagatagatagcaaagacacagagccatagacaatgataatctagcagaaacaagggataaagggaagagctgatggaacaagaatcagatgaaccacactctgattgaaaaaatcctacagggacaaaaggaagagaataacgctgatgctttttaatctacccctcactcatttaagcataaagatcatcatctccctcctcggcctggaaagcagcattgccacctgcagtagctgcgtcagcccctccgctgggcgctcctccctcaacacctccctcggggaacttgaaagacgagccaaacgatctcgactgctgaagcgtctgggcgaacatctcgtaccgtcggatatcggcatcggaaacggatcgtcgagcgtacatcatggcctcctcaaagtgagctcgggtgatctcgggaacggggtcctcctcatcctcagcttcaggggcggcgctatcctccataacatcgtccgcaccttcggcctccttggcggccttctccctctcccgtcggatgtcgaactcgatagactctcggatggcaagcttggaggctctctgacagatctcagtcagatcggcaccggagaaaccgtgagtggccttagccaagaaagttaaatcgacgttatccgcaatgggagacttcttgagagtagccttgagaatagaaattcgagaaggctcatcaggaagaggaatgtagatgagctgatcaagacgtcccggtcggagaagagcaggatcgagctgatcaggtctgttggtagctccgatgatgaacacgttctttttgcttccaactccatccatctcagtctgtgatgaggtgccagtgacgaaattagcatgagcgatacaagggacattgacgacacaaaggatagacgtactagaatctggttgagaactcggtcgccggcacctccagcatctcctccagagcttcctcctcgggacttggcgatggaatccaactcatcgaagaacatgacacaaggggcagcagcacgagctttgtcgaagacatctcggacgtttgcctcagactctccgaaccacatagtaagaagttctggacccttaatagagataaagttagcctggcactcgttggcgatagccttggcaagcaaggtctttccggttcccggcggaccgtagaaaagaacacccttggaaggagacattccgtatttgaggaacttttcggggtgctcgacagggtactgaacagtctcctgcaactcctgtttgaccttctccaaccctccgatatcatcccacttgacattgggaacctcgaccacagtctctcgaagagcagaggggttggaaacaccaagagcaaatcggaagttttccatagtaacaccaagggagtcaaggacttcagcgtcgatagtatccctagaacaaacatataaaatctggtgagagtctgacatcttgtaattataagcaccatcatggagactcactcatccaaatcaatgagatccatcttctctcgaatctgctgcatagcagcttcagagcaaagagaggccatatccgctccaacatagccgtgagtatcggcggcaatctaggataaatgaagactatcagcgtcgagataggaatcaacgaaacttggatgagcgagccttgactcacttgttcaagatcaacatcatcgccaagcttcatattcttagtgtgaattcgaaggatctcaagtcgtccagtgggatcagggattccaatatcaacctctcgatcgaatcgaccgaatcgtcggagagcaggatctatagagttgggtcggttggtagcagccatgacgacaacgttggatcgggccttgagtccgtccataagggtgagcagctgagacacaactcgtcgctcgacttctccgttggtctgatgaagatgacgtaggtgaacaattgtaaggatgtcagttgcaatctatgtttatgccaacttgatcagaatgtgatcgcaccttgtctcgcttaggtgcaatagaatcgatctcatcaatgaagatgatagccgggctgttcttctcggcctcctcgaaagccttcctcaaattactttcagactctccagccatcttcgacatgatttctggaccgttgatcaaaaagaagaaagctccagtctcgttggcaacagctcgcgccatgagcgttttacccgttcctggaggtccaaacataaggatacctcgtgggggcttgataccgattgacttgaaaagctgagggtgtcgaaggggaagctcgacaagctctcgaatttgagccatctaggaacaagatgtaaggagtaagattaataatcgagacaatagcatgattgacatagatcaaagattaccaacctgctttcggcaacctccaatatcgtcataaccaacatcggccaagttgttctcctcgtcctcacgctttacaggctctccctctaaaacccgtgcaagttgagcgtaaagaattagtcagtttgtccagcacgacatgaaatcgactctctatacaggcataagacacataccagtgtgaatgacggtatcctgagcgacgatacaaaactcagagggatcggtctcgatgaccttgaactcaacagttcgcatacctcctcgaacgaggaaagtgtctccctttcgaacaggtcggtaggctagtagggtacacagatatcagatatggttgtagatactacagcgtgccagaaatatgacttaccctcaaggaagtaaggcttgagataaacctcgaacaagtttccagtgagacctgaggaggaagaagcagtatatggttttaactgatagacccgagatgatctcaaaacacgacaaagaatacataccctcaaccgagtcatcgaacggaaggatgtgaacacgctttccgtacttgatgtcaaggcacgcgtgaacgttgcagagatctccaagcttaactcggaggttgtttcgggcgactgtaagaaagaattcgaaggtaagaatgaggcctacttagaaaacaacacacgtcattgattcaggtcttacccttgttcatctggatctttccctcatcaacatcttcgctcgagagacaaataagaacggtatccttgcgcttctttccccgaacgatgacagtgtctcctcggaagaacccaagggtttccatagtggcggggtttagtgtgcagacagagctagagacaaccatggaatcagctagtttcttttacttatatttacccaaataggcgtctaactcacttatcatcgcctaaaaagaagggagaacagaaagccaacctatcaatcagtacatgcaagaagagaaagatggaaaagaaagcagttgagatcgaaaccccgagaaaaaaatgcacctgtcgattcttggacaatcaatcggttagggctaacacgccaaacaacaagcaaaaccacacgtcaagacgttcagcaatttttactcgttggaaacaaatttgttgagaagtttgagccgacctctttttgggtcgcaagatagaagtggcgaggtcatctgcgttctgggcggcggcagcgtcagccatgatatagatagagatggggggttgggtaggtttctgtttttggtatctaattgggttctttgtttcgcgtacgaagaaggatgtctaactctcaaagctgagcagccaaaatacgacaaagacaaggcagaggaagaagtgatgggtggtggtgaggaggaggagaggaaggaaaggaagaagtgttctgttctttgatgagcagagatgagatcgacgccttccacgtcgagactgggaggattacataatcgttgtgatcacgtgtttatggctgtgttcgatcgcaacctgaagtagcctcgatcgtcatcaaccaaatgaagccttctgagaaaagaactcgagagttcatctatcgggatataaaatcggccaggcagttgatgagatttgaatgttaggtcgaatggctgacgatatatctcattcatttgttcttttgggactttcgacctctagaaactctgttattcagtcttgcgctcgcggactgaattttcatcttaaaaagcattttcttgcacgtcccctttgaacgtgcgctgctctacccttcactgtcctcttagtttctcttatttgtaagaataggtctcaggtaggtttgtgttgttcttttcaggttaacagttttgtagacctgagcagcttatgtaccggcagacgtccttctagtcttcttctagttgttcttcctcccttctaggtttctcacgacatctgtcaaaatcatatcatcgtttcctctggcacaccatgagcggcgcgtatgactatatgttcgttaattatcatggtttgctggccaaatttttatgatctgtccatcgggagcaatctagacgacattggggaattacataatcagtcattccgtcattatcagactttatctagtccgattgaccgtccgctctactccctttatttgtatctgttctgtctgctcacatctacaccagagaaaaacataaacacaacctcctacgatttgaacagctttttcgcttaactgcgaagagtggagtggatggagaggtcggagaagaacagaaggcagcagagctgctagagttcccttgacggtcgtttgtcgttgtcttatcttatctatgaataggctcttgtattgacccatcccttgtccataccatgcttcttctcatcgtcttggccaggaaccctctatcgagagtgtcttttttgctgataaaactaagctcaatagcacaaaatctcgggtgtatacagtcttgttcaacaaaatgataacgacaaaagagatcaaacaaagcattgatcttctctctgccgagtcgagttttaatctcgctatccatgtgatattcgtttgatggttgaacagcgctcgacccttgttctctatttatcttttcgatcctatccatcctgtcaacccctgttccacattgctgcaccatgtttgtgctcgagaggcttcttatataacgtggtcttggaacatcatgatcgcctgcgtcgcagctctcctttggtgtatcttcattccttgacaaaaacacttgtccgtctttcgggctggaagctgaaaaccgacgcaactcaagactgtagccgctctacatcaacaaatacttgtgttctgtggggtaaaaattggcgcattgtcgtcttgtaagaccggaatattcctctccttcgtacgttgaggaggcttcgaaagagcggtcgagcctcccgtttgctcggcagcgcttccattctaatccttcctcaagatttccacatagcggtgtcaaagataagcacagagctggcttccggattgatcatcctggctgatgctgtcggactcgaaagccgatgattgtagatttctaccgagtttcatgcggacttttcgcttggacaagtgagaaatagacattgcaccatactttgtacggaaacactatccagcacaatataagtacaggaagtcacgtaagcaggttatagggtgataacgcaacttcagagtcggtccaatgtacagaagaaacagcgatggagctagagtacacgacatccacaagtacaacaagaaagctagaacggaatgggaatgtgttcctacggttgaaatggactggttgataaggaaaatgacaactgcgacatgttcaaggggagagaaaacatatccccatcaggtgaattgatagagaactggagatcagaaggacttgcgtgagtttgtagtgtttatctcgagagtgtatacagataaacagagactagatgaaaataggcagcaaacgaaccttttctgacaagcccactgagatcacgttcaccccatcgagcccggtcacacaacatagccatcgcgagtgcagctagtagcccatcttcaaacgggatgtacctcggcacgcctggtttcgatcgaagggagatatacatggaggatagacctctgggcagaacgtacagcgccaattcaggtcgacggccctggacgaaggaattgaacagagaaaacaaaatgcagcggagacttgttcagaacaggtaatcacaacggaaacgatatgaatctgctcacctttttctcaaagagaagagagaagtgtgtcaagaagccggccagccagaagtaccgtttggagttgataaatcggcgcgaccagcctttcgtatatggatatacgaccggctgcaaacaaattacacctggttgacgaacaacaggtttgaattgatcatcatgtcgtgattggaaggtgagtcaattgacgagctatcatgaggccatgtctgctctagctgtgacagagactgaccatggtatataacgacaaacatagagagaaatgttccactacgcatggttccctggaggtaaagattgaaggagagcccttcagatcagttggttgggcggtgaaacaacagagagacgtagttagaaatataccttgactcctctccaaagcgttaagcccacctccctccagttgataccaggctttcttcgctccttaatggcgtacctctccttctccttctctccgttccatccgtctttctcgggcagaatttccaatgtaggagttgcgctgacttggaacaactgggctcgcttaaggatcagcggaggaatcagatgcaaggcagagtatatcgggagcatatgttggaacaccatgaagaatcggttcacaagcataggagtacaatgatcgttcatcggatggaggattgctctgtggtttaaaggatttaacactagtgctgcgtcaaggatctgagaataacggaagaagggtgagattaaaatggtcggacgaacgcaggcatgcaacttcccatttctccttgaacaaccccgttcgtagccttctcaagcagttcctcgatcgtctttcttgccaaaggtgtcaaccctttgcgtctggctaacaatttgtgtagttgatccgctgggatagtccctgtattaacgagagagccttgaataatccgagcctcgacaggaccttggaatgcgccgttgatgaaggatacgtatgaacggggaagccgttcaggtgaaacctaaggtttgtcaaagtggtagaatagatggcacacattaaaagattgatacttcaaaataacaaaagtagtgacgcacgatccagttttgcataatctgtcccgcacacaatctatcggacaaagttgaaatatcaatatggtaattcagactcacagaattggcatgtttgtcagggatatgacttacccgaaaagaatcaattcacctcctggaacctttattccaaaacgtctgctgacgccgttccaaactccttctagacctcgaaccagtatttgccttcgtgaggtaatgccgagatacgagagcgttctctgtcagttgattctttcaagaagactatctcgaagggtttggcaggaaatatgtacatactcaatcacacttctccgctcccgctctttcctttccaaccagtagattgcaaaaccagccccgactgctccagcaaatgcggcatgccatcttcgctctccagcccaatcatcataagctatctccggtgggccaaaaccaggctcgtcgctcaccaaagtgtctagcccatcctctaacatctcgaggtaagactccgatcgactagtggatcggcgcagcgaacgaagagagtgggcgaaacgtttcttcaagtaggatgctgggggagatagtcggagggtgtgaagaatgagtgtatgaagaagagtgaaggttgagaaaagtagagaaagtcggagagcaggtttgtaaaacaaggaacgaattaagagggaaggttgaaattttctgcagagcgttgatggaacggccggccaaccaaccgaccaaccaaccaacagacagtctagtttagtgtctgaaggatctccagcgaaacaaggattggagctaggctttcaaacagaccttgttcgtaagcatctgaatagatacagaatcaagtttactccagctctaagcccataggcggacaggaagctacctgatcaccctcgtttccccaagggccaaaggacgaggatcagagatgaccaagacaaggcttttgaacgagacagagtggttgcgctcacggatagacagtctgacgctcaacaccatcactctttcccaatctcctggtctttttgggccttctccagctggcctccagacaaccccagtgacaccttgaagcaactcctttgcctcacttcgcctttgttcgatccgaagcattcggtcgcgcgctctgatttcagccaagcgagcatctgcttcctgctctgcgttcaagaccaaagatgatgagagagcagagtattctaggacaggagatgatagagttgagggatcgttcgagggaggggaggatgctagagagaagactgattgtttagcagtggagctcgaagtagaagctagaggagtagaagtctttgtgaacgaatatgccgatggcgacggaagagctgccagcgagagaaaagtgtcaagagatgccaaagataatgttcgtcgtatatgagcagcagctctgaaaggagaaaactccagatcaagtcaacttctagatgaaattttacccaaccgacggccaatgatctacaactcactcggataggttgggcgttcccgggtctgatttacctccttgagcttcgtaatcccattttgcttgttcattctcctcgtatctatagcgcgttgcatcatcacaagaggcaaatgtttaggcgagtcattcgatcatgagagaacccttcaaaaacggacgactgacgaaataggtttgagtggagtaagaccgagggtgctgaacctgactctagagggtgacctccgagggggaggaatttcagagttttctggaggtgccataggaatctgaatggaccattcaccagaggaatcttactacccagacgtgtagaaaagacagatgccaaagtaggcaagaaagattgaatagatcgttgttggtagaaagttgtttgttatcatcggatcagtccgggtgagagtataaccgagactgtattttgtggggaagtcttggttggggtaaatcaccatggtaacgtccagaaacaccgtcgctctgtagcctatgtgtatatgcttatatgcatcatcatcatcatcatcagccatacaaatacaaaaacacaactagacgatattcattctagaaaggatgctgttccatttgatgttgaccaaaatatgagggagagaatataatataccaaagagcggaggacaaaaaaaggagtgaaatcctgaatcgatcattctagtgtcccatctctatgcgatcgtttgtctgattaagctctgccgaacgtcctctgcataaactcctttctgaatgcttccttaccggtggtctcgacaacgacctcgatgccgctctgagaaacatcagacttaatctcatcagacgactttggcttgatccctccgtgtgttctgatcgctagatcggcctcctccgtccctctgtagcaagtaaaagtgagaaagataacaacatacaaaacagagcattagatgaacgacccgctttgtcatgtaatcaagagtaggtcaaaggaaatcccaataacagactgaccgtcgatcgatcacacacatccctctggtccactctccttttcgctcaacctcaaactttcttcttcgaacgctaaatccgctgtctcctctggcaagcgctaccgcaacccaaacgaccattgggtcatgcatctccatctcgtccggcaagcctaggctactatagatctccttgactcgaggaaggaatgccgaggtatacacgtccaccggagattcaggcgaaggtaggagtaattccgggaaagggaccgcgtgaggagttgtgacgtcgagaggaagaattgtgaggtggaaaggatgagaagaccgggaaggagaagaggcgtcaaaaatgtatgctccggcatacggatcagcgtaaagattgaattcggccgaaggagaggtgtctttggtggagatgaagaagctaatgttagttgtctggatagaaaaagatggcagagaaagtcatttcttcatgactcacttccaggaacgtccaaagcggctcccatccatacgacttgcttgaccttcgtaaagatctccgggttggccttgtgtgccaatgccaggttggtcactgttcatacagcaagagcatgtcaatctctgatcgaagactttggacataattatacgtagatacgtagactcaatagattaggagaacaagacagagaagtcatagcttacaaggcccaagagctacaatagtgaccgtgttagcgacttccttctccaagacctcgaggataaggtccgaggaagccttagatgatagctcgagagaagcggggaagtatgacggaggaggtataagctctgggcgaatctcggagatgttggagagtccatctggtccatgctgcgagataaagtgtgcgtataaattataaagaacacagcgaccaagaggaacgataaatgacctgaaagtcagctccagtgatcactttccatcttctgacatagatctccgtgcgacttacaaagtaggaggcggtggcaaactctccgtcaataggaagtcgtgctccttccttcgatacctggatcttttgacgctgagctcgaacgagtccaggccatctggtttccctcaaagtcggctcgacggtctctagttgccgctccatcacatggaacgtcttgatcaaatttttgtatacatgttcgatcgttgtgtttccgaacacgggtgttaaagcgagaatgtcgagttcagaagaggcaagtgcgtagatgagagcaagtgcgtcatccactccgatatcgctagataatcacgtataaaaggagagataggtaagctatggctctgtatgtgtgtgtctagacatgagatcttgacggggaaaaagagagagaaacatctcttacagatcaatgatagtctttgacatggtaagggaagaaaaacgatatgaaaatagcagatagcagatggtagatgggtgatcagaagcaatgaaaggagatgaaagagagtgtgagagacgagaaggtgagaatagataacggattccttctttacgccaaagttgttacactttaatcggtcacacccccgcacgtccggttgacaaatctccgccgaacttctcgctctgttttctcatccctccgtgatccacggaggacaacatctaagggctgatcatttggaaatcatgaagacaagacaagacaacatgtgatagagctagtatgatccatactatgaccaacaagggagagaataaaatcgatcggctctgttagatgagctgtttggaagttttacactattctatgtgtcttttcttgatcgcctacaaagtgaacacaacacggatctagttaggtcgagcactgattgtaaacaagacctcctttccttttccttttttctttcctccggacatcggcggaggcgtcacgctcacgtccggcgtgttgcttccagagcctgtcggcgacgatccccaggacgacactggtgcagatttctctccggtgattcgcttgattgtttctgcccgggcacttgggttcgaaaacagagccttcttccgtgcggccagctcggcagcagccgagttggtctgcaacgacgggaacgcagcgtgtgagaccggcttgggggctttggccggtgttcgggagcccgtgccagacgtcgaagacgcatagtttacagagacgggcgcaggtcgggatgaagatgctgacgaggccacgggaggtggtaacgcagggaatctatctgaagacgtcgatgatttttggctactggcccatgcggttgaaccaggcacagtctttgcattcgttggcgtcggccgtgctcgagaagcggacaggttgctagccaggcttggcgggttacccgctgagggccgagagttagaggacaaagcctgtggggcagggaagtcggacgcataattaattgctccaggcttgatcacctgtcgtttcggagcagccggaggtcgtagagtggcttctgcgctctcgactcgatcccagacctgtcgagacgaatgacttgcagtgttctgcttgactttgagagccttagcgttgacgttgccgttaacggcatgggtacggtagcttgaaccggagccacccataggctgatcgattgaggggaaatctcgggagtactacgggtttgaacgcaaagaatgttagtgtgagctgcaaagctttctggaagcaagaactgcatgacaccctagagactgacctcgttaccccatagttgaatctctttgttcagggtcttttgccgatcctcgtcggttgagaggagtaaggacgcaaccccgctagcaatatccattgtcagactgacatccctatcaagaatgttgaagattgtgtctagtacgtctcggggtccagcctggccggttttgtaggcctgtacagatgaagtgaacgctgcgtttttagcgtccgatcgacccaccaagttgtacaccctggtcatgaaagtagagtgtttcctgtgtatattgatacattattattatggttgtttgcaaatatttcacaggcagtagaaaggtaatatattgtcagttgagcaaccaaatgggacgtcccactgtctcgtccgagcacgctacttgtgaatttacgctgatagcggaaaagagatatatatgatagcccgtacctttcagcttcgctcatcgcacctcctccattggaagaggacccagcaccggcctcgcccccagtcagatcggcgccaaacccagcccttctagacgacttgttgtttggcacaccggccgttccatcgaaagttcctggatcgtagagcgcccgtccactggcatccggtccatttccacgaccgcctctggatccgtttcgaccgccacctcgacctcctcggccgttggagccgttggaaccagagtgggacgaccgagggtcctcgaaggacattgagacttggatgcgacgagccaaggcaagatcccgagaagtcatttgagaggcatgctgatgacagtcggcagggagcgcgtcaacctttgttcttcgtcttggatgaacaacagcaagaatggttgacagctagactaacctctgagacctgatgaactttgagatccatctctgaagcgaacacaacaaatttcttctcctgacactgaggatcataacagggatagtgttgagtgctgtggtcgaagtgagattccagaaagaagaacgattgcatcaggagatcgcatccagtgaagaaaaaaaaagctgatcgaacaagtgatgcatacacaaagtgctgttcgagtttatcatatgtttggaaactgagagaattgagataagaacatcagggccgaaagcactcggcgtgagtagcttgaacggacagaatttgaccgaatgatgggaaaaagagagagagggctgactattgatccctgataccagcctgtttgcacaagaagcagtcctcatggttttccttcaaatgtttcaacagatcatctcccgcaaagaagcactcgtgacaaaactcgcacatcggatgaacacccatttctccagtgatttccattccctggggcagctggggaggtttcatccgacggggaactctagaaggcagatgatgggccaacaaagctggcgggtagatctcttgctcatgagcaaacaccttcttgtgcttgacacatacgtcgctacacagttgaggcacagatttccaaatcagcttttgtgtttacaactctgagaggcttatgcagcgtttcaaaaggagaaaacaacgatgagcggaactaaccataagaggtatccgttgtgcgtcttgtcgacgtgtcgacgaagatccatccatcctttcgcgatataatcgcatgactctgacggacagttgaatctcaggagaagcaaggactcttccatctggtgaataccacggcagacgataagagatcgtcagttaccgtgtctcggtccgatgcacatctaggtactttgtggaagggaggagggggagaatgagaagaaacactgactacttcgtcgtctgagaaatagatcctcagcttgtcatctctgaattcggttcgagacatcttctcgaacaacgtatcgggagaccgtgtgaaaaatacatctgggttatctgcctatatcatgagcatacatataacacgagtgtcagcttgaccagctggaaactaaaaagatcactaatcaagtccctctgcctcgaatttgtatgggaaagagcagcatacgtcgcgcagatcgccacgaacgaagggaaagctttgggaaggagatacatagcaagtaggccggcgtaccttgcagtaggtgcattcagtctttttgtacagtgccctcagtcggagagagcaaacatgacacgttctctacaaacatgatacaggttcgtccaagtgttccgtcaagtgtttccgttgacaaccacgattgagttgaataacgaaaccccccgaaatagataagttgctattgttcagtacgaagctttacagaatggctggttgaggttacagcataaatagacgatcaaacgaaaagacaaacatggttgcaaactccgaccgcatagtatttgaaaggttcggcacagataaagcagaggtcttcgtctctctcgacgctcccattcgaggattcgacctgttgttgagcgggaagactcgactcaacggaggaaaccgatgatgaggtgtatgaaggagagggagaaggaaggtctggccgacggagcgaggcttgcgagggagcagccgtgttggtgttctcgtccgtcaaagtgcggtttgagcttccggaggatgtgagctttccggagaaattgtatcgtctagaggaagccatcgtctaagagttttcgcgtgtgggtttttttctccttcttttcagagtatatttcgaggatgatttcttgaagactgtcctacaaaaagacggttatgatatcgagagtttttcaaccagaagaaacgatctaaggacgccgaaagaggtagctgaaagcgagggctgaagatgaagagtgttcggagcgatcgatgaactcgagaaggagaaagatagaagaagaaaaaaagaaaaagaaggtgaggagaaagaaatactaaagaaatttggtggaagtcattagagaaagtttgaagaggcattagggaaatcgcttgagaattctattacccagaattgtattcgtcatcgttcgctcttgctatagaatgagcaggacagactgattggaattcatcgatgggttggatcagatcatgatagcttgttggagctcgctatgacctgctgtggctcttcgtggctgtcgataggatacgtagttgatgagttcagacgcacatacgtacagaaatcaactgttgtcaagcattcatgatcttctcttcaaggtctctgatacaaccagggaagcatagaacgacagagagaagtaccgagaaaaaaaaaggtagagaataacggaaaggaaagaaaaagtcgaacaaaatcccacttctctaaatgccttcaattaactcttggaactcgcccgaggcaaccatttccttgagaatgtccaacccgccgatcagctctcctttgacaatgatctgagggaaagctgtcaagttgagagaaagagatatatttaaccatgagaactgcgtttctatcacagccaagcgcacgcaacaggcagaatgggctagttctagactcactgggccagtcgttcttcttcttcattccttcccggacctcgttgtctgaaaagatatcgaaccatccgaattcgacaccctctcctcttaacaccgcggtagcctgtctagagaacccacactggggagcgtccgggtttcccttcatgaacagcatcaccggcgaccggttcatgagcatcgtcagcttctcgtccaacgactggggagcctgcggggacaccgtcgttgtgctcagcggagcagatggagaagaggatgcatgggtggatagagcagcagtcaaagcgggtgcaaccgaacccgagtgtcgggagagtaaagagtgaccctatggtgaccgaagaatgaacgcgctcatcacagtcagtccagtggagttgagagtttgagaaaagtgaccaaggcaggaggaaacccggcaaggcttactcgtagcagaaggaacgtaggaacggcctcgatatcaaacgactcggagatatcaggctgctcttcggcctcgatattgaggaccaagacctggggataattttctgctaacgatttgacaacctgcgaagaaacataccgaaaagacgggtaagcgtatcaggtgagtccgataaatcatctgatttgtcttgctaatactgcgagaaaggcactagaaacacatgtctcgcgagattcaaaacgacgtacttcattcatctctttgcaaacatcagcccatggagcccaaaagttgagaagtgagacccggttaagatcagccgaaaggagatccttgaagtgatcaggcgaggtgacgtcaatgagactgaagaagggcaatgcaaggtgagttggacgagcacaaaggcagaaacagtcgtcaaaaacccctaggttagcacccaaagaccagacttgatacaattaacagatgagaccctcacttttgagacgaagacatggctaccaagatatgttatcgatacaaagcgatggtttgtggtgaaagcagaatgaaaaagatggcggatttgaatctgattagaaagatgaggtgattttttatttatttttattttatttttatttttttttattttttcattattttatcatatcgacaattttgtaataaaccgactacaagaaaatctggtaataccctcaacccccaacatatactcaactcacacagacttcatttacaaactcacagaatggcaaagaaaccaagtctgaagagcgctctcgcaggtcgaaaggttcacgagcagaagattcaggcgaaagaggccaaggagcaggtaagatatctcatgaactgggctccatccatccatccaaccaaccatccatccgttgaacggtatggctcatactcactccaagtctggggaactttctctttttttttgacactctccgtcacgttgaaccactttagagaatatcagatgcgcaggctgcagctgagaaacgagcaaaactcaaagccaaaaagaccatgccattcgaggcagacgactctatccttcttgttggagaaggtatgcctgctcccgcgtcgtctccctacacccatgcgcagatgcgttaacaatctattcctctgctttcttcttgtacataggcaatttttcgttcactctaggtcttctcaaccagcatgtgtttatcgacaagtcaaatcaaattctcgccacttcgttcgactctgaaaccacgtgctacgagaagtacccggatgcatccgccatcgtcagcgccatccgagcgcatggcgtacctgttctcttctctgtcgacgcaaccgatctagaagccacatcagagatcaaatctcgacctggcggttggactcgagtcgtgttcaactttcctcatcttggaacaggcgaaaaggaccaggcgagaaacgttcagttgaaccaggtcatgcttgcaaagtttcttcgttctgtcgcgccgttcttgagcaaaggaccgagtcgaattcctgttgtcgagcctggacatggaaaaggaaaggtgaaagcaaagaaggtgaaggaaaaggatgaagatgagttggagggtgtcagtgatttcgaggaactaggagaaggagaggaaggcgatgaggcctacgcaatcccggtcgagaaggcaagctggaaagttcagaagggtacagtgctggtcactctgagagatgcagttccgtatactctttggtatgttctttctgtcaccctcgttggatttgcgctccattcccattgtcctcccacttggagaatgattgtcagttaaccagatgtgccctttgctcttgctctcaccctcttatccttcctggaaacatccttccattcaaacagggatctaccccgactgttgactaaaccgaagcctcttcctccgcttcacatgattcctccctcccaacgacccccgcccaacacgacgcttcccgctactcaacctcaataccgaatccttcgctctttcgctttccaccctactctctatcctggttactctcaccgacgaaccatcggcttcaaagagggtctttcggcctcagccaacgaagagattgaggaccgtggaggaggtagaacatgggaggctgaagtagtcgaggagagcttgaacaagaagccaacgggcacagacgaagaagaggcaagagagagaaaagagcgtgtcgagaagagaagagaagagctcagagaggagaaggacaaaaagaagagcagaagaggaaacggttacaaagatcacaggccaaagtggagcgccccaggacaaggtgatgaaggatggcagacctgatttcataacgttgtctccttacatatttgtctcaactcgtgtcggaaaagaagaaaagtcaagaggaaagcaaaaacacacacgtctgtgcacacgtcactatatacactgtgaaacacccaactggaacaaattttgtgataacaaggctatagctacaggcatttaaaatggaaagagacgttctgtagatcattcctctctagcgcattccttctcccaatccaacggagtcaccttctctactgctttttggaatgcctcgaacgtacataactctgggacacccgtcaaatggttctcgggctgagcgcaggccgggagagcaagcggcttgttctggtatctgaatcgaacatctgaaacacagaaagcacgcacattcagaaaacgagatgaaacacaaacatgttcagcgccttagcctttctcgagcggtagccagggaaacttacaatgacgaggaggcgtgggtttagtccagcgagagaataatgtcgtaggctcaggaggggtcgagaacaactcgacagacacatgagcggtgaagtctttcaaacagaacaaagaagtaaattagcctccatacaggcgcagaagcaagcgcaggatggcatgagcaatcgtatagatcggtcactcaccaggccatctagcattttgtatgggatatagaaatcaaataagagagaacagcagtcgtcatcaagctttgctcttgcctaaaagggaaaaagaacaattcgctatgtaggcagccgatataaagcgcacctattgtcaaacactcccaaggtagccaacatactagctagcgttgtatcatggcaagccagcacagccatcttgacgctatccttctttcctgctactttgtcagccatctcgtgttggagatctgatagtaatcgctagatagatagatagatagatacaagaaattaagcctggttataagctgacattctggaaaaagaccgcgtaacttactcctgatgctaatgttcgaacttcgttagaggtcaatactccgccaaaccattctgagactatggcacgctcctgagagatcctcaacatatcggttaatcacaagtttcaccataggtaagagaagatgtgtcttaccaaggtgtctcgaacatcaggatcgttgaactccgcaggtatcttcaacccgtttgcctctgccgctcggattgaatccataattcctgaagcggacgggttgctgtcctacagcattgcaagaaagatgttgatcgccgaacgctcagacatattagttattaaaacatcaaaaaaaagtcctcagaacgcaaaaaatacaatgaaagaaaacctaccactctgatttcttttcctccgacatgcttgccaatcttcttatccaaaggcttcagagtgtcattgtaagcgagcgctgccgctctagagaactgcttgtctagatctcggagtcgtgcgcatgaaaacgtattcggatagagcgattcctcggtagggttccggatatgaacgtccggtcgccaggatcctcgagtgctggacgggtaaagcccagtagtgatctgctgaagggtttcgatcgtcctagacatggaggtgctcctgtttgattatattcgacaaacatcaaccaagtatatagaacccctggttagccatttacatgaataagataaagtcatgagattgattattaaaccataagtctaacctcaagaacaagtcggctgcgttaggagaagaaggcaggaagcccagtctgttcgtttgtcgacagaccaagaaccataagttaatgttgccatttgatctgcacgagggactacaagcaggagaggttcgacgtactcatcgacatataactttctgagcgattgaccaagagctaacgacgtctttctaccaatatctgtcagctctcctaacagactgtatcaccaacagacagatgtgatgaaggacatatacacatgccggacagattggtcaaatctctacgcaaagtagacaaagagggacgaagatatccaaacaaatcggagaagacaatgggagcaaggacataccagtccccatcttttgccacctccttcgtgggtcccctaggcacgtcaacctttcggttgaccctcaagatcccagacgacccggtctcttccaagacagcagcatcgaactctctaccgacgtgacacatgttccaccggatgggaaacaagtttgtcattctgactcggacaggagttcgttctcctgtagaaggttttttttttttggaaatcagacgttgcaagtaacaagcatgatcatggcggtgacgatataaaaaggcaaggaaggaaggaacaagattcaaagtgcaagaccaggataatcagcgttcatattagagcatgcatagccagaaacataataagcaaagaggacgaagaagaacagcaaaaggagcaaaccatgtctggaaaagatgtgaacttgttcaagtttcaagttggaaccaggaaagaatgccgattggactgtagggtgaatagcctcaaaagcggtcggtggtaccgagggagatgatgtgctcgacatgctatacggatgtgtatatgtgtttacgagaagtgattcaagaagttggagttcgtcctccgtaggaacgatggagatggatggacgatgaagggtgaaaggtgaggctgatcggatggaattgttaacatcgacgtagttcccggccaaggacgatcgaggaccaacaagatcattgataatcctcttttgctctcattcgccattcatgacattgctcaatcttactcgaatagatcatccattgaacatatggaatgattaaggaagatatgtgtttatagttctatgtacaattacaatctttgcggcctccttctacttctcttgctgatagaaaccatcagtctttctacaccgttcggacccttgccctcacctctcgcagtcgcttagattgcggacagtcgtgtttcgaaggaaagacctttcttaagcacctgccggtcggacaacggatcccaccctcgggtcggtaaagatctttttgcagctcgtacacacaaggaagaccgtcatcctcgtctgtagaatggtcaacaaaatggttggtttcagacctcttgatcttctctcttcttctagatatctcttatttttcccaaaaactggtttggatcttacctcgtgacgcttggactgatcttgatagaagacagctctatcgaaccaaaacagtggcacgacaacaattgaaactccgttagtcttgccttcatattgatgcgctcagtgtacgactagaatgggcgttacgaactctggatggtgacagtgaggacaaggaacttctgaccgtctcggctatgacaagagagcgatagcgttggttcatgatcaacacgataaaccacagaggttgcctctaccatccggtagaagggtgacaaatagatgagcataccagtgtcggatctgtctcaatgtcttgaatgactcccggttgctctctaaacacgatatagagtacaaaggcaacagtcagtaagaactctctagctgcaactgacttgattgtggatgctgcgacagaaaaggctcgaaacacgacgggcatagcaaacttccctctatatgaatcatcctctcaacccacaccctgtctgtcctccagcacctcctctcttccggtttgcacggaatcctctcctcttatagatagtaaacaagatgatagaacaagacccattgacagactcactttgtgatcgttaatagatcatttctataaacaagcgccgcgtcggcttcttcctcatactggcaattgcgacaggctctcagtaagatccttcggtgcacatcggcctagaagaagtgaagagagggtagaacaggcagatatttctcagtataagatggatagaacattcggacgcgtctagaacgagaaaagaatcaaaagaaaccggacacacgaacttttgggtaaagtagattattgctatccaaatcccaagtcccaacccagcccggtatcagatcaagacccagagttcaagatgttttggttcatcagaaaattaagcttgattagttttcctttcttaagataaaatgaaagcgaccattcaagaaccccctcgggtgatagtcgtccatcctgatcagatgagggtatcacatgaactaaacctcttctcaatcatcctggctttccttcatttgtcggaactgctcgtggtttccaggtagacggaagaagaggcttggcttgaaaaagatgcacaaagaggtaaagaccaaccattctctgcaatacttgtagactgattttggaggtgccatctagaaacacttttgtagggtatagaataggctgtcggcaagagaacgtggaaggggaaagtcggggtatctgacaggactgattcaaacagatgcgtgtccttcttttggttccttctggtcttgcttcgtttcaacttggattgctttgcaaggtcgagcaaagacgaaacagagacaaaggaaggtgatggtttgacttgctttggtcatcaagcctagttcgacaaatggacgagcgaggcgtcgagtgtgtggcggctgtgtcaaatgctgtgcacaacctctggatcaaggcagacgacccagttgatcaacattcatccattcagtatcaaatgaggatcgcatacaggacgggactcggagagcgtaacaaccaaataggtttactcatgtgggcaatgaatagaagaacaagaaaacagtagaacgtcacgcagacccgtcttatttcgaggttaaatctccttcttttcctctccagatccattctcatcctccagccagtgtgtatctgctaactctccggcagcacctttgatgatcctcgctcctgcatccctcaagaaggtcacaacttcctttcctagcctctctccattaccaccctgctttccgccaacgatatcgaacgacgagcccaacgaaccggtcgagtcagatgacgaggctgaagctgaagccgagggcgagagggcctgctcattgacaggatcagtgatgaatgaggtggctagataagcggaggcaggtactttgtcatctccagactcaagactaagtagataactctccaggctcttagaggccttgagtcgggcacggagaacctgtcgaacgagtcgcctggaagggatccgagttgggtttggctcatacggaggaggcagtggggacgtcggtcgaggagatgtgggagatgaaatagtggcatcagttgaggaagaagagctcgcctgagacggcggagtaaggatgatatcccaagaaggcgggcaccaaatcccaagcaagatccggaatgtggccaccagcttccgagcgctattcaatcagatggatacaaacacagtgaaagaagattctgagatgagaacctaacttgagaaagaaaaggtacaaaagaacagggactgactggtcatagttatcgtcaatcaatgtcagatgataattgatgagtccaaagaccaacgcccccgcgacgcccaggccgactattcctccaacccaggtcccactgaacgcaactttgtagagcgcgattgcacaggccgggtagatcattgcgctgactagcagtccaaacaccagcttcatctgcgccttggtctcctcctcatcctcaactagcttcgcgccgtacctgccgaccagatacaccggcacgttgaccaagaatgggagcgcaaagaacggtagtcggatcagagacgacacgagatcctttaggaacagtgccagggtagagaatcgagtaggaagaggagttggccgagaaggatcgagcgtggatgggagaggaatctgtgacagcgagctgtgggatagacgagcagtctgcaggtaaaagtggtaggacaagagggcttctttgaggagagataagttgctcgaaggaggagggttggcgagcagatcgatcaacctgttgaaaacaaagctcaatgtatatcagtttcatgaagcttctgagaacctcctgagacttcgaaagactacagaaactgacgtttgggtaacttctctgaagttttccatccttagatccttctcgttggcccacaacaactgtctggccaagatggctgcgttcaacgtatccctgagtgaaaagaaaaatatgattgtgaacagagtcaatgtttcttccaaaaatatttagtgacttttcggaccacctggacaaaagagacaaaccaatcaggagcgttgactgtgagctcgatcattgcatcctctaccgatttcgttagccgtttgacggcactcttggcttcaacctcctcggtcgagaggaactgttcagaatattcatccacggtgattggtgtgccgaatctgttacatggttcagatcagatttttcgttgacgattgaaggcctgtatggagctcacggccttttttcaagagaagtgaaaagaagtggagaattctgtaagggacgtactcgatcgcgactcgacttcggtattttgtcttgtcactgtacgtaattcctaccgggatgactatcgcaggtcggacagagttcttctccccgtcggaagttgagctggcgcgctggtcctctaggtatttgacatactcgagtgccgtccagccaacgccatccttgacgggcataagtcttgaatgagtgtgcgaagttccctcgggaaacacgccgatgacctcatctctgaccagagctgaaagtttgaacagtaggagggtttagtatctctgatcactttggtcttggagaggagtagatcaggaggagtaagcgatggaacggttggaaccacgaaccttcgaatgttcctttgaaaaggacttggttgttcttggtctttcggtcgactgggatgtttcctgcgttgagtaacaacgctccgagagccgggttcttgaagagtgagtccttgacctacattcacatacattcgtcgatcatgatttgacacccagtgtacgaacaagcacacagtcatgagcgatggttgaggactcttaaactgtagagcagtacaagtgcaggaggactaacccagtagtgaatgtatcgtttcttgaccgacttggtagcttcgataacggcatatgagagacaggccggatcctattatttgccccatgatcagaaggacgaatgagcgaaggggacgagaagaccgtgagcatgatacattataggactaggacatgagattcaaaagagaacgaacaatggctagaagagattatgaggattgttaaggtaagtggaataataagaggatcagccttgagagaataagagacgagattgaagtcctagctgggaagacatcctcacccatgtttagatgagagcaagcgctaagacagttaccaagtatttgcacgagttcatccggcagtccaacaatgtgtcagttctgagcgggcatcaggctcgcatatcctctccaatcaggctgatcggaagaatttgagaacgagagtgtgaagaaagctggagacgactaacaagacgacacctccttgggcaggcacattctccgtgccaagtactttgacttcagaaaagaacgagtcgacggcaaagttggatatgttgaccaggattgtgtgggagattccgaatccggatggttccttggttgatgctggtgttactgtggacatttctctctgtatctaagtctttctgggtttctctatcagatggaggagaggtgtagaacgagatagagaagagagatgagaaatggagtggccggaccggtggtagaatcgagcggtatgttagggttatcttataactgccgaccagttcacgaatctacatgggtatatgctacatgggtatatgcgctctttctatttgagggcagccaaggctatatccttgcttattgaagcattctaaccgacgagttggtagttggtaacaccctgtatgtagcattaggaagagttgaaaagggagagagagggagccaggtgaggttattgttgagagaatgaataagcaaaaagactgataaaaagcagatagatacgaacgccttcgttgatcttgacgacaactttttttccaaccagagcgattaaacaacggttcaccttgatctgcggcaaatcagatttgacaagatctgccactatttgttgtttttcagagggaatgtcaaaaacacactcgcaggggctaatgtataaaaagcagaaggaaacaaaacaaggagacctactcttcaggccagtcggactgttcattaacgatgagatcacgcgctccatcgcttgagtcagagcctgggtagtaccgagtcgttagacaactttctgcgtgaagcgtgaggtaggcagaaagaagataaaaagaatcaaggactagaacataccggttgagaacctctgaactcgagaggtagagtatccatcattgagctaatctttgcctgggtgcacacatatgcatgtcaactataagctctgaggcagtggaagacagaagaatagtaagaaagagagactcacttccctgagcttcctcgctgccgctcctccggtcgaggttcctcctctacctctacctctagctcctctgcctctagctccggcagaggttgtacctctggctccactctgacctcctctcgtatttcctccagctgccgctcgggccttgacgttgtcgagtgcttcctcctcgtttgcgaacgagtactgagagtgctgggtcatgtatgtcatgtctgccggatgagctgggttcttagcgactggtgaaccaaaccgggatggagaagccgggttaggagatgagggagcgggagcagtcgagtgagccatcggtctgttagcatgcatctcgtacgaaagatcagagggagcctgagttaacgagtgggcagagtgagagtaagcatgaagagccggcgttcgaaaatgaggataaagcaaagaataggctgacctgaggaaactcgacgctgaacgcgttcatcctaagaccaaagaggaagccagcaaagccttcgttgaactctgcgagacttctactgagagccaccatggaacaattgttctggtgaagggtatctagctcgtctgttagctctgcaaacgagctagcgaggtgatcgagcccaagggtagccgtctcgagtgagggatgggagagcggaagcgaggtttgatttgatgtggagtatctggacatatggccatgattggagcctgatgatgacagataggactgtctgagcgatccttgggagatccgacgaaggggagtatggtgagtagtaggcatggcttcagtcagatgtgtgttgtatgagatgacggattggatgtaagtggcagttgtgtttgtcgcgacgcgtcggaatgaatgatttttgacgcgtcgagcactagagaaaagcattctaaaagcattggaaaagcattaggaaagacattatgagagcatcagaaaaaagactaggaaaagatcagacaaagactaggaaagacactagagaaactatcaaaaaagattaggagaaagaatttcaatcttttccttctcccatatcatccatccattcatccatcaaccagcaaggatccccaagtccatcgatcagcacccatcgctgtccttcttgcttatacttcctgtctccatatgaggttcgcgccaccttcgagctcatctggcaggtacggccttactcttgctctggcttcgtccatagactatccagcgtcctctgacgaagatgatgtcgacgaaagtgatctctcgtcggacgaactcctagactcctcttcctctgcttctttctcctcgtcttcagtctcttcagacgaacaacatacgagcaagcctcagggctacaagagaaagactaaggatactactactacgacgaatagagcggataccatccctaaatccgccttgggaacccctgcacatgccgacgaacttgaactctataacgctcggtcaaagacagccgcatggaggacatcccatcaacatgcccaggctagatccgacgcgcttaatcttatgctcagcaagccagacagaatgaagaaggcaaggaaagaagcagatgatgacctagatgctatcagaggcttgcttgaaggtctcaagatggaacgtgcggaagaggaaaggagagaacgtgaagagtttgataaccgaaatcagaaactatgggaggttcgtctatccttcatcctcgtttccttttctttgccttttcgttgaggtctatatccaaacacatatctaaataagaaactagtttctcctacatctctcagtctatagagcataccatcagagaaaccgaggagcttcatctgaaagctctgcaggcaaagaatcaagaggcagagcggctcgcttccgcactccgtgcgtccgaggaggctaagcgaagagcagaagttgaacgaaaccaggccgagcaagcccgccaacaggctgaagttgagaggaagaatgcggaggaaacgcaaggaaggaagctgaaagaaaaggaggaaaagaaaaaagcaggcgaaatctggggctcaaaagcaaaagcgaatgagtgggacagctgggtgggcaagatgcaggtcggtcgccatcttcctctatcccatcgcctatttttcatttgtgcctgacctgctttgcctctcactatagaacatcaaacaaaacatcttacccaaggtgaacgcatcaccagaatggcgcaagaagtgcaacgcagtcaaacgtcagatcaccccgaaagttggacagatcaccaactcccaatctcacattctctccatcgttcgttatctctccctttatcttttcgcgccatcagactcaagcttttgcatcctttgctaacattcaacctcttttctcatattgatctagacctctgagatctcactcattctacactctgcccgttcagcctcaccagaaatatacacctggatcctcaaccatttttccaagattctcatcaaacaagcagaaacagaaatcactgctaaaccctctgccgcctttcctctcgctaggcttgttgttgcactcatgctgatgggacacgccgatggactgggagaggtgttagcgagtagacttgttaagaagtcttgctgggtcgttccgttctggccagcaaggaaacaggtcaatcatctctcttcttatctgtttcttttttcttctcgattgttatgtatgctgaacagggtctgtactatattgttaaaatgtatacagggtcaatctgaggcagattacgataaatccaccggccgactttcttctccagaaacaacgcttcaatacacgctccgtcaaaccggtattcttaccctgtatttcaccatcctccacaccctaccttcaccatcacttctccctccacttcctccgtctcatccaccgtatcctccgttcgacccttcaaccattccctcgttcttcattcttccttcagggtggctctgggttgctagcttgttgaaacccgcactttgggcatgggagggtacgccaacgtttttgggtgctttcatggatgtctgcgcttcgaggatggaatctatgtatggaagacagatgagtaaacttttgagaaccgtgaagagagaagttgatcgggaacgagcggcgatagcgtcgggtagtagtggaggtggagtaggagacaaagatggaggctcaaaaaggttggggttagagagactggctcttcggctagatgagtgggaaaggataggggcttggcaagatgtagacggtggattcaagttggatccataagggtttcacttccttgcttcctcctcccttttctacctcccttgtcctccttctttctcttgggattgccgtgtatgatttttgaccgaccagccataaccaatgtactatcatcaacacctacatatacatgcattcatccatctcggcttcatcagagaagagtcatcctgctttcaacctacaattatctgtcgcgaggcaggataaccttcgtcaaccatcatgcctattactgaatatatctcttgaatgagatatacgtggtgcgtatttaataagaaaattagaataggggattaggattatgtatatgtgtaacacattctaaaaattgaaacaaagccttaaaaaggggacagaatagaaaagaaaaaggtctataaggactgaaacaacctgggatataataggatgagagtgaaaagtattcctataggctgaggtcacgttgaggttgtatagaactagattaagaaagaaagaaagaaagagaaagagttgtaaaatatcaagtcgagttgttttggttatttctcctaggccctccaaagttctcggacctgcaagaagagaagagaggaaccccaattgcagagtatgagtaggcattctattcaaattcttagacttagcctatgattctcagagactcggtagaaacgacttacatatttgttgggtatgaatatatgcagactatcatatccatatcagagacacagaaaagcgcacagacgatcagtaaggcaagaagaaagaaggaatagaaaaagatcgaccgacctcgccctatcttctgcggttggcttctttgcttcccatatagaattaatgtagtcgtttccagtccggtcggctatctgaacatcctccagcttccaattatcaagatccacacctaatgatcaaaacatgacgttgttcaaaaggaaacaaatggaggcagaattataccatcgcaagacgtcaattcatcgcgtactaggcagacaagaatagaacatgaataaagttctctcttacttcggatcttgcttatgtgggatcctagcgatctgtgcactcctgaacctgtttttgcagacacgaattaaaacgaaacgatcagccgtgatgctttattgagcatacggtcaagcggagtgagactcacattcaatgcacataaacccgatcatcttgctgtcatagagtgcaatagtggcccaacgaggatctttgcaagagaagaaaagatcagaatttagagaaaggaacttgcagctctggcagagatctgatgatgaaacttactggctctacgacagtctaaacaggtactattttccttcctcttggagatacccaaaatggaaagcgcaacatttgcttctctttcactttccgactcagctccctctccaatccagtcgatcggacgctgacttccctcactgtgtgttcttctttgagaggctgggccttgcctcgtgacagatagccctaggtcaggagaagatgctccatttagcccttggaccgaatggttataatctccgccgccaagaccgcctcctgcactgctgtgacaggagagacgtctaacggagaaatccaaggagtgtctggaggatgaggaggagaggggcggagaggacaatgagccgtccggttgaagctgagaagataccgacggcgtagtcacgtggaagctcggtctactcaagaagtttgctcgcgagaatctggacgagattccatccatagaaactgtgggaagagattgatccatgcttcgcctctggaagggactactaggacgtctgatcgatcctgagggttgactgcccccgaagagaccagacgttccttccgaggggctgtgtccgtggctagacttccggctccttgtcagagaaatctttcgagcaatcgggtttccccagttacggatcccaggaaagggcgaggaactctcagggaagggggctgaggctcgacctgaactagattgagttttggagttcttgaggagaccaagatcgtctaccgatgttgaggacgggctagccgttccgaacccgccacgtacagaggccgtgccatttatagaggcttcgatagcatttcttaatcaacgataaatacataccaagcccatcgtcaggtttagaaaggaacaacatcttcagcgcgtaaacacatcaaagcaattactaacccaagagcagcaacccattggtgcatctcaatctcactggtcgcctgatatcttctcgtcgatttacttgtcacaagctcaaactatatgtttttcgatgtcagatatcaaacacatgtcaggttctcaccctcttcaagatgcttgcaaagaacagagacaaaacttacaacaaacctacggtctgactttctgggttcgcgcgccttatgagagcgaaatcagcagaagggttcaaacgatctgataagtctctagcattcagatgcgtgcatacatcgccagggcacttaccgaagcaaacatcagatccgtcgaacaaggagcgaagattccgtcggtattgattcggtgctacaggagaataccacaaaataagcattagatttctgttagatacagacgttgtcttcaaaacgaatagattgattgatctgcgggaatgtacacacctccagtaagtacgattgactgacttcgcaccagcacactatttgcggtcaaagaatacattggcttgtcagtgtcatcaccaacatatgcgtgtgaactggaagaaaaggaacagtcaacacccactctcccaattgccacccttcacagcatccccactacccttcctatcgcccgcacaccacagccagccttgcttctttcgtccttgtctctccttcagatcgatccaagctggatccgttcttcctgtactcaatccattcggtttgccagttgaagcgtagttgaaggacgagtaggattttggaagaacctgaatcgaatgacgagctgatctgggtttgatctcgttggcgagaacgggggattgtggtggtgatattgccttatgcgctaagggcgcaggtttaggcgagggacctccgaatccttgagcttgctcgggattactagataaggaggacctgttgatgactttgaaacgaggcgggggtggagggataacatccctggactgataactgcttccaaggctagaaccaaacgtcgagcccagaggggcagtcatagaaggtagactactgaacactcctcgaatcttgctacctagtctatctcgtttcctctctccgttcgctaagggtgcgtcaggaattgatcctatatgaagttctccatccgctgatccgtctcgatcatcgtcaagtatagcggaaccagcgccattggaaagttcaagagcaagctgtcgttcggttgacatccgtcgattaggccagttctgaacagcccagtgtcggtcattggcgattgagagtccatcggctacatattgacagctcacaggactaacggggacgttgtcctgattgaacagttgggaagggaacgtcagaagtcgagtaaacaaagtggtaaactgaggtccaaacgtcaagtctaagagttgtgtctgtatttggaattgagttagtctgtgaagattcgccagatgaaaagagaaataaaaacataacaaggatcagtctggtatctttttctttcaagtctactagatgaaatgtattatacaacaacgtactctgattctcgacatcttctctcgtacgcaatatctaacctgggactatcccggctgacaggagtcgcgagatatctggccgtataagtctgaagcgctctggtctcctcctgttcagtagtacagatcaacgttcagcgctgacctcgaggaagaaagaagactagaacagcacgataaaacaagaacaagaggaagagactcacatcaaatccgctagctttcttgcctagcttatccttttctgcctctttaacggcgtccgaccaggcccctaaaggctctatcaccgacttctctagaaagactttctcctctcttcgctgtctcctcctttttccaactacgccctcgtctttccaaacttttgctagagcgccctccggtatctcctccatcacatctcccagtgcttctattcctaccgccaaccgctcttccgcttctgacagtgcagcaagtaagccagcgacgtcggccgccagtgttttgactaacttgacatgaggcttcaggagacttaaacgtttcgtcaggctatgcatatgtgatctgaatcgaggggtgtctggcgtgggctctaccgggagtaaaggagacaatcctacttgagttggaacaggaggaagaggaccagataccactctatccgagtttgtccttttggctgtcgttggcgtctctgttgtcttcgtcattggttttgtaggcgtcttgttcatcaagtcaagtgaagaagaaaaagtcgtaggtgaatgatccatattcggcatgagcgagccaagattcggcgtgctcgacgtcgaacccatgctcgtccgactcgagtcaatggaccctcgagaactcgtagtctccacagaaattgagctcgttcgcaagaaattcaaatctcctccgcggatcggaatttggtgttggtattggttctgattcgagtctaacaaatgtgttccctgtggggtggaagcccgggccgaagagggtggtgacatgactggaaccgttaggctcgaggatctcttcacagaaggacggcgggcaacgatagctgggttgtcgtctttggggctcactgaccgggcatcactggacagagatgctagattcgaattcaaagacaaagaacgaaacagaggagaagaaaagatcagattctgaaggaacaggaactttaattcaaaaaacagcctgaacagatcccaaccaagagaagctatctaacgggtcaaggaagcatcttgaacagaccagtcatgtacatactttttctggacgtagttgaagtagcatctactcttgcgaatcctctctctggaagtgagttgtccagctcggcggtcgaggtgtgtgtgtcgccttgtggatagataccaacattggtggcagtggcagtggtagcagaagagaaaggagccccgacgcctgggtatggaggaagaggaagaggacggggaccgttcatttaccgtgacgcagagctggatccaggaaggataagaaagaaccctgagcgaccagaacaagagaagaagacgaagaagatgaagaagatgcgagtggtcgtctcgaggtgatgagcaacggtctggtcgtgggattcgaaaaggttacaacaacacccaaacaatgagaacttttcactttcctcatttctatctttttagctttctttcgtttcgaatcagagtactcgacttcaagaaggataggcagcatacatagcttggctcttgagcagattgatatccaaagtttgccaagtaggaaaaaaataacatatcatcatctgcaacccaattacaagatagaacaggttttcttgttctttattctctctttgatcgacaagagcggagaaagtgggaagttgttttaactctatcgatatagatataaatggtaattgaacatgacacgaaacaaggtattgtgacaagagagggggggggttgttgcgtgaggttggagagagagaggagaagaaggagatcggaggaacaagctagcaaactcggaaaagaaacctctaaggagaacgaggagacatgacgacctagagtcggagagcgagctcgtacacactatacgacatcaaacacacgcaccaagcgcgagattagcttaggatgtctctgacacttcgaagaaaaagtattagaaacgcacctgtacatcgcagcggcattgggcacaacccgcatcatgtgcgctgtcaatccactgtatagacttctcactccttcttcggcaagaataagcttgaacgtctggaccaaatttcggtattttggaacagtggcacctgcagggattggttgccttagtcgagttcgcagaacctatgggaaacgagagaacaatatgtgtcagggagcgagtgcaatttgagttgattctctttccttgtattgagaaaaattgatgaattgtaagcgtacctcgtgagggtaggtgatcagagcagccaacatcttggctcctccagcagcaccgagcacacctgtccattctccaagtttgccacccttctcagagatacccattctcttaaacctctatagaatgatatattgaaatgaacaagaaatttgcacgatcagccccctaggttccttcctcatttcgtgatgttatcctcagtagttgaacttcgggagaatactcacctcgtagacgacccactggatgataagctcgctaacgcccaacatactggcactcaaacccttgtaaagacctttgacaccctccgtccggacgatgtaggtagtgcagttccaagcgttggtgaacggaggtttcgacagcgaaccgctcgccgaggacgacgcggccgaagccaatcctaaaggagttgtgatggatgaagcagaggtcgaagtggctgctggtatgggagagacagtagagaggatttgggaagaataagcggatgcatgtgccgctctagctgcagaagtagcggcaccgaggtgagacaatgaagcagtaggcttgacagctgatgcggcaacggctgcagcttgttttgcttgatttcttgatgaagctgagagttgcagtcgagtcttgacgacccagatcggattcgttgccatacctgtggcgattccggcgttggcggcggcgatcaagtgaacccacggggcttcttttccatcgttgaacttttcggcaaggatgagttttaagtttccatacgtgaagaactggatcgatctggaggaaagagtgatggtgatgatggagacaaatgtttgtggagaagaaacgagatcagcttgaccggacagcatttcgcgtaagtccaaacccaagagctagcgatcgtaccgagctggcaccgcgcctaccaaagtaggcccgattcctttccatagagcgggtactccttcagatctggcgatatctctatgattggtattatccaagtgaatttacgctcgtcaagcttcagcctatacttcttaaaaacgatgctgatctgaaacaggcagatgtatgaccacgtagacgaacctgagtaactgtccggtctcgacaaagttccaaagcaagctcgtcgtcggtttcggtggcttaagagctgatcctttggtcgtgttcaatacgccttggacgttttcaggcaatggcacggacttgagagagatcggtgaaggtttcagtgtggacgatgacgcggcggcagacgggagcggttgagcagagtaaggtatcgatttgaggtcggacgtgggatggctgttgaagagagacgattgtaatctggtctattggtcggagaaaaagacgagaagaacgcaggggatgtgtgagctctggtggtgagaaggaaagaagaagctatcctggttcggcacgcaccttgacgacatccaaaggcgcggtgatggttgcacccgtcatcccaccaatactatgtgagcgtttagttgcgggcagcggtagcaagaaacgacgttttcagttgtttcaaaaaccccaaaggaaacattttgatgattcagtatttgagcaacctctgatacgtcaactcgaagcacccgttccagaagagacacgcttcgtgggctggattggatgtcaagagagggagaggaccaagaatatatacgcacgctccggcggccatatgcctccaactcttcttagggtcccattggactgtcggagtaggttccgacttaacgtttgccggatggacgatggctgctgaaccagacatgatgtttttttttataagagcactgtgagttgttcggtagggagcgacgaggacggtagtggtggtgttggtggtgaaaagtcgggtgttctctctaaagattcctgtgttgatttctaccgtttgattccttgccttatcactctgaatgctaatcttcttccgggaacaggaaacaaaccagactgcctgatggagaaggatcgagctgctgccgttgctgttgatgctgctggagtcaagttcagatcgaaatatgaagaaaattaaaatatttgtcggctatgctcttggatggttacagaaggtgtgaccatgctcttgactcccacatgccttctctccatccctcttgctgtcctttgagtctctggtgggtgtatgagtatctgttgcgcttaattatattactgggaagtagagatatagatgggtatgagtcttgcgcttgaattggatgttttctaggagaacgtccgtagagttgatcgtgtaaccaccaaaggcaaggaaagaacacagacgacatcaacccaaaggaagacgttcgactaccacgcaaaaacacatacactctcactcgatggatatccctacaccttctctggatcatctctccaaggacgattatgagatcatctatgatccagcaggcaagtctttactcgtgagcacatgcagagaagggatgtatcacacggtcgaccggttctcaagtaccctcctttcgtatccatcacctagaggactcgttcatccttctcgacgcgttagaacaggatgctttggaactacaggctggaccttcaggaaggtgttgtctcgagattgggtgagtaacgttctcttgtctgcttgtcatgaattaattcggcgctgaattggttgcattggttgggatgatgtagatccgggtcgggcattgtgtctagctttatgggaactatcctgggtcctagttctacccgtgggtctgcttccttgttcaactctttgttcactcacctgaatatgtcaagctcagcttgccctcttcctttccataatttttttgatcattctcccaaagtatacatatctacggacatcaatccccacgccgctaaatgtacctttgaaactggcaagcacaacggagtacgccttcttttgcgcttcttcatacctgcctgtttcgtgatgtgtatatgtgtgtgtgtgtttgtgtgcgcgcgctgatagaattactttacactctagatcccaatagatccaatcttagcaacactttacacctcacttctccctaggatgtatagaaagatagacatcctgctgttcaacccaccatacgtcccaacatccttagacgagtaagtattagcatttctctcttccctttacctttctagacggctgcaagtcgaactgtactgaccgatatttgccgttctctgtgaatgatagattggatgacacgcagacgcagcctggcatcggatccacttgggccggaggacttgacgggatgggactcacacagaccttgctgactcgtttagaggtatacctacctctcgttctctctctccctctgtcattcaatcgtcttgtttcgacccgtctgaaacgttgaatggtgtatcaggatctcttgtctcccatcggagtattctacctggtagcgatcaaacagaacaagccactcgagatcattcagaacatcgaaacgaccactgaaggccggataagcggcaaggtatgtgtctgtctttcttcgcttccactttgtgaggaaaagaacttggctccctttggtctctttccaagtctttcggcgcgattcgatattgactctgattgccggggcttgtctatttcttctctcgaacgaattaggtcgcgctcaacagaaaagcgggtggagagaatctttttgtgctcaagttctggaaaacttctaaagatacgatatctccttgatggttttaaccgtgggtacatctggaagagcaagcctttgtcaaatcaattgtacgctcgtcactgagtatattttcagaagagaggaaaatcaaagcacaagctagaattgaatcgacgggggaaaaatcatttcaagataaagatgatgaaggagccgctgaatcagtcttcctaggtggcagcccgatcctctcatccaattctccactctttatcctttcatccaacccagcaccctcgagaccgaagaacgtccgccaccatggcttcttctcgtttcgctgagctcgatcgatagcgtctccaattcggtagtagtatgccggtttgtacgatggaacgagtgtctttcgggagaacgggtactgtttcagaagacacgtcacatatgggcacagaacggtatgttcagtatcaccagtgaaatcgatcacgtacaagagacatggacaagaaaaagcaagacaaaccttcttcctccagtgattactctccagcttgtccaaaccctgagtcaacccttccagaactctcacatcgtcatctttccagccaccggagatttctccactctcgaccgatcttgatcgctcttccacaagctttgtgagaaccgaaccaaattggacattgggacggagcggatccttgggaatccgagaggtttgagacagaattcgagatcgaagtgtctgagcgagttgagcgggaggcatgttgggctgaagctagttttggtcttgaatatgtgtcgctctctgtctgttcttgtggaaacgaataaagatcctgcctcttgtctttgaatggaaggtagtggtggttgatggcaacacagtatcgattaaatgcgactcgccgattggcgaaatcgttgacctcgccggttagggttacactttgcctgttctctgttctctttctacaagcacacaagcgttgcgccttctatcagactctttcatttaatcctctggatcacttccttcgtcgtcgtcgccgccttcctcagcgcctaaaccaccggcagcagagccctttctctttcttcttctcttctttttcttcctcccgctctctccatccggtcctgccccaagctcactatcgccacctcctatgacgttgacggccaccggctcatcagagcctttgtcatcttcgccttcggctctctcctcgtctcctccactcggtcgtttcctcttttcacccgtgttcgcgttcgtcccgttcactttagatttccccttggagcccgctgccgagggaggaggaggcgcggcctttttcttcttcacactcaacgggtttggctgtttcggtccttttcgcttctttggcgggggaggctgggtggctgtgacgctctttgagctggcttcatcggtcgaagaagaggggaggccaatgatatcgaccagagaggttggggggagaggaaggaccgatgtaggcatcgatgctttcagcgcggattcttccatctagtttcaaggtcgtccaaaggagaagagagaggagtgggaacgtgaagaaacaattggattcgtcaatcggtcggttagatcacacaagcataccgtgtggcgcaacagaagaaactgataaaaaaaaagagaatgagaaagacaaacctcgttcttctttcccttggtggtctcactcataggttccatcaccacaacactcctcttatcatgcatgatcggtacggcgggtacgttctttcggatgtagttcctgagttcttccgactgagtggctagcacatatcgatgtttgtttgtctcgcctgtgtgtaagacaaaaggtagcacagaaagatcaggtggctgttaagcgcggatgaccacagtcataggacatattaagaggaggaacgaaccgatgacagacgtcaagcattcatctccagggattggctctcggtggttgcatttccttcgctcgaacgtcttggccaggtctactacgtattggctatcgcgtccgaggtcgtatagctcctgcatacagcattgagtgatcactaaaggagtttacaccaaatcgacagcacaagaacagcaacaggatagtatagaacaacaagaattgagaaccgtgctcaaacacaaacgacacaacctgaacaccgaagagtctacacgtactaggtttacatttaccctgaaggacggtttcgaattgcttctcgacgtcgatacctgactttgcgatgtttttgcaaaactgtgcgtcgactgagtggaagggagatatcatagaattatgagcactcgagatcagccagccccaaaaagaacaaaaagatcacgaaacggaccaagagtttgataaggttgcctgaacccaaacgtcaagcagtactatgaacagaatgaacacggacgagcccaatggtcaagacgctatcagcaggcaaccaccaaacccaacctaacgaaacacgactcaacgagactcaccgactgcatcagtctcttgtaggcctttgctcttttctgtctcattgtgaatgcctagatagaagtgagtcgaagagagagagagagaggtgtacgttaggaaagagtatgggagaacgggaatcttgaaaatcgtctgttagggcgggcggaggtgtaaccaagtgggatcacgtgacttcaacacgtgctcccggggttaacttgaaatatctctcttttctccttctcttctctttcgtctgcgttcatcgttcttcgttctccgttctcacagtcgttccactctgcttcgtggacataggacggtcgagtgaatgtacaaaaaaggactcactgcctcactacttcgtcgattcccagtcaaagacgcgaagaatctcccgaccgcaaaggcagccaaagaacttcgaaaaacactaactcacgatccacttaaccctcataggccctctctcgcttcatctcagttctcatacaatccaaacggttttagtccctttcctaccagtgttccccctcccttatcccacgtcgctcctaggatcaatccgactgcattcatgacaccctttgcctcgaagaaccagatgatcaagtcaatcgttaccccaaaggtcatcgagccatctttcaagaagaaactgattgcagcagatggcccgttggtatggatagactgtgagatgacaggactagacttggagaatgacaggatcatcgaggttcgttcctgcgtgtctgcttgagaaattatctatacagatcatgctgacgctgatcgggctcatccacctggttggaaaccgtagatagcagtgatcatcaccgacggagagctccgagcggtagacgaaggcatttcgttcattgtccaaaccccaaaagaggtccttgataagatgggagagtggtgtactgaacaacatggcaaggtatgtgtgtcatcccatgtactctacattcagaagaatagtctttactgaatggtgcctctgactaccctcactttgtgttgatttgctctctagaccgggttgactcaggcatgcatcgactctcctcatacacacgaatacgtcgaagccgaagtgctcaagtatatcaaagagcgaattcctgagaagagaactggagtgttggcaggcagctcagtccatgctgatgcagcattcttaagacgaccgaacggcggaatgagcagcataatagattggttgcactacgttcgtatccatatcaaatttctgtgatctcgaaaggtctattcaattgactcctaaattctcgctgtctttctcaccgtggtcaatgttcctatagcgtatagtagatgtgtctacaatcaaagaatgcgtctcgaggtggtatcgtatgtcgtctgaccatccctgttcgactttgacttgatcgcttaagagctgacctttaatcaattgtaccactttgactcttgtctaaatccaaccccaaactcacagcgaccctggttcctatcttccgccgagcgcgggatgccgaccgggagatcgcgcaccgagcgctggatgatatccaacagtctatccttgagctagctcaatacaaagcaactgtatttgtccctccggtcatgatcgacagctccctacaagccaattcggtctcatcgacatcgtccaagccgaagcacccgagatcggatgagaaaatccaggtggacgataacttgaaatggaatacctcgacgagtccgaaacgatgggagacggaagatgagtatttgagcacgaaacagacgagtgaccagactgagtcgacgaatatcaagggtacgagtctgacgaaaggaagacaggccatacctgtagagccttctcaagagctggctgaataatgtagaggaaagaatgtccacgatgtactagtatctgatccatgtatcatcatcacgttgctcggtcgaaatttatctgcatggtcgtctagtcgcgtctcacgactcctcaaaaccttctttcatcgtgtacaatatgttctgccagtaaaatctcttctttctatggaaacaaatggaacgatgagagaagcgagcgtgctcgaagaacgaaaaagcatttaacgcgcttccgccggtggcgtcattggacggctctcgccgatgtataaagatcccatcccgtttgcactatcttcgattcttacttcaatcttgatcttgccatcaaagaacacacagaaggacagctgttaacatcatgtctttgccaacagctacccttccacctttatccaaagttgcagtcatcggagccggaagtctcgggcttgcccaggtcaaacagttgatcgacagaggagttcagaagaaagacatcgtcgtctatgaagctagagacgacgtcggagggatctggtaagaccatatactctccttagccgttcgagcggtggtgaactgatcaacatggaagaactcatcgaacgtcaggcgcttcgaagaggatgcagaggatccctcagtctactacacacaggccggacaacctctttatctcacatcggcagggctgaataatcctcattctattccgccttccccaatgtataagtctttgcgaacgaaccttccaaactatgtgtaggccatcttatttgatatctttgttcgttacatgcgtgtttagagactcacttctaattgaaacatcgttctgcagcatggcatttagagataacccgtttgataaaggaacagacatctttccagctcatcatcggattcaagactatcttcgtcgattcggagaagttcatgggttagctcaaaagtgctcaggttagatcgaaattaatatatccggttgctgactgataatcgttctttcccgaccgataaacatcccatcaggttgaagagttgtatccgattctcaacttcagttcaccgactattccatacgccgagccctgcttcagacgcagagcgatggactatccagagcgagacagatggtcaaccctttgaagagaagttttctcacgtcggtaagtctatcatctggtttccgatattttgttcgaacgcaccaattgattgatcagatacatacctgtggggttggtattgttttgttctatagtaattgccaatggacattacaaccagccattcattccctacataccaggtctttggaatttcaagggcaagatcgcacacaggtccgtttccacaatgttacagtcttcagtttgtttgaatttactgtgcttatcaagctatgtgcttaattctcacacggaacgcacccagccaatcttggcgctcggcagccgagtatcaggggaagaaactactgatcgtaggggcgaaaagttctgtaggtcacctcttgatatcattcccacaaccgctcgcgcgctactgacagttattaactgtgtgatcttcctcacctgaatcagggatccgatatcgcacacgatctatctcttgccaacttagcgcttcctgacagttccaacaagagcaagatttatctttctacccgaactatccctgcagaagtctttcccgaacctcttgagcaatggacgaaacaagttcagattgttccttcactacgatcagtctcttcctcgggggtcatcaccttttcggatggaatgacgcttgggccagaagaattagatgtcgttctctttgctacgggctataactttgcgtactcgtttatcgatcagacgaaggatgaaccgtggaagagtcattcggtggtcagtccccgactggctgttagtcgagagggcgacgcggagaggcctccgccagagaaggttcagccagggttggaaggccgagtcggaggttcggctgtccatcatctggatgggagctgtgagatgttctatctacctgatccgactatcgccttcatcggtttaggtgaatacatcgttttgttttcggttgttttcgttgtctcgaggaagagtgattgaacaactccctcgctttcgtcgttctttctcatatagcatactgggtcgtccccttccgattatcagaggtccaatcgcgcgtcatcgcttatgcctggacacaagcccgccagatacccgctgaacttccacctattcagaaatcggaagaattggaaggtaacccccatgcgatcggtatgccagctgagtggttgaacactaacggctggttgaaagctatcggagaaggcggccaggtcggttgagatttcttccttctctttctcttgttttgtgagagtgaagggccattcgaaaagcgagtcctgactgagatggttgtccgtgtgtttggtcttatttcaaaacaggacggacctggttggcacgaagctactgaagaatggatacaacagagaacgacggcaaaggcgtttagaaaagagttgtatggatactagattgatctctttatcttacttcaaccttttcttctctaaattatcatttgttcccttgttctcttcttttgctttgcatagatctgttcatagacatgttcctctacaactatagtgtgattggcaaactgagccaaaagtatttaacattctatagattaccttccataagtgaatacgctcgagctcgaggctgatgttgtgtatttcatcccgatttcttcttttcaaggcccacctagtggtgggaaagcagatttggcagagagaacgacgatttgatgaccatgagagatatatcctttgacgtaaccctataagaatgaagaaacgtataggtgatatatgtcagaagagcagggtcagttggtcaaatctcccggtttggcctctccgctttcggccaaagcaaggggaaagatagtagaagatgagagaaggatgtaacgaaccttgtaaatcatgttggcaattagacattcgacttctgcaggatccgcgtactcttcctcgtcttcaagatctccaaatgagccatcttctactctcgaaggtattggtgtcggtgttgatgctgataatgatgaagagccggaagcgagttgaagacctatttggaatgtcttgattggtattctcgagagtttgttctgagccaaccaactatcatcatatgtccaaagagaaaagaaaagaaagattccgaaccaatcccaatcagtcgattgatcatctttctgagtcaaaaggctctgttaagaaagacgagggcacgtacattttcttcagccgacctctgacgacgacctctcttcccttttccatagccgtccagatcccaccgccaccaccgccaccgccgccgctcagactcaacagcttcccccgaagagcccgaagcgcgatgtcgtaagctctgatatcggatcgtctgagggcttgaataaagggaagatatgtatcggaaagtactggaaattgagaaagaaggattggggatggaaggagaccgcgaagaagtcggagagggagaagataaaataggatttgtcttcagtccaggcagagaagagagcgaaacaaaacaaacagaacaaaagtcatcagtacaccaatactatttcggtaagagaataacaaagacgatctcaagagaggaacagacttactccagatttcgtttcgcaagccaactacagcctttgaaagcctcccagaaaagatcttccgcagtcttgtactcctcttccaagaaagctaacatgcccatgtagtacctccatgtgacttggtgggctatagggaatgagtcgagtggttgggggtttgaggacgaaccaatggcgcggatgatattcttacacaacgtcggtcggttaacctatatccaaaggggaaaaaatgtcagatcctcatatcgaggttaagaggaaaaacatgaaaaaagaatgagactgactttaaagtaacattttattgaaagaccagcgatataataaattcccctctgacgagcttctacacctttgttcattctatcggtagcgacgattgtgaaagctttattgatgtgtctggcggtatcttctaacgaaaccggtgttttttgaagacctgatgagattgaatattcatccgcctgttcgatggagtttgtgcacgaagattaagggtgtgaatatataacggaacgaaaggacgttgacaacgaagagtaagaacaagctcagacggaccttctcccctagatctcgaagatctctacacagttgataaagcaccggaagaggccatgatgtttgattgattaagaactggttcataaacaacctatatagattttgagaaagacacgttagaaccaacgcgtttgtctggatccctctgtatcagacaagtcgggaagcattccctcatcgaaggacgcgaaagagaaggagaaagaccgccatgaaagagaacacgcacgaaagacactgaacctgctccttataagcaccgacccaactggctccttctgtctctcctaggctcgagctagcttgcttagagaggacgagcacttgaatatgactgatgacgatctcagagaacgggctgggcaacttgagcgtgtgcggtacgagcaagtttcgctagatgcacaaatacgaacgagggaagatgatcaatgtcccagaacaactcccgtagaaccaatactacacctgtccttagcaaatgaaactcattgctagaagagagaaccaaaacaaaggaaagggcagagaacgaacatgagacccagctagaccaagaatgatcctctctccaatttcctgctgatcgttagccaagaggaccgctaatgtctctccatcacgctctctgagagctttttgaacgatctgacaatacttgggaaacggaagcgggatggcctgggtttgcatggattgcatcgtgagcgtatgacgaagaaccagacgaagcaagatgggaagtttgggtgaatgggttcgttcttccttctatcctcacccgggttgagcacagccttgagatcatgtgtacaccatgagagtatcttctttgcccacatcaacatcatcagaatttcatgagacgagatgatcaaggtataaatatatatgtatgtgtat

SEQ ID NO: 275 - DNA, 5230 bp, Xanthophyllomyces dendrorhous
atatgtatgtgtatgtgtatatatgagagcattgcaaaaccagcagtatgcagagaaatttgtgcgcagaaccatccaaagaattggaaacaaggaagaagaaggatgtatacagtgaactgcacgcgacgtctaaaatcacaatcggtcaaagtcggtcaaagacgaatgagagccatagccaggtcggccggtcggttattttatcaaaaggtagactcgtctgcttatctgtccaaaagagggaaattagaagaggagatccttcctcaagagtcctatgagaagccaagcggtccgtcttgcgagctcgactttatcgacctcaggcgctgtcctgctctctcctgttcccgtgtccgtcgccgtcgatattgatgcaggactgtcaaacgagaccccaatatccacccaattctcgtctgtcgataaagaatacttcaaatcaggtaacggaggaaggagagagacaagaaacgcttggagttcgacgaatgtaggtgaagggatagcatttgggtagagaagtggaagaagggatgtggacgaaggcatatgatgttcgacctgtataaatgaatagcgatacacgactgatgtcaggatctttaattcttctcggaactgatctcgcttgaaagagagaaggcgaaagataaaagtcgacagacctctataaggacacctttggaagttccaccagctccgctgatccctccgactttgacgacccattcgacctctctctcccccgtccagcttgtcccgttggaagacgtcactccatagggaatctcgaacgtctgtccatccactttaagtgctgtactttggttacgcgttcgagatagagaggatgttcccatatcgacctgagaaggagaaacgagcacaaagtccatcaaccgtaccagtgagattgtgatgtcgcttttacatttgagcgaagagagacagcctggagaagaaaggaaagaaaagaaaagaaaaggaaaaagaaaaaaagaaacaaacgtacaccttccgtccgttgtttcccaattccagctccagctcctggatcatttacaacaaacccactcttcacagctgccaacaactgatggagacttcctggcggcgtaagactcagcatcgtttgttttttcttgctactcggcggcagatctgcctttgtcgccgaacccgtagcagggttggaagcatgagtagatgaagagttagggacggattcttcgatcaacgcatggatgtagggagacgaatgagcgacaacggtatgtaatgaccgggttgacaatcccggcgagtgagacggccctgctgtatctgtgggcgtagggaaagaagcccgatgggagttcaaactgagaagaaatttcgtcgttggctgagcctgtatgggttgaacacaagtgatcaggtcttttcacaagatagtagaagggatggtgatgaaaatagaacgaactagatactgcttcgacagaacatcagcgatcaactcgactgctccagcagccttgtttcgagacgattaaacccgcgagaaagaaaagaaaacagaacaacggtgagcgtaggatagcaagagaacgagataagtgttctagttggattatcacataccggtgggttctgccatctgagccagcatgtactgtgggacatccgagagtgaggaggaaggataagagaaagatggatagtcaagaagtgagaaatcgattagaaggcaattgaagagtaataggagaaatgattagagagtattagaatgaacgcacgacagagtcactgcagtattcactcatctcttcgattgctggcttttgcgagagaaacaacatatatctgaatggattaagcttttttccttctagaacaagaaagagagtttagaggcgttatgggtgatataatgaaacatccggtaaaagagaacagtataggggaataaattcagaggcaggaggcatcgcggaagagatgggaatccaaagtaggagaaatgagatgagactagaaatactacaagatcaatgcgatctatacgaactatatggaagaaggaaaacaaaaagtcgtgaagacatctttcgcgggaataatgggatcaagtgaccatcaaggagaaacaacaaaaatggttggcagaggggggaaatgaaagcagaggatgggaacaagagcaaggagatctgaacttagatagcgccctgcattcgtctactttgtaagagcggctcgataatctccattgcgtcatctacatcccttacgtcttgaagaatcccattgccagtcagtctggcccactggtgagaatctagcttgacggttcggtccatgtcaagcgctttgatgattcgccgtctaaagattcaacaaagagagacacaaagacgtcagagaagagaatataatgatgaggaaagaggcggaagacacgtactggacggtagacggtttccatgcgtattgtacatcgttcgcagagcctcctctcggttgcgaagcgctgccgaaggaaagaaaagaaaggcgacgtgaagcaatccaaagggacgatcaatcgccagctcatcaagataatgagacacaccgctccctctatatatcgtggctcagaactcaccggaggacctcgctatcccgaccaatctgtgccaatgttgcacctttcaggaacaagttcagcgctaccacatccgctattgtcggcgagtaaccaggccggtatatttttggtttcttgggttctttttgaagaaaggaaagaaatgaaatgaaaaggctaatcagtaaggatgacaggagaacagagagaaaactacaagacacaaaattcaccaggagcaacttccaccatgtcttctagctcgatctttaattgtccagatcgaacttccgagggttttctctttgcttggccggcgttcttgtgatttgttcgcttctctacattcattgggacgcttgctaaagatgatttcccgttcgagcttggaagcgttctccactcctgaagaggtgccatctcgagagtagaatggctaggtctggtgtctgtcgatggtgtgaacgatttggatttaaatctggactcgggtcgaggttgaggtttagatacaggctcaggcgttgcaggggtcatcggccatgtggacgtcgatacattcgattgtacttcctccggcttgacgaaagttgcagatgtctcctccgggtcgacgtcaccatgaaggatctccctaacgaactcatcttcctccatagcttcttcctcttctgcctctctgattgcctggctgatctcttcttcttccgagtcttcttcctccaccaactcatcggtatcgttcgagattgacgcagactgagccctaccaactccatatgggacgtccacgttgacacctacggctggcggtgtactagtacccagaacgggaggcagccgatcgagaatcctttcggtctcgtagtcgaatattcttaccttctcaaggtctcgagtgtggagatgccatgttttggaaagcaccccggagagcgcttgttgacgaagaacatggtaggcttgaagccctgaaagtgcatcactggcagcatctggaaagagggaaggccaagaaggacgagggcaggaaataacgaagagagagggtgagccgggggcaagaagggtaaggatcaaattagaagcagcgaagagcgaacgtacaagagatctgttcgggtgatagtctcctgttattccattttgatttaacaacgctcggtggcttcgacagggatcgacctaatagcttgccaatgaattttgctagacttcgaggctgagagtgaggagtgcgcgaatttgatcgtcagtcatcataagaccttcgttcattgtctgatgatgaaagaaaaacgaggaggagaacgcttacacctgaatggttggattccttgagcgatatttgatttaggtcgactactccttgaacagaagtgcccagatccttgtcaatcttacaagcgtcctctggaggaacgattaccattgataagcatgacccaatctttcaagcggttagcatgtatgtatatctgcttttaaaagtcaacttggaaaagagactcacgtcgaataccgacgcctactttgacaaaactttcgtcttccagcagcttgcacagttcctccggcggccggctcatcttgaccaaatggacctaaaaaagagatatcagagtgagcttccgatatagacgaccgagttaagaacataaagattaatatagacatacgagcaagataagcttattgtctgctagctgaaccagggctgtcggggagggcgagacgcctttccgatagcttggcgtccattcgatatccagcccgataggcctgtttcacggaagggaagagtcggatgagaacccattaagcgaacaagatttcatttcacatccatcaaaagcacacagatataggacgtacgaagtgagccgtccgatggcagcattggcttcttcgattgtgttgacgaagaggacttctggtggatcatgaccgtctggcaagaagtccatgtggttgtaagctggcaggtcggcgaatgcgttcaccttcttctttttgggctttctctcttttgccgcggccttcatcttttgaagttctgctttttcaaacagacggaaatgactcttgccatctttatcgaagaacgactctctatttaacaagagatgatgaatgtttggtggttgatgagtgacaacaagggtgaaaataagagagtgggaatgaggaacaatgacaatgaaggctgacaggggatgagtgataaagctcaaagacaaaggagagacgagtaggaatcataagatgaaatgaacgagagaccgacccaatctttttaaaaggaggaggcatcctaggagacttagcagtgaatccccaaactcttctgatgacgttggtgttcggaatgttggatgagaaagatctgtgaacgatcacggacgggcggctcgacgaagaaggcctaaagatcagtctccctggtactggaccatgagaaacagatcgtgccgagtacacgacatgggcaaacattgctttctgaacaaaagcacaaaaaaggtggcaagacgagccaacgagctgggtgagaatccgacgttagagatgatccacccagacgaacggatagatgggatgggatgggat

SEQ ID NO: 276 - DNA, 311 bp, Xanthophyllomyces dendrorhous
aatgtagactcgattaggaaggaaagaggaaattcagagacatcacgcagaggcacgtcagcggttacattcaatgggttagtaaccaggattaccgtaatcacgtcgttgggccaaggtgctctgccggcgcccagcacagaccaagtgttctccaccaagatccccaaacagagcgtatccatctaggttgtcgaggcagagtgtgcctcaagagatgttgagcagagcacctttccatcagaaatgaccgttcgagtacactcccgtcaagactacttactgtgcagagtacgactgatcagaaaacg

SEQ ID NO: 277 - DNA, 10649 bp, Xanthophyllomyces dendrorhous
cccttgttccccccttcccgctctgtttccttcccggctgctcgtttccactcccacttcttttttttccttttccgtcctgttttgtctatctaatcagtttgatcatctccaacaccatctatttattcgttcttcatcccatcacccatctttcttccgtcttcctcactctgatgcctcggtcaaggcattcgacatcaacacctctacagacggtcgtgtcaaagtctccttcgccagcgtctagtccgggaaattatccaccggcacttgcaccggctcctccttcgcctcttgttaccaggcttcgtcaagatgctatgtgggctgccgtcagtcagttttgtgcgatgtggcttcccactctcggtggaatcgattgggatccagaagtacgtcctatcacgttctcttttcttcttatcctctatctctccttttttttcttttctctcgttcccgtttcctcttccccgtcgcgtccttcgtgtttctcaaactgacgatcttctcctttaccctcttcttgttcttctcctctttctcctcatcgtcactcacttttcatctcgtaccttctctttagaggatcgagtctgattttgacaacaccgaggatagatacatcgctcccatgatgactcagcttctcacttctcttaccttggataaacgtatagagtgagtggacgtcgtctgtttcgcttcctccttccgatcatccctcctaccctcttccgatgtttgttcggatgtcacccgccttcagattttctttcaaaccggactgaaacatctcggactaacacggatgcttcttctctttccacatcaaacttttgacgtgactagtaagaccaactgggttcgccatctccgcttacagtacctctcccgttcaccagaaacgaacgcgttaggtacagaggaggagccaagagactggcctgaacttgggttaggtgacaaggtttgtttcagacgtgattcgttcatccctccattcggatgcaagttctgacagaagtcgatctatatgaacgcgtctctctctgtttctctgtttcttagcttcgagcaatgcacgatttgtgcgagtggcagctggtcgactgtgaacgattccgaggactcgttctcaacggcgagcccgacgaggaaatcagctgggttcgttctcccatcttttcctccccgttctctgctctctttccccaaaactcttgctcaagcgcgtcatcttttctcactttccgcgctctcaactcatacagaggatccatccggtcggctgggacgccaaaggcaacactttctggctgtttgatgacagcagactctgggtccagcacccgatccctcctaaaccaatcaagatggtcacccggcggatcaaggtacctcgtgagaaggtcgtggcaagaccaagaggacggaggcagagaggcaaagctgctgctcctactcctgctcctgctcttgttgagagtagccctcaaaaatcatcgaggacgaaacgctcggctccgctgtcaccgccggcaccagctcctccgccagtaaagaaggctagatcgaccagggcttcactccgagcatcattaacgcttcctgaatgggaagagattcctaaagagtggcttgatccgctccagccggaagcgggagcaggcccggaaccatcttcctcatcctcatcagcagcagctgtcaagacggaaggatcgaaacaggacgccaccggttcaatagatagacgcgcgctgaaagggaccggtctcttgtcagacgatgacgagagcgatctgagcgagattagtgatgtcgaggaaaaagaggaaggtgaaggtgtcgattgggactgggcagaaatcgaggaggaagaggaagaagaaccagatccaagagacgaaattgtcaagatgaaagagaccttggctgggtttacagaatgggaagccgtcagtcctctcgcatccttctttcatttcaagcgctttttttttctcgcgctagaatcttgatgtacaaagactaaactctcctgttttcccacctcccgtataggtctgtgtgtgcaggttcgattgggaaaactttccaaaacaatttgagaattcagaagatacggacgaacaaatgttttacgagtatatcgtagagaccgtcgctcctcaggtgactgccgctttcagagtcagtgcttcctttctcttgcctcccttcgatgacgaagatttttctcatttcgccacctgacgtgtcctgtctcgttctgttatgctctgctctgttctgtttattcccaaacgcgtatgcatatatgcgcgtacaaaaggaaatcgaacaccaaaagaagcttcaagaggcgattagaaataggaaacgttcttcccggatccaacatcttgaggaatccaaagctgaacaagaacgacttgctcttgcccgacagtcgaccgaggcgcggatggaaaaggtccggaaggaggaagccgcccgggctcttgaacttagagagaaacaggccgtcgagaaagccagggaggatcgattgaaggagagggaaggtagactttggcagagggaggaagccgtcaggctcgcaaaggagagaatcgaggaggaaaaggcggaagagatgaggaggagggaggaaaggtacaagattcggatcggagagcttgatcctacccagatcgaaggcggccagaatggttcattctcttcgtccgaccttaatccagccgggttggagactcctcgaaatgggaagggctcgagcgggaaaaagaaaaattcagtgttcgccaaaaaggcaggagtggagatcggcggcaacaaagtcgaggctctgttgttccccgaccctggtcaaaacaagctaggaagacgaaaactatccgcctcgggttcgagtaatgctggtttgggcagaaaaggttctctcaatgggagcgcaaagaagaaggtctcgcccacaaagaagaaggacaaagactggacgcttcgatgcgaggtctgcaacctctacgcggtcaacccgttagagtttggtccgattatctgttgcggaaagtgtggagagtggcagcatgaagattgtttggatcaaagggatgcaaagcaaggtatccccaaacgtaactggaagaaagttgatttcaaggtaagtctctttgcgctctttcaaagacggttcacgcgacgaatctagttctctgacccactctgttgacatgtttcccattctttcttcatcctcgtagtgttcatcttgtcagaagaaacaggccgagaaagccctccgacggaaatctagtcaacagaacattcaaggttcacctctctcgagtcccgctcaacctggaaacactcaaactttaccaccgtcaaccatgacgtcaacatcatcgctaccctccgcgcctgttcctctcctgcctaatggaatttcccaccccgggttcttctcacatagcgtgatgtctccccaacagcaacttcaactccaacagcttcagcttcaagctcagcaagctcaggttcaacaccagcctcaacgccagcaacagcgtcaacatgcggttcaacacatcggtcttcctccctatcagagctcatccaacggatcctatcctgtagctgtaaacaacagagtgccctactcatcctccccacacacccaacctggtgtgccgacatcacatcctcagtcacattctcagccccaccttcaacctcaaggtcaggcccaggttcacattcgatccccaatatatgccacctcccaagttcagccccaacctcaatcgataactcactctcagacatcgcttcagtctcaatcccagcgccctgtttcgaccggcgatgtggatgttggagggcatcagccgtatagaggtgcagagtcgtattctatctcttcacctagtgctcagcaacaacgacccatccaccctcaggtgacatatccgcaaacacaagtttcaaatcaaggtcaaaatctacagacgcaagtccaagcccaagcgcaaggacaggctcaatattctattccctacacccaatatcaacagttcccacctgctcagtctcatctcgcaggatatcaacgatctcctcaacagctccctcatcaggtcttccagcagcaacagtaccagcagcagcatcaacgctatcagaacgttcaacaacctcagcaacagcaacacgtcgctcacaatcctacacctccggcgactgcttaccaccagcaatatccgacacatcagacacataaccctcaatccaattcgttctctcatcctcttccaatgtcccagcagtctcagccacagatgccagcgcagggccaggtacaacctcagctatctcaccaatcacagcagagaccgcaatagtggtagtgatgacaatttcgaatgggcctaggaattcaaaatctgattctctccactcgctctcgctcatcttgtcttcttctctctctctttcttgtctggtccttttctttgtttcttatgatattctttcacccctcctcccttgattccccatttcattctgtcttgtctcagcattcttgttccccctacattcttcctcttctgtttttcactgttggttttccattcaacgcttgtatcagcaaaattcattcgctgttccacatatcccttctctctttactaccttttccttcacccttttcgtttttgcttatttgatccggactgtgatagcctgccattcaaggcatatctctgtcttcgctctttctttttgatttttagtatatatcgtacagatatgaatatggtctaggatggggccgaatctcgaagagtcacatttaacttaggaagctaaagactgaatttggtggcactccatatatagagtcaaccgtctgaagggtttccaacgagcaaacagattaaatagcgaagatatagacaaagaaaggtaattaaagaaaaaaagaacgaatccgagactctcgtgttcaagccgacaaagccttctcgatccccttcaacaagataccgactccgtgcgctccggggtcgggtacgttggccttactgagttcttctctacctacgtaagcagctctgccagctttagcctgaatctttgaagtctcagctgctgcgtcgaccgcttgacgaactgcgctcgagaaatcattaggggcagaggagaactgggtctggaaaacctcgagaggatcgaccagggttctagatggggctcgggctacagtgagatgattagacaaccattgagttagatttctagactgaggaatatcaaggtctcaaagaagagggaaaggaaaggaggacaaagacaaacctcgagtgtattcgtacaacgtgttcttggcgaacgatacagccgccgcccatacttcagccgtagcagcctgagttttctgagcttccgaagcttttcggagacctgaagcgagggcattgaagaagatggagtacaaggctccgctcgttccgtccatatccctctcgatctgtttgtcccgggaagagttagaagatgaaaataagcatcatagtcttggcgttgaagcaaaaagaacgatactcacgttctcagccaacgtcaagacagcagaaatcacatccgtttcgtcgatctctcctgccttgagagcgttcaatactccctcccctcctgacttcaagcaagttccacagtctccgtcacccgcgattgtatcgtatctagtgatctctggttcagcagcgataacgtcctcgcaagcttgcttgatagctgccaagaaaacagaagacgaggtagctgatagatgtaatttgaaaaagaaaagaaaaacttagtcatgatgttctcaatagaagaggtagagcaaccggaaggccacttacgaggcagaggagatccattgttcttgacagccttttcttcactcgaagcttcctttgtgtcgacgtgaacaacaggctcgctagcggcgttccactaaagagagaagtatattcatcagtcttcgaaacaaagaagccaaagcacacgaatggaaaaaagagattctcacagcccaaccaggagcatctcccggagcgtcaacataggagagaagctgatcagctgtgtaagcactctctccttctctaggtaagaggaaaagagagactgagaatccaggcatgtcaagcgaggtctaggaaacgatagtgatcgtagtaagcgcactagagattaaccgcgtgttaaagtactctaagtgttgacataccatgtaggtaccggcaagtactcgtcggaccttgagacctttctctgatgctacctcaatggcatgtccaacgatgccactcaactcgagctggctgattcctcccaggttgttgatcatcaagacaacctcgtcctttccgtcgcctttgaaaggaacgaatgacctatccgggtcagaggtcgaaatggagaaggtgatcatttggttcaagagatccctcgtcttgggtagggtaatcttttcgagacctggctcattatgaatacccataccactaagagatgtacatgtccgtaagtcaaggtgacgaatgtcagggacggtcgaaatagtcagcgttgatatagtcagatacatacagttccatctcatctgccttcagatgtgactctgtgctggttgatccgggtaactacaaagtagtgtataaagaataagaatgggaacaggacaacagaacacgattgaatgcttgttattgacaggtagacatcagagaatagtaagaacttacgctacagtgctcgagcccgactcccaaggttgccgttctatcggccacgtactttccaagatcatagacctcgtcaatctctgccccttcctttgccagcgctccggcaattttgtaaacaagaacagttcccgccatacccctgcgaccgaccattttaccctgctctcgaccgaccgagacatcttctccgacggcaaggagtcggattttggatgatgggttttgggcggtaaactgctctttcgcgagtccaaagtggaggacatcgccagtgtactgcatgatgacgatcaaagttctgcgccggtagcaaggagaaacgatgtgagattgagaagacaaagtggaacgaggttgctgaaggatgtatggatgtggaaagactaaccccttgtcattgtttacaatctcaagagccttcttgacttggttggtgttgggtgctagaaaatgaaagcagcgtctttgagtactaagagcagactctggccggatataaagacaacttacaagcgaatacattgccagatctaaaggataagtaggtcagagttcagttcttaacacgtggcataaaatgacatgttgtacatacactgcagcactcaaaagaccagctccaacgaaccccgcatgggaaggcctgaattaattatcatcggttagtttcttgaaaacagcgacagattgccagctagtcagatatgtttgaattgataacatgtactgactcatgaccgcttcctccctatttttgttgattttttttccgacagaaggaaaaggcaggctacagatcagcttcagaatctcctttcttgtgtcggataccgaaatcatacgtaccccagagatgatggaaacctggtgaggaactttggccaaatggataactacatttcccaggtatattgagtttagaatgtacgaatctaccttggcagcagcagaagatccaagcagaaaaggagacacttttgaccatacctttgtattcttcgttaagctttacattagggttaagagctacgactcccttcagagcgtcgagtacgatagccttggggtcgttgacgatgtgttttgctatggataggaagaacatgtaccgtaagaaccggacgaaaaggaaagatatcagcacaaacccctcttgctccaagatagatgagaataaagacgcacaagataccatgatagttctactaggtatgagatgagatgagtggagaagatagagagtaggatggaacaggaagaagaaagtagacaaacagaatcgaggcgacagttaaaaaagtgaagttccggatcggatgaccgggatgacgttcggcaaacgacggatctcagatctgtgcaacagatcacgtgatcaacaagctgcttaatcacctatcaaagcatctcttatctcttaacaacatctcactttcgctaggaagggtacatacgcaacattcaggcaatcacacaatgtctacattcgcacagaacacgttcaacgcagcgaagtatctttcgtttcgacctacttatccggcttcgttctacgatatcgtatacagttaccatcgtcatcgaggaggttcattcgggaaagcagtcgatctcggttgcggcccgtaggtttcaactgaattcttttgccttgaaagaatcgtttggagtcaacgcttttgatgaggtgctgactctctttcatcttttggactcttatgcatctggatttatagaggtttcatcgctcagaacttgtcaaccaagttctcgaccgtcatagggattgacccatcccagaaaatgattgattcggctctacaaccggagaaagccgaagatgccaggattgaatatcatgtgggatttgcagagaatctctcaagcttcgtacagaacgagagcgtcgacctgctgattgtcggtcaggtgagttttagagatttgatatctgcagctttaataggtagaatattattgaccaaatcgtatctatcatctcctgatgatgtttgctctcaggcatgtcattgttagtacagtctcacgcatgttcaatcgaagcatacacactgatcgcttcctgaataccaacacagggttcgactttgataaagtttggccagagtttacaagaattctgaaacccaagggaacggtggctttcttcgtaggtatctctttatcgctccatactttgtggacctaaggatgcgagttaatcgaatcttgcgcttctgatacgtcttcataggggtatggaggtttgttcctcgctgaatctctactctccatcttggtccctatcttctaaaaagctgcttcataccatcttaaccacagaatttcaccttccaaaacatccctcgcaaggcccgttgatcagcaactactccaacagtccgtcctcccttggtccatactggcaacaacctggacggtccatcgtcgaaggtctcctcgatgccgttccgttccctacacccatatctccctacgctcctactgaaagctctttgagaggatgggagagggatccggctgcactcgttccgccaaatggtatattagacccggaaccggcttcgccgaaaacattatcatcggttgaagcctccacatgggatccatcttctttcctccggctgaaacaattcccgacattggtcacgaagccgatcgcaggcacacctcaagcggatattgccgaagggcaagtatcaatcaaaaagacattgacttgggatcagttggaagcgtacttccgaacatggtcttccctgcacacattccatcagacccatccagaagataaagctcttgagagagatatcgcatcgaggcttatctacaggttgagacaaggcgtcagacacgatctcggaagagcacaatctggagatgcggtggaggttgaatggccttcgttattgttccttgctggcaagaaatgaagttttcagattatgttctgtcttgcgcttaatcgaatgcgttagttcagctcatcagaaggaaagagaaagaggaaagtggccgttctcgtcatcgatcttcgtagatatgagaaagaaaaaaagggagttacagaagtttttttttgtttctttgtcgcagagagttagagacgaagaagagaacactaaaagaacatatggacgtatccaacgttgaaagagaaagcgcaactagacgcgacaaagcacgacaacaaagcaaacgacggggcaaagccaagcgggatgagacaaaagagaaagccagttttgagcatggaaaaaaggtaatgaaacgaaaacgaaggaaacagtagtattgagatgagaaaaaatgcttgactgtggaatgcgtgctcgtttattgtagcacacagcaaggtagagaaattgagaatgaggagtcaatgcagaagagtgatgatgagaaaagttgtgaagtacagaaatgatttgagacggtaaagagaggagggaaagaatcaaagactagactgcaagaaacatgctccaatttgaaaaggcgagcaatgatgcaaaactcaagggaaaacaaacccataatcaagaggaatgacttgagaaggaccgaatgataagggaaaataaaaccacgcaaagaccttgcaagaaggagaataggattaccgcatgattcttctgtttctctctatcggctggcctggtctaattcagacaatcccaagcccacattctcaaactgcctcagccctagagagttccacccagaagatcccaggcctgacctcaagccctggctactgtactcgacgtgaggaggcgatcgagtatatgcatgcacatcaggtgagatgtgaga

SEQ ID NO: 278 - DNA, 55586 bp, Xanthophyllomyces dendrorhous
catcaggtgagatgtgagaaggcgatgtgggattattcgtccatgcttggagcaacaatcgcccgacgtctggttcgacctgatgattttgaaagaaaaaaaacgcattaaagaacggttaggttagaggtctcatggctggtctgaagagtgacttgacgtacttcagttccatctcggctgactttctgtcaatggttagatatcgttcataaccaagatgttgtgatcagctgatgagcaaaggaaaatatcgcgccgaaggaaccgaaaagaaattgccagactcacgatctctcgatcactgttccaagggtttcgaagatgtcgaattcgctggaacggtaatctttttgtttgaatccactcgattttaaagggagttccccaggttcctactcccgtatccttaggactcttctcatccttcgagtcaacggccgttcctgtttcggggttgactgccttgggagaagtagccgacagaatgttaggtgagggtgggagatggagattagggaagtagaatccgccggtgagtcgagaggaggatgtgtcgagggaagaaccagtaaacacgctaggagccgagcctgaggagactccttcagatgaagagggaacaaccgattcaagctgatcttttcgttttattccgttctcatcctcgctgttgtcatcgccatctggattgatgttcggactggtctcatcaagatgaaggtgaggcttgtctctacttaacgaggacgatcttagatgatcaggcgaccttgacggagaggtatcgggtgatactcccgaacagcctgccttagcaacctcctcgatgattgcgttggtctcgacttttgtcaacggtcggaacacctctgatggatcagcgattggcacgtgtgccgggctggacgcctgttcgagctcagcaggcgcgcttgattgatggaacactggttcccggtacgcttcttgagaaagtgttgagcttctaaacggagggatatcgagtcgaccagaagcgtacttcttttcctcccctggcgtcaattctgctggagaagtgctcacatcaggcaaaatctgactcgggagtttcatccctgcggccttcatcgagggagttagctttgagtggcctgggcgatttccagatcgtttgccgcccaaaggcttatggggcgccgtggctgctcgaccgactgtttgagtatcatttgcttcttcctccgcagtctccgcgatacgatcaggagccgatcgctgatgatgagggtggacattaacagagcccggaccagaggatgaggtcgagtgcgcagaaccaatcgatcctcgagaggcccaagagacacgggtggtctccttgttgatcggtccggccattctgtgtacgtcaagatcatttgtggtgtagtcagactcgatgtttatctatgtcagccccagatcttgaaggagtgtgaggaaaacgtaccgagcatagccatagaattcacccgtctgatttgctccaaagatcaagaaaacatctttagatgtccggaaggcttgatcgaggacctgctcgttatgcggctgagttgcccacaagcctttctctgttgacgtatccagatcggtctgtaggtggtgatattcagtcgaattcgtcagcatagtgataaagatgaagaaaacgataggatataacttaccgaggtcagacttttgagaataaagtaacggacaggaaagtaccgtgcaaggactgtaacatcaggatagtagatgttaaagttagtcatgttaatcctcttggtactgaggagaaagcatatatgcaagaatatggctctcacaactcgaatcggtagacgcctgagaagacatcgttcgaagactggctgtactcaatcctttttcgggccggtgaggttcccaatctggcgcttgtccctctttgacttcatctacccgtggcccttctggttgattcttatcttcttcgtgataggatgccacaggtatcgtcgtcgtcatcgtctgaatatctgttcccgcctcctctccttttgcccatttgctctttacccaaccggtatgaactcccctgcctctctgtcctcctacaccggccttgagctggtcttccttgtttctgatacgacatactaaacgaggactccttgccccttctgccggccgaatcggttggttattaaagaacgcaacggcctgaagaagagtgggttcgtcataataattgatgaagcagcagtttgaccgggcaattggaaatattgaggacacgactggatgctgtcgggagggtggggtacttgtatcagtcacggtcaaagaaggagactggggtcggactacatttgaatcgggagagggcgaagatccctccaaagagttaggaagcggcgtagtgaagaacctccagagttcttcttcagttgcatctgaaggctaaagttagagtaatggatgatgccttgattagtgttggttcgacgatggaagtgctggaaaacagcaaaagtacgaaccatgttcccgacccacatcacaaactcgcttctggaacagaattgatacgaaaagatggtttaaaaaaaattgaacaataagagaagaaaaaagtgagactgatggggacttgagtgagattacaacggttgtaacacaccttgtagcggcagagacaggatgccaagcctttcgttccagcgtccgggaaatttctttcaatcttggatgtcgcctggggtggggttgctgagcgggagatgccgaagacccaatcacttgtttccccggtcttgcaggtgcagaccctaccacctgttgacctgaagagatcgatggaggcggaggtggctgggaatataccggagagatattgaccgggctgtagcctggtggaccgggataagccgtagggttaggatatccataaggcgattgttgggaaacgtaaggcgatatcgttctcgtcgccgatgaagcctgagttgatgctgtaactgtattgagaggcgaagaatacggagctgagcctggactatgcttgagtgagtgtgcctcgtaataacctccaactgagggcatgaccggaaagtacatccatgtctgaccatcggggccttgaattgtctgaggagaaggagaaggtccatagatcgtgctcgcttgactgctgttcggggacgccggctgagagactccaccataagacgagctggatgggggaccattgaaccctctgggagggatgggcggagggtagtagttatgggagacgttcggatagtaaggcgcataggttgagggcgtagtggaatggacggatgattgggatgccatcgatggagatggagatggcaagcgctgctgctgaagaccgtgcctatgaggaggcatcgggagaggactggcaggaagagaagatgcgtaataaccgccgaatgcttgataaggtgagcctggggggattccgtaggcaaatgaaggagctccaaaggatgacattggaggaggatgatgttgctcgggataagatgtccagttgttcgatcgactagacttcccaccattatttggcccgttataactgtgggatggatagaatatcggaggcccgggccgacctacgaagagaaagcgagagaagcgtaggtgagcataggagctaatgcctacttccaaaagaatggcacgactaaccatttggcagttgcatgttctgtccagtgccaaaagtcggtctctgttgagaacctccagaggatgtcgccggctgaccggcaccgcgtccgttctgagcgggaacaagatgggacaccctttgagaagcaccgctcgatgccgtcattgtcttagaaggaatagaacggaagaggtgatggagtccgtcgaaaattcctagcgtaaaggcttagattcatttacatgtcaagaggccagacgatagtgagcagattgaagctgttatttgcgtccgtcttgatatccctcattcagaacttaccaagcttgttgtcagaggaaacggatgatggaacgggatggacttgatcgctatatttctccctctgcctgcttgaagattctttggccttttcttttttgatcctttctttctctacctggttgttaaagatttcaagagagaatctttctctggatgggtttggcctttttttctgagccagtattcttattcatgacgtcactcatgacgatcagcctgggcagggaaggtatttcgaagaggcggcttatgtagcttatattccacgtgatggtcgggaaattctccgatgacgtcatcatcaactcacgtgcgaccctttttttccttttgcttattcttaagggtctattttcgatcagcatggcatcgctcttacagaaagagttatatgctggctgtaagatcgatggatgagtgccttatgtgtgatacatgtgcgaagactgaatgtgatttgttctgatgctgctatgtgtgttcgacggagtgtctctataaatgctcaaaatcggatgtttacgaggccaatctgatatggagggagagagaagattaggaagaagacgttcaacacatatgtacacacacacacagtctttctctctctccctccctctctgcacacaaatgtatcgagaaggtgaccaaagtgccctggagtgatgctgactaataaccctagcaaacaatgtttagccccaggctggcgtaagtactggccgcgtcatctaagttaatggatagtcgtccttcttcagttgaaggggctgacgacactctctactcaaacgtctacaagttcatccccaaagactcagctcctagtcgtcttttcttttgttcgttctcctcctaggttgtattctacatcgtcttgatttatcaaagccagatcggagaggttgccataaagtctaggtatgtgtgctttctctcgatatgctgtctctgtatatagcatctcatatccaggacttactccatcacctctcgattcttgaaccttcatagctcgcctctttcaatccaatcataatttctcttccacttgaattgctcaaaatccttagaaagaccaacaagcaagagaaaaaagaaatctcattaccctatcatcatcaccacaaatactatgtctcagtcagagtctgacgcaggccgacttcatcggccaaacgatttagagggcatgcatcgtgactttggatcggttagtactggttactatatcatcaaatcctttcggttccttgacgtgcccaaaaccaacactgacatattccatcaccaacataggtccgagccggaacacaatcgtgagtattcgaagtgatgactgtaccttctttgctctgggcaacatctcttgatacctcgacgcttgactgacacctcttcttcctctgccactccgctgcataatttcctcatcgtccactccttttcaaaacagtctggttcaagccatgtctgctgtgccctgggatgatgctgacgactcagactcctccggatcagatgacgagggcgaaacggtctccgtcgaggaaagaaggacaggcagtgctacctatgcacctcaatcagatccagcttttgggtccggccaggctgtccatgaaaagactaacccgagtaagccctctcccacgcggcctgaatatcactgtatctccattcctcatccacttgaggtttgactgatatatgatgcactctaattgtccacatagtgcgcccaactcattcgtcgaggatgtcttcatccattcataccattcaccgaccagttgcctactctcgagcgatctctgaatctcgaacacccatgctggagagaaataaaccgtcattctccggtcacactgatgcttccggcttcaaaaaagatcatacccttccctctttccaccataccgacccttatctttcgcacacagtcaaccctggacaacattccaaccagaatttggacaaggtcctttttagccatagagagaacggcgtcgaaaagtttcaggcagacaatcccactgcggacgaacaagactacgaacaccagacttcagataaatccatcctacacggcacccgagaaggtgagaacgttgagaaggaagaagccgatggagacagagccgaggaagagctcgttaaaggagattccatccaggacgaatcccacgagcaggaagcacgaagcctgatgtcccgaaggcacccagacaagaatgccaataccgatgagcatagttcaatcggacgaaggaaaagaaagcagaagttagccgagaagctcagggacgtattcaacctgcccgacgtggaaccggtccttggtgaactaccctgctggctcctgaggagtatctgttcgtatcactctataccaatcgtcttcggttatgtgggtatatgcaagcgatactgacttaggtctcggtttgatgtgtttggctatctcgtcttagtgttgcagggatacatgtatctcaccactggccatctctgcttttatgctgctctgcctaacaacgcagaggttagtgcacccaatcctgatctctttacctcttctcgcgcaccttctacgtcgtacgcttccaatgtcatttttctcgtcaaccacatacagcacaaggtcatcaaaagcggacctctgatcaagaaatctcgcaagagtttgcgggcaaacaagtactggtttgtattgaagaacggtgtcttgagttggtacactagctctgctgtatgtacctatttttccgaaagccatctcacaacctcatcttttccatttgattcacatgctcgcttgagccctaagatcattgccactgacgagagtatctcacttgcatcttggtcaccgaaaggatccgtatttccctcaaggaaacgtcgacttgcagtacgctgtagaatgtgaacccttcggagagaaggctctgaagttaagcacaaacaggaagaccttacaattctcatcggaaactgttgccggcagagatgaggtatgtttatctgagtttctgtctttcgtaccaactaccccttgggctctcgactttcctatggcatatgcgtcctgacaggcttgttatggtgtcctgtctcttctagtgggtcaaagctctgcagaaggtcatcttcaggacccagcacgaaggtgaaaatgtcaaggtatgttccatcggcaacggttacattgagtttctttcctctggtagaaaggtttatgttcatcatgcttatctgcgtctgtcaatttacgttttcagatcgcgattccgttgcaggcaattgtcgatgtagacaaatcgtctaacatggactttgccgagacgatcgaggtcaaggttgccgagggagacgttacgttggctgtcgattcatactttttcgcttacttctctgatctagaaggatctctccggtaagtacattcctattcatctctatgatgagatttgccctgcccatcattgacaattctctttgttcatcgtaaacaaaagaaaaatccgggaggtagttagctcttaccattcgccagatgctcgggtggacttacggggcacgatagactccaaccgagagcatgtgtttgactccatttctgaggctgcccaaaagaagcgttccatctctcagaactatcctgatccaaccgagaagtctccttcgacgctatcgagtatcaaatccgcgcttctccacccatttgggtcagacaagtcgaaaaacaatgacgctgagcctctgacgtctggtatctcccctcgaccgtcaagtacggggagtgaccttttgctgtccacttctcctctgtcttctgtcatttcttcccggtcaagttctagtgttggagtcggaatcactcgagttggatctaaagatgaacacgttttgagtgaaccttttaccggaacaccagggatgatcgaccgatcggtcaccccaaccccggccgacagccaccgatacccaccaatccccgttcaatctgatttgaaacagactcctacaagctcgtctgtgtcttcgtcttggagcgcttctaatctacttaatcggtcctctaccaaatcctcatctactacagtgtcgtccacaaagacaaagacatcgtctaacccgattgttagcctctttggcgctgtcaaaactagtagattcaaaccattctctacttctgcccgtcaggaggatcttacgaccggacacgaggcgcaaggtctgtacgagacggtttctcctaaagtagagattgagggtgatatgaccggccgggcctcggaggacagctcaaacgaggacacagcagactattcattgatggagaagtcagagactgccgatcagcaggcggaggatgtctcgaaagcattccatgaatatttcgcattggacaagaacgaagttctaattgaacgttcgtatttgtcatctagttcatccctctattcattaggctgactgaaggatacttgtctgatttaaaaatgaaaaaaaaactcgtccgtttacactgattcaaacagaccttcctggattcttgtttagagtcgttccagtttctggacaggtctacatctcgtcttatcacttctgcttccgttcaactcagatgttgtccaaaactcgggtgagattatgcccaacacatcatcttgccttgtgagcaacaaaactgacagtcttgtcttgtggaaactgtagatgattatcccacttcaggatatcatctccattcaacctcagaaagctttcaggttcagtcaccaaggtctagcgatcattatcaaaggtcatgaagagctcttcctcgaattttcatctaccaagaaacgagatctatgcaagcgcctgttggacaaacagattgaagaggttaagaccggccgagtgcctaagcctgctcatgaaggtccttcagccgcgatgaaacgagaggccaaagtgctttcggatctagacgcgaaagacatgaactccccaacagattcaaactcggcttctacctcgctggagacgacagataaccttccgcccgttatgttcacttcggcttcttcgacgttcttaaatttcaagccaaagaagagccttcatatcacttgtctaactatcggatctaggggtgatgttcagccttgtgagtataccttttctgggctacttcttataatttcgataaatggcaagaacgagatggctgacgaatgaagtgtatgactgcctcttcttggtaaagacattgcgctctgcaaaggactcaaagctgagggtcatcgcgtccggatcgcttctcagtgagttgtccatcttgcaacgtattttctacacatcttctcgctacaggtagaggaggctaaacatgaacttcgtttgatagcggtgaatacaaggactggattgaaggcgtgagttaggatatatcgaaaaccatttgtaagaccaaaacacttatcagaatccgttcatcttttgtctttcacagcacggaattgaatttggatatgttggtggagatcctgcggagctgtatgttcttccatcgattctggctgtcgaagaaagagtactaatctgttaattgggtcataggatgaggatttgtgttgagaatggtaagcgctaattctttcgtcatacatatacatttgcaatgaaagttggaacacgatactgactcgaaattatctttgacctttaggcatgttctctgtctcattcatcaaagagggactcgagaacgtgagtacaaccgtatgcgcctgatcttgctcaagattcatcgctcactttacttcttcgtacactcgccatatcagttccgagactggattgacgatctactccagacatcctggaaggcctgccaaaacacagaccttctgatcgaaagtcctagtgccatgggcggaatccatattgctgagggactaggaatcccttattatcgagcattgtgcgtcttctcctctgctcgctacatcgtcatctactggaggaagaaaggctcttatctgatcttattgtttatcgtatttcttgttttagcacaatgccttggactcgaacccgagcgtacccacatgcgtttgccgttcccgatcaccacgtgagcttgatcgttagattctgagcaatttatccagtacggaaggcacttacagtctgttctatttggcacagcgaggagggtcctacaactttatggtcagtctcggttgatctggtagcacttgccatgtttcgctagtttactaacgatgcgtatcctcccctgctattttcgacgaccagacctataccatggtgtgtgtcgtctttagaaccatgctctaaagattctatctgacaactgtcgttccttggttgctgtagtttgatcaagtattctggagggctatctccggtcaggttaataggtggagaaagaagacgatcgggatcagctcgaccacgttggagaagcttgagcctcacaaggctccgttcttgtacaacttcagtccaacggtcgtccccccgcctcttgactggtacgaatggatcagagtaaccggtcagtgatttcttctttgttttcacggagaatttatcgtactgaactcacatatgtctttcccttttctaggctactggttcttggatgatcccgaagattcatcggagaaaaagtggtcgcctccagatggtcttttagagtttattgataaagcacacgaggatggcaagagagtggtctacattggtttcggctctatcggtatgtgtcttcaactcgatcatctggggaacaagcttgagaatccatcgagtgacagacttttgacaactcatattatcccctaatagttgtttctgatcctgacgctatgactaaatgcgtcatcgaagctgtgcttgactctgacgtccgatgtatcctttccaaaggctggtccgaccgactgagcgcaaaggaggatgatactcaaaagagcgagaaacagaaggagaaggaaaagaaggaaaaggaagaaaaggcaaagaaggaggcagcgtcgtacccaccagagatcttctctctctcaagtgtccctcatgattggctattccctaggatcgacgccgcttgccatcacggaggagctggaacgaccggggcgagtttacgagccggtattcctactatcatcaagcccttctttggagaccagtacttctgggctgatcgtgtcgaagtacttggtgttggttcgtccgttcgaaaactcaataaggagcattttaccgccgctctcaaaacggcgactcagagcgagaagcagatcgagaaagctcgtgaattggggaaagaaatccgagctgaaagtggtgtagctaatgcgatccaggcgatctacagagatctcgagtacgcccgttcgctcataaagggtccaaccagacagacccctcccgatgcttcgagttcatccagcccagagtcctcaccatcaaattcaccaagaagtggtccccatgaacttccgtctgtatctttagacgacacgcctgatgactctgacaacgaagtcgtcttccgtcctgcttcctccaccacaagcgctggcaactcggctaagacgtcttccaagatgaccagtgggactggcttcgctcctgcagacgcacatgtcagcggctcttccacgggcgaagaaaacagtgacgattcgtgggacatggttcacaacgatggttcccattcccgttcgaacaccacaagactggcaatgcaaagcgaaggaaacgaaagtggaaggacgactttgaattcccttgggctcggagcagtggtgaacatgttcaacaagtagataggatagagactctctctttctttttcagacttgtcaatatttgccccttctcttcttctcttcttcctcttctttctatttgtatcacaatttctaaacactctctgtggttactcctgttccatattctctactgttcttggttgtgctcgaggaccgtcatgagatattcacaggactgccgatactcttgctactcttctcaacttgtctttaatctaatcagactgtagcactaatttttattcttaaatcttgactcgtttctttcctctttcctctgcaatcgtaccgttgtacaaatgtcgctttggatcatatcgtgtcttctacgacctaacaagagacgagcatagaacaacaaagataaagcacgcagaaagataagaagagagatgagaaacagtatggagacataaaagtagtaacgagaagaaccaatgaatggagtgttcaagagtcgaacgattgacaatctagatatataaggaaagagatcgatagacaacaagaagatgttctactgaaaagaggctcaaaatcaggttgattggaaagcgtgaaagatgatttaaatgtggaggcgtatgagaattgtcgtcgaaaacgagctgatcagatgttctcctgaacgccttcgtggatctcctttccaagctgcgagcaatcaaaacaaacacaataaattctttgtattagtacatcattcagtttagtcagattatctggaaagtctacctcttgtcccaaggcagtgatctaagggtaagaaagatcagcaagaaatgatgttagcgtgcgttgttattttctcaaatctcgacgcaagtgatggtcaactcacatcggtctcttgagccttatcttgcactttgtccacggcttcttttccctgtgtatgatgaaaagaaggcgaatggatcagtgcctcgtttatagaccaaacagggaccggccttgctacagtgacccaggtcttacctcctctgcagtagcatgaatgacttcagaggctttgtcaagaacaggctgaagagtggtctgtgacgataaccggaaagacattagatcggtacgtcaacatgaaaactgttttggcatgctgataaaagcgcaagatggactgacttgaacataggagactagctcctttgtcttctttcccaccggcttatccttggccaagagtagggtagagagatctcggtaggccttggtgatattctctcgagcctgagccggaatgttgtttccctctttctgctcgtgcaaagtcaggtatagatggagacccagtcaacgggtggtttcaatgagaaacaaaatgaatgggcacactaacttggaactggcccagctgctcgactaagatctgactcagacggtgaaccttagcctgagcatctccggagatgtcatgaacgaactggacgcctgacgagtaggtagttgtgatctgtaaactgtgtaatgacagagtcagaacgaaaccgttgaaccttccgagattggcatgttttatcttacttgatgttggagatggtatcaatcgccttttggcttttaaagatcgattgtgcttcgaaggtcagtactaaacaataatgcagtcactgaaactgacttacacaaccgcgtgagcttgaactccgattctctgttgacgaagaatcatcaccgccggtcatcagttcagcatgttctcacaaggaaagagatcgcctggcgtacataagcaagactaacgttatcgtaaacattcttgacgacctcgaaagcctgatcggccggcttccgggcgtcagactggagcaaccagatacaaatataaaaaaagttagtcttgttgatgtatttttcaactttaattcagatagtaccaacaatgatctggtcagtcttggtctggaaggcgtacgggaagttcttttcggccaagtcgagtctagaacgcagcaccagtatgtttagaatctagtttaagaccataagagcttataaaagaaaaaccgtttaccctttgttggccaatccgtctgcgccctcgataacaggtcttccatacctagagaaggaccaggactagattagtgggcgagcagcgtctaacgggcttgtccgattaaagtgactaaccccaagataggcgagacagcgttgtaactggatttcactacaccctcagccaggtggtaggccttatcagtgagcggtctggatgttacgacagcgagtagttggtcgatggaatcagactgttacacccgtaattagcaggtaagaaaaggagacgataagcatgacgggttagtagccgtcgatttttgctcaccctctgatgcgcgagatgaggacgacttaccacaagaggaattgcggtctatcaaacgaggcgagaccggtggttgaatggcgtttcaattagaaccaatgaagttcatcaggaaggttcacaagattgtgaccgatgccatcaaagggaacaaggtaggtcgaagcgttggggagtaagacgtcatcagggcacatttgtgagcaaaggacaccgagcaaatgaccaacgcaagacagacaaattcgagttgatctctcttcagcatctctcatgactaccgagcaagaaacgatgggagcgtgaagcaagagttacaaaggacatacgactctgttgacagaagtcaaagtgggcaccccgttggtcttgggagattcggttatggtctcggacatgatatcttttctttcttccacataccaagaaagagaagtttgagatacgtctgaaagcgaacgaagctatcggactggaatcaaaatgtgaacgagggagaataaagacgaacggtatgtgttgaagatcgacgtagaaactgtcaagagagatcaaagtagatcgagggagatgtggttggagaagaagagaaaagaaagaaggaacaaaagaaacggaaggtgccggctcattttgctcgtgaaagcggtcagtggagatatatatacatgttcctgtgtgtatgtgtgtgtctgtgtgcctgtgtgcttgtgcctacgagattggacacttgaggggtccatgcgccgccgtacgtgtgtgctctcgctcgcctcttttcttcctgtactccccaatcgctcgtgttttcttccccaaccaagagttctctcttattcaaggatcgagagagcaatgtaccgagcgagcgcccttccatgagatgccgagagaacggggaaggaccgtgcgtggcgtccaaagagaggagttgaaatctgatccgggatgtttttcacgtgaagaatcactcgagcacaaactttatcagttgttgactgaatgcacatatatcttgaaacaatcacagccaacgattggaaaaacaaggaaagagacaaaactcatgctgataggatgatatataataggccagaccggccgacaagatatggctttgatcctgattgaaacaaagaagagtaaaagaaaaagtagatagaagggtatatagggagacggttgggctcgagtctgaaaacacttggtaggtaatcacgacgtaggcttaaatctaagccgttcattcagaaaacaacaaacatgaatatcaggatacgcctgattctggcccctcaattaaacaagcacagaggataggaaacacacctgaacgcattcaatcggctcctggcgctagtcccaattctatcactctcctcaccatctgcacttccactcctactactcccgctcctgctactatcgctactcattggcagccattctctccgcttcgacctcccgtctctgtctctatctctatgctcatcggttccagcctcgatttcacctccgtcgtcctgctcgccagggaagccgaggctcttcctcttgatcggtctcctcgagattctctcgacaagaatgtctttcccgatttctgtctgcagtgctatgtttccgctgactgaccgcctggttatgagcgacgccaaaggtgttccgatcacggtcgtctctgtagtagtcacggatgcggatggaagatcaaaacgtggaggaatgattgctgaacgtggggtcgatttagaaacatttgattttgagcgagcgtttatcgatggtctgtcgacagacggcactggcgtttggtaaacgtttgatgaaccatgccgcgccaaaccgcggcctgttcccacggacgctgacgctaattgagctgcctgagtgggcttaggcgtttcattagatgtatggaatgagaggcgggagattgttggagtccttgcagtgaaaggctaaatcagaaagagaagagatagcctgagttgattattgttctccctgataactcagtccagagtcgaaacgcttaccggactctccgaggcgctccgtctatctccaaatccaactcttttcaagctgaacctctccctccagccaacggcaatcctctccattcgtttctctgttccgtgttcctcctcatctacctctatctctcctccactgatcccacttccaatgtcacttccatcagatataccgctgcagatactctctgatcttgttcctccgtctgtcctatcatctcccaggccatctgcctcagctggatccgcacagtgcgcccatagatcaacaccgcctttctcttggatcgtcgattcatccaccagagactgcgtggtttttgatcgaggcttcgcagacgacggcaaatcggatggaaaccgagggggactactagagatgtatccttcgtccggggaaccaccgtccagagatgatacctgtgctccctcaagagacgatggcgtaggcgacgaaacgccgtgggactcgacattggatggcgtcaagaggtatgagctgacacgggatgggctgcctgctctagaggaagacactcctggagaaagtgaatacaccgatgaacttccctcgtagatgtcctcggcgatttgtctagagatagaggaggacgaaacgttatctcttgtcagatctgacaacggaggctcgctcagctcgactgttgcttccttccttgcctcattcgctggcttcttcctcctcttatcaccgccgctgccaccgttgaagaaaaatttgctttgctcttctataatttccacgggttcaatgaactccgtcatctcgactgcccgcatctttcctttcgcaacagcagacagcccagttgcgcgcgaagatggggtaagctcggataacgttcgctttccactcaacggtgttggaccgaaagcgagcttgtggggttgttgaggaagtgatactgttcgtcggatcatcgatggtgagccgacctttagggaagaagtggctttacctattgtttttagcacaaagtggatcaataagacagagagaaagaaagttcatgtcagttagcaagaagacaagacatgtagttctcatgtttaggcagacatactaaacatctcattgatctttggttgacgctgtatagagatcgtgaaaataaataagcgtcctgttctcaaccggggctttaattgacaactagatgagagacaaataaacagttctcacattgacaaacgtcttgagtccagtcggactgaaatctggccaggggtccacgattcgtttctttgtcactgggttccattcccctctcgagatgcctctcgccagctccaaatcctggatatctggtccgatgaaccggtcttcctcttcgccaaacccttcctcaggaaacgggttcaaagggacgagtgatcggctttcaggatcgaacactcgttgatggaggaacgtgagttccgctagacggaatgatgtcggataatccggagggatcgtctttccttccaagcgcaagtgttgcacaacctagagattttttttccgaaacagttttcccaggagaaataagaacttgagaatttacgcggtgatgaacgtgatccaagaaacgaagctcgtcaggcttaccttttccacagacttgtattttctcagcagtttatgggctgtcttgatgcctattccttggatagaattgatgtagtcacatccagagagaatctgtgaacgtcatttcgtgagcagacctaccgttgagtttctgtcttacgaaaagccaagaagagtgagagaaataagagaatgatatgatacgactgacggccatgtgtctgaattctccatcaccccaaccgtcgaatctccattctccccctgctcctccagatccgtcttcgaaaccaagagtttcccttctgatttcacagcatttcccctctccatccaacttgaacaagatctttctgcatccgaatacgagtagatcagaatcctcggtgatgataccatcaacgtatccgtgaagctcaaggtaggcgagctgcgcatctgcttcataaggggcaacgatatacgaaacgtcttccgcttgaagagcctatgtacgttgacagaggcaaaaggaacggagacggcagcaagcttttaagtaaaggaaggacacagcacaacatcgtttggagaaaagaaaaaaggactaaacatactttgataaactgaaaagccatctcaggggtcacatcaacacatttagtaaacatttcacgggcatctttcaatcggccctgacttcggaaagatttggccttctctaaattatctcgtcgacgtctaatgttattggtagaatatcacgaagaccaaagcttccttctttgttagtgacatcctacaagatagaaacaattcggccaaggggaagatcctgataatcatccctgagtctgcagcttacttttctctctcaacctcggttccggcctttgctggtaggtatcctccgtcaaatacaaggtacggtttgattccatgatacttcaggagtcgaactttatgcatacaataatcgacgaatctagatgaacagtaaagtcgaacaaccaacccaaagaaaaggacggttgatcgttagtgcgtggacgtcaatgatatctgtccagtaattacggagtaaatctggatgaatagacagagaactgactttgtggtctttcggccgagcacaaggtcttcagcgcatccgaacgctcctttgtgcagccagacatatccctgatgtattagtcaataagactcaagatcagaatacttttcagcagtcaaagtcgtgtgtgtgtcgagaaggggacaaacatctacagctagactgatctcgataaggcgccagagaggtcgatgagaatgaaacggtcattacatctagcttggagatcgagatttaaagaaataagggcttacgtttgtccatggtagtctgaaaggtctctccatgtatgagcggttttgagcaactgaacgaatgatgatcgaacaaatgtacgcgatcaatcttcaccggtcagcaccaaggttttctatccaaacaaaccagccgaacttacagggaggagaccttgaatccccatggtattgtgttattgactctatcaaccaaggactgatggacctgaaacaagaccttgtacgttctcaatcgtcctctttccttctttctttctttctttctttaatatcaatctcttggacgcgtcaacgcgtaggcttacatccattacgtgaaccgcgaggaaatccatacaaattcgaaccctgggattttcatctaacaccacgatatcacgacattacgtaacaattgatgaaaatcgaatcgaatatatgaaattcactgaaattcagattcgttctcttcgtgagcgaaatcttctggcaaaccccaccgtttcaaccactctcactcacctttcaaccttttgaactttctttctagagtgagttcttttcattggatatgaagacgaggagatggccatttgatggaaaggagtgaatctttacggtcgggatgactaaccatatacctctaatcttgtaattctcctcactcacctcactgtcaagagctttcgaaaagatgaggttttacgtcgacaagtaccccgaggtggacgacctcgtcatggttcaggttaagcagatcgccgagatgggagcttacgtcaagcttgtaagtgaccgcttctatatctggagttgatcaagtcatgtacattgggcaatcaagactagagctgcataaagaagaaggccgtgttgaaagatcgttacagcatataatggagcgagggaggaggtgcttgaacgatacacaagtgtgcttgaaaaagagggagacatatgctgataaatctttttcttgaatccatctcagctcgaatacgacggtattgagggaatgatcttgctctccgagctttccagaagacgtatccgatctatccagaagcttatccgagttggtcgaaatgaagttgttgtcgttcttagagtggataaggagaagggtatgtatgatattgcatcttttcaaactacatgagtcgctgcgagttgtatgccaggtgtataagagtgcttcagagctgactggttttttctctcactttctgatcttcaacttttttccccatcatcaggatacattgatttgtccaagcgacgagtgtccgctgaggatgtggaaaagtgcgaggagaagttcgagaagggaaaacttgtcaactctgttcttactcacgttgctggaaagctcgagatggaagtcgagacgttgtatgccgagtgcggctggcctttgggttccaagttcggacacacctacgatgctttcaagctttccatcacgtaagtgtattccccttccttctatccatcagtcatcatttcgttgcggtcaaagtgtcttcacaagttatttgcgactcggtgagattgctaacgcctggacctttctgttgtcgtctctgacagtgagcctgaaaaggttttcgagggaatcaacctccctgctgctaccctcgagactcttcgggagaacatcgctcgacgactcacacctaaaccggtcaagatccgatccgatattgaggttaaatgcttcgcctatgaaggtattgacgccatcaaggccgctcttaaggccggagaggctctctcgacagagtctataccgataaagatcaggctggttgcccctcctctctacgtcgtcaccacaaactcgactgacaagagtggaggagttgaattgatggagaaggcattgcaggtcatcgacgaaaagattacagaggctggcggagagatgagcgtgaagatgaaggtatgtttttatttcttttggtaacacatctaatttctttcaaactcaagattacatgactaaacccctactcttccatttgtgctttgtttcatctttctactaacgatcagcccaaagctgtttccgaggctgaggatcaggagttggctgctcttatggctaaggttgagcgagagaacaccgaggtatctggagatgagggagatagcgaggaggatgagtaaattggggccaattgttgtctgaatgaagcaagaagatttggatgctggggaacaaacggaaaaggcggctcttctctagcttggagagttggcggagcgctctctgtcctgttttagaatactactatgtagctggttttgcctctttttaaaaaatcaatgtgatattctctctgcctctgcccctctgtcttggtctctatactgatactggtaaggtctactgacggacgaacagtcttcagggaagaaggttaagtgaacactgagcgtttgaggcgcaccaagagcgcagcaacgtaggaaggaaaaacaaagcaagctccctccgtgtttgttatgatgaactccatcagacaaacctcatttttcaacctcacctctcgttctctttctttgtcctctttctttgttgccatttcttctttcccggcctagaccgaacagtctctcgacgacctccggtcttggcctctcagcagacacaagtatcggttcagcgtcaaacaaatactaacttcaaacttcgttacccttggatcatcgttcatcctctgcgatcatacctggtttaccaacagatacccttcccttctagcagtccttatatatcgacatcatggacgatcaacagagctcatccgactctgcccgaccgtcttccgctctaccagcataccaagctagactccttgacccgaagtctccctctcgttccggttccagcttatccctccgaaattcatttttctcccaatcgccaacgaaaactgatttgtcttcaacggccagatttggttcacctgttcctctgtctccatcaactgtcaggctgaacactttcacgataggaggaaacacagagagggaaggtatacgaagtatgcaccggtctgggagcaagagcatggatgccactagaggattttgggtagaccaagagaaggctgctgcatctgaggccagagagtttgatcaacaggccgctcagttgaaaggtaacctccacggccttggtctcagcaggaaacctagcttcatacgctctcaacaaaccgggaacagcgagtcaaacgcttctctatcgtcacgacaacaggcgctcgagtctcatccagcggattccttcatcgtatcgaccccaccaagtccttcctctctatcgaataatcatcgatcgagattcgagtcgacttcctcttcctcaagaagcgatagcgctagaccggacagtcctcagtacattcgatccggttcccctgcgttatcgtcctcgactcagcacattccttcaacagcaacctctaacagtcccgctcatacaactcgaaaattacaccgtagggccaattcagcccaaccatttactttccaaccttcgaacccttctgcgtctgctatgtctccctctccgtcttccttcgccatagctagctcaaacaaggttcctgttctgaccagacagcttactggagactctgaaagccggttcttctcgccgactctggcggcttcggctacctctcctttaaccagcagagcgcatagttttgatgcgtctgcctcaaatccgactgaaacttcggatttgactacctccaactccaacatcagttcgacatctatctccaagggcgcaagaaccagaccacattcgttccatcaggacttatccgcaccccttcagtcctcatcctttggcctctcttcgccttccgtcgagtcgccttccatcctgccccctacgaccaattcttattcaaccatgccggtcctgcggtcttcatacgcccgggcgaaaacgtcttcccaaacatctcttcattcgacttttgttacttctcgaccggaatctccttctatcgaacagcctgtcattccagcctcgcctataataccttctatcagggagcctcttggtccgagacgaggacccgcctcaaggttaggacgacatatgcctagaattgctagtggagatgcgtttggatcggacgaccagcaaggcaacgaaactgaagaagccgtccccagaaatagagatacccttaaagttgataccccgaagagatcgcagtgggcggataaggacgtaggaagcatacggagtgtaggcgaaggagacgaagtcatcggtttgtccggctcttctcctttcgtatcctggcagatcgaaagtgtcagccactaatctcagttggcgtttgtttaacaggaatgaaaggtcgtcggagactccctctaacgtcctccttattgaacagcggttcgacttactctttgagaatatcgaccgctacgattgagcgaacccggaaggaggtcatcgccgaggaatatttaacgcgcgttggagaggctcttcagtgggttgaaggtgtcttacaaaaggatcttggattcggaattgttgagttcgaggacaatttgagggatggtgtcgtcttggctcgtatggcagaatgtctgggcgccaaaggctcgatttttgaggtatgtctcttcaaccatgagttgttagtctattacggcacggtgaacgtgatgattctaatgtatgctcacgtcgaactaacttttgattcgattcgatttaaacagcatcctagacttcaatggagacattcagacaacatcatcatgtttcttaattttgcaaaatcgcctatggttgggctccccacgagttttacttttgagacgatcgatttgtacgaaaaaaagaaccttccaaaagtgatcttctgtatccattctctcaggtcagtctactcaactattgcctgtttccccttctgccaatccctcttcttctgagatttacatgttctaaactcttgaatcataaacagtcacattctggccaatcgaggtttagtggaaaagatcggaaatttgaagggaaagctgaacttctcaggcaagtcttacctccaatatctgatcttacctcaatatcatgttgctcaccatgtatattggtctcatgtgttggcctgcagaggctcaacttcagcatgcctcaaaggggttgaatggtcaagccatgccgaactttgccaatataggaaaagatttggcgcgagaaatgaatgtcgagcccccaaaggaaaccgaagaagaaagtaagtcgactcgcacatgttgttcttcaatctactatatttagctctcatttggtcgttgctcgtctattttcagtccaagatcgactcctagatgaagcttcttcatcaatcgaagctcttcaggctcatgccatcggacgactcgctcgactcgactatcatgactttctatcaaccgtccatgcctgctctcgatccacatccactcttcaagctcatctccgaggatctttggctcgtgtgcggtttgcaaaatctttgtctgctcgagggtcccaactagagcctctcgttcccaccattaccctgtttcaagcgtctgcatctggtgctctgtcaagaaaaaggatcgacgcatgccgtaaacagttcgccgcttgcgatagttcagtcaaactacttcaagcccatctggtgggtgtgcaaactcgaaagggctttcacgaatcgaaatcgacagtccgacaacagagtcaaattctcagacaatttgtggctcgagctcagggggcgctcgttcgatcccgacgagcgaccaatgcttcttctttgaatcagatagatatctcatccttcattgctcactccaagggtgttctcgctcgaaatcgattctacgaccagatggatctcctcgacgctatcgatattgctggtttcgtggctcatgcccgtggagcattgatccgaaagacccagatagccaagaagaacgctctcagtagcgtcagtataagccagggcctggtcgggttcagcgcggttgctcgtgcaaagttggctcgaaagcaggttcaagccgttcaggcagatttgactgtagttgttcctttgatctcaaacttccagtcgcacgcgaaggctcttcttgtccgtcgaaaccatcagcagctagcttctgctctcgccaacgtttccactgtttcatcggccaccggtacccaatccattcttcgagcggccctctctagagctaggaaaggagagcagaagaaagaagttgagttcgtcttgccgaactttgtgagcttccaagcgatggccagaagggcataccagaagggagagtatgagtggtggagggaccacatccgtggtgcagatatagttgctgttcggctacagagcttgttgagaggagccattgtccgtcgagatttttatggtcgactatcccacttctatcgaaatacagccgccattgtccgattgcaggccatttggagaggaaaaggtcctcgagaaggcttcattggaatccggctgggaaagaatgtcaaggtctctactgtcaagaatttcgggcatcttttggacgacaacgatagtgaagttcaggatgaggctcgactcaagactttgaagataaatgtatcggaaacctaccgggaaactcagacccttgagatcgaagccgaagaactcgatcagagcatcggtttgtttgctaagaacattgctaatcttcaaagtcgaggacggtcgagtttggagattcggccggttcctacgtttgccgatcaaagcgcctcaaaagaagccgattattacagcgcaatgcttttagatccggaggccgagttgaaagctgaatgggcgagagcgaagagattgattctggctgttctccgaattcagccggacaaggacatcctggcttcgttgatcgcaccagtagaggacgaacatctagacatgtggcatgaaatctctcaacaaaacgcgcatgtcttgcctcctcgccctggtgaggaaccgggttacaacctgaatgatattaagaagtaagtcaactcttccctctttaccttcttgcagtcttaatctttcgtttcccatagtcttcactgattcacaaatcttgtttcatatcgctacatcagtcttccatacgacgaagtcaaattccaggctctaagcgtttgtcagcaactcgaaggagaaggtattatcacccgggccgatggctatcaggcaattcttaattcaatcgcttacgacatccgaacgaagaatcgaagacaaattcagagaacccacgagttgaaatcgatggaagaaatttttcagaagctggatactcgaaagaaagatctggaggaacagattgagatttacaacgcgcacaatgctcagagtatttcaaacctgcagtcaaagaggttagtttagcttgacatgtttgttttctttcttttcgcgctgacatgttctcttgatacggttgtttgccatactcgattcttgacttatgtcagcaaacgaggctctgtcatcccgttaggtaaacagtactggcaccgaagaagcttgcaacagagtgggctcatgcctcgatatggttcatgggtgtatgaggccaaagtactcgtacgtcgctacatctcgatctccttgactacgaacttctttcttcttttcgcgcttacttctctttcattcttacgctctcttcttgatatttttttagtacggccgaggtctcctcctttcagtcgatcagttctcgccaactcagtatgatcggctggaactagttttctcgtctgacacggctggtagtttcaatattgagatcttattttcaccacccggtcatccgaagtcaaccgtcggaaaatcaaccgtgacgatgcaagatgtaagattttgttctttggagttgatgagtcatatcttccaatcggtttcaacctgacaaatgtgtcccatttttcatttccgacatggtgattagttgctgcacaaacaacgagagcagaagaagagcatcgccttgggcctaggtgaatacaatgtgaacctgctggttgctcagttgaataaaagtatgttcttgatatccatctccgttcttgcccttctgtttacgatacgttgtatatacctcattcatcgtgacggtatgtgattaatcgagcatacgctaaccattcatatgatgtttatcaccgccaataacagagttttataagaactgagaaccttgaggcccgcttcttcccatagcttgtttgccctctataccagtcatcttccttgcacgcgtttatttgttccttctcttcgctcatcttgttcctacatgatctctttttccaactctcttagtgctagaataaccccagcgtttgtttcattaacccttctaatgacgttcctcttttttttctcttctctctgtatcttctgtttgtcctcttcgagttatcgtacttactgactgtccgtcttccattgctcttccgtctgttttcctcctttttccttcttacattttccttgatagataaacctaaagacattataccttcttcttcttcatgtctcgtagcctttgccgttcgatccggtctgatgtgatcaaactttattatttgacacccaaaagagaagcagaagcaacttctagagaagcaaccatgagaaggaagagggaacagagacaagcagctcattttatctttgaaagagtctcctcgattgcctttaacatcttcggttcttacgcagtcgcctgtcgagcctgtcgagcctccaaccgagagagctctcgctccttcttgaaaacctttttctctgccttcaacgttgcgaggaagtctttttctttgacgttgaagttctcacccaccaccggtccgcctgcccgcctagcatctcttccagcctcccaagcgtctttactctgatcaagttcctttcgtagggcgacgatctccgatcctttatgctcccagaatgcctcggcctcctcagtccaccgtctgaatcgaatggtgctgttcactctcgatcgctgtcgtcgtctgttaaggttcgagtacttcttgagatcgagtgcgatctgagccctttcgggaagagccggtcgcttatccatcgatggcaggccaaacttcccaggaatcattggtttgacctttccggccgaggtgggcaaaggattggaagcccacttgtgaatggtcttggccaaagtgaccgaacgggtttcgcctaaccttgtggttcggagccggtcccattcttcaggcatattctgaggaagaccgtcctcatctactcctcttgaaggaagcaagtttcccttgatgttgagtgttttcagtttgatgaactgaggaacagtagggaatggtatggcgggaacaggcacattagggtggaatttccagtagtgttcggatttgccgtcggaagcgcgctcgcccttcttaacaaggatgttcttgatcacggtactcttgatcacgcccgctcgctccaagtatgggagaagatcgtttttgaggaagctacaagaacaaaagggatcgttatacagcagaagagagcgaccgaaagggagagatttttccccgtaaagcagagttccaagtttagaaatccatgaacaatcacggagaggatgcaatggagaaaaaaaagagagagagagaagatactgacttcttcgaaggaacaggatggcccgcatacggagcaggattcataatcggcggcaatctgattccatggagcttcctgggcttcttctccctcctgactcgtgccgcaaccagtttcttactgatcgggtagagcttgtggatggtctcatagaggtcctgggctgtcggtctagcctctgctcgaagccgaagagcctcaaataccattcgagatggatgagggtatttcataggagtaagcatggctatgtgctgggtaacaggaggagggacaaccgtttagaataagagctgccaacagatacgatcgatgggctcctcgtcgtcgttgtcgtcgttgtcgtaagtattaagagttggaagagacgacgagaagagagggatatttgaaatatattagacttaaatagctagttaagtgtcagttgagccctcctcgtttttgccttctctctcaaccactcaaacactcatcgtctccttccagctctgcttcgttccatcggtcatcgttctatccaaagccaacatgtctttcgtgagtggccgcctgttttatccagtgtatcagctactcttttgaaaagaaaaccagctgtttcagtgggagagaatcgccgggactagcttgttgcttattgcggctccttttttttctctctttccctcttttcttcgtatccttctaaaccgacgacaatgatcctctgcagacccagcctctccgaatcttggctcgttcgtccgtgtgccgaaagcctgctttgcctcttgcacgatggtaagctttttatactcctcggacgcattccctgacggcttgttttcctctacagccgtgatcggtgatcggttgaatggctgcacctgctcgtttaagccaaaatgctgaagatcgatatttactcatgttattgttgttattgtatcatgaatccatgggtttcgcagcgttcgatccctttcaaccactgctcctcgagcctcgacatccaagattgacagcattgtcgacaacatctcgtcgctaacccttctcgaggccgccgatcttgtttctgccctcaaggttcgtgccagaagtctaccaaggtggtctatgcacgcagggacctaacgacagtactgatcactttgaaccattctgttgatcgcctcgacttgatactaacagacaaagctcaacatcacggagattgctatgcccgccgccgccgccgctgcccctgctgctggaggagccgccgccgccgaggctgagcctgaagttcgtttccacttgtctctgagttttcaaactgttttctgaatgctaagcatttgaaacctcggtaacttttgtaggagaagcccaaggagaagactctgttcaacgtcaagctcgagaagttcgaccctgcagccaaggctaaggttatcagggaggtcaagtcggtgatgcccaacatgaacttggtggaggttcgtcttgtccctagtttatatccgaaagaacatggaagaattgtgaaggagagaaattccgaatggcatattgaattggacacattgccttggtgctaattttaacattttactgacgtgttgctcttttttttgtcattgcatcgacacctcctgtcatatcctggattatctccctaaacatcacctatcggtactttgctctcgtaggctaagaagtttgtcgagtctgtgcctcaggtgctcaaggagaacttgtccaaggaggaggctgaggctttacagaagaagttggtggagttgggctgcactgttgctcttgagtaattgggaaggcttgttgaaattataaaagtagcaagttgttagggaacccagctgagcgcgtagaacgaaggctatgtgcaagagaaagaaaggcatattttatattattctgtttgtctcgaactgatgtgggtcagaatattcttctgaacagcggtcctactcgaagaagacttgcaatcgagcgcgtccgtcaaaagcaatcgtcaatatagcaacaaagagagcgtgttagaaagagaaacgaatggcttggaagaggaaaacgctccgctcgagagctgtatacgagacaaagtcttggactcataccctcctccactcggcctcatctttctctgcaccgttaggtgttcaaacgttcggtccttcttctaaattctcttcatagaccctctgaatgatatagcgcatatgccaagtgatcttcaacgcttgagagctcagacatacatgctagcttcaacccaacacatgaaggcggcctccggcgatgcatacatatgtgatccaagaggctcagcggttactcacccaaaatcgttcaacctagccaagagaaggaaagtcgtctgtccttccggtccaagttccatcttaccttgacccaagatatgttgctcagagcaaccagagcgcttgctcgcctccatcgcgcgcccagaccatcttgtagctcggcaatcctatcgagatcgctttggacaagttcatctaactctacagtcgctggtaacccccttccgaaacacacggaccacgcatggtctcctacaacccttgcggaacattttgaccgtccggtttcgtcttctcagtctacgtcttcatcaactcttgaacctactgggattttcaatcagcacctgctcaaaaatcctgctggtctccatcaagccgctcaacacgttcaccaaagagctgtcttgctcctccaccggattcatcgagcacctgaggcagggcttggtgagctccgtctggttgtcaagaattttgatcggctgagcgacctattatgtgggatcatcgacatgtgcgaggtcatctggacggttcatcccgaaggagaatggagaaatgcggctgaggaggtctatggtgggctttgtaggctgatgaacgaaatgaatgtcgacacgcaactctatggcgtaagtgcttatattcactatcttcagagttcattgtgcgggctgaatgaccgaatggtgttgatcaaaatatccatctctttccgtttacgtttcgtttatacctccttcctttttgtatgcacaggcactcaaacaagctgtggagacgccgtcaatcgccgcttcttttactcctgaagaacggcgcactgcacaagtgtttctacatgatttctataagtctgggatccaccttgagcctgcgtcgcgtgcaaagtttgtcaatctgagtgaccgactcatcaatcttggccggcaattcacgacatcactctctaatccctcatctcctgctatcctgccaaatgcagagatgctccgatctggtctgggtgaatcattcgtcagaagggtgaaacctcggtttggtcgaggaggtggcaaagtcaaaattcaacctggaacatgggaggccggaatgatattaacccgggcggaagacgaggaagcgagaaagttggtttggatggcaggagtgaagagtgaaccagaaagagtagagctgctggaggacctcttgagagtcagggcggagaccgctggtttggttggtaaggcaaactggggagaggtagatgcagagatgaagatggctggaggaccaggtttgttctctttctttccctctacaatgtcttcagatatgatcttgacgaactatgttctctctcactcgtttgttgtcgctcatagaccaagtcacgagtttcttagagaaccttctccgcgcaaatcgagcaagaatgacttccgagcttcgccagcttcaacttcttaaagctaagcatcttgcatcctcaaccacaccgtctctccagccatgggaccgagagttctatatcaaccagcaccagagccaggtagtagagcgtgctccggcattggaatccctatcgccttatttctctgtaggtactttgatggctggtctatcgaaactgtttgatagcctgtacgggattaggctagagccagcgtcgatagcgcctggcgaggtctggcaccctggcgttcggaagctacatgtcgtcgatcacgcagacgaagcgggcgccgtgatcggaacgatttactgtgacttgtttgctcgacagggcaagactggaaatgccgcgcattataccgttcgctgttcccgacgggtggatgatgatgatctccagggagatcttccgcctggtcagacagattggacttttgatccaagaggtgggctgaacgtccagccggcagcaagtcggagaagagagggattgtttcagctgccggttgtcgtgctaaattgcgatttcggtgaggaatcgaattcctcgggtggattgaccttattggcatggcaggaggttgagacattattccacgagatgggacatgccatgcattgtatgtcgttcatctcatcttcttttctgttgtgaatccaaagctgaggaccgtttctttgatcctcctcctaagctatgattggtcggacatcccttcacaatgtttctggtacccgggtacctaccgacttggctgaattcccctcaatcttcatggaatccttcttttcctctccactcattcttccctcgcttgtcacccaccatagtaccggtcttccgccaccatcctcgctcgtccgagctcatcgggctcaacgcacccagttcccctcgcttgagactgccactcagatccacatggctcttctcgaccagcgacttcattcaatcactccttcttctgacaggtctgctgttgattcaacaaagatttaccatgatgtcactcaaaaggtcgatttgataccttctgtgcctggaacggcgccacaagcccaattcggtcatctgcacggatatggatcttcgtattacgcctatctttttgatagagctattgcaggaagagtgtgggaccaggtgtttgcccaaggtggacaggggatcgatggcttgaaggaaggcggagaaagaatgaagagagagttattgatgtggggtggtggaagagatccttgggagatggtcggtgggttgctaggagatgaagagatcaaacagggtggaaaggaagcggttgagaaagttggcaggtggggagtgtcggatgaaagatgacctttttctctgccatcttttctttcttttgtgttctggttcagtctttctctcttgcgcaggtctggtggaacactcagataagaatagattctaagaaattcgatagcaaaacatacaactaacggcgataaacgctttgctcttccactcgacgctcagtctacaacttggctgactgggttgtcttgcccatctacctcaataaatatggagttctcaaagaaaatgatcagccattgtcgagggaaaaaacggaaaaacagaaaagcctccgttcaagaaagcaaaaggaaagaacaaagtgagttcttgcactaacatggggctctcgaagagcggctacacatgtaatctccacatccgttccctgtggcagatccttgatctaagtgaagaaaagcagcttttgatcagaatttcgactagccggaattaagaaagagaacaggcgttcagagtgagtgagaattggcacttacaccgatgcatgttctcgaaggtggatccgttggaaaaaacggggtgtactaaattagtatgacatgagatttccggagataccatcacaggtagatgatcagtgagtggaagacgtatgttttttttttttagctacggaagaaggaatataagatcgactacggaactgacagctttattcatggcaccgaaatcttccacatagttactcaggtagattgtggatgacaccactgatgaaatcactcccatgtaaagcacgtcagcgcattcgacagagatgagaacccctccaagtctcttgacgcatcaggagagagagaatggagctcaccatcagaaagaccaagtcctacttcaacgagtctagtcttgatgttctccagagcggctctggctatcaacatgtcgaacaggattagatgtcgatcgctcgggattgtaacgtgaatgaggtaagggtgacttacttcgatcagacacagtaccatctgtacctacgccagttgttcccgataggtagtagagtttcgctttaggagccaaaatgttggacgaaaggaacggagggactgcgcctagagaggggaccttcaacactcatttaattataagggtaaatcataaatatcagttcttgtttgattcgttttcttcttgatgacaggagacatcgatgtacgttgatgggaaccctaacgcgctgtccagaaccatcattccgcttcgctgcgatgctacggatcgatttgttagtagaatggaatagaaagagaaactatgagcttatatctcgatcttcatattaagcttgatcatttgatgctaggtccatttcaagatatgtatcgacgtaccaggtaatctcgacgtctgttccgccaggaagtcgctcgagcccgatgcaagtccgagtagggaagggagatccagtggtgaatgcttgaatgtacgcttgattcatcatgttctgtgttgatttccgagttgtaaagagtttgagttaagaagagctcaacatcaagcaggcagtaaggaatcatattgatagttgatagaaaccacacttacgaaatcttccttgtattttgttagatataccgtcgagcttattacgtcctccaatcctagaccggcttgctttagtaacactctgacgttccctaaggccgacttcgtccgatcgtttacagtatgggcagaggatcctccatcctcggcacattgaccagaaacaaacacgagatcttggatgcttaaagccggagataggaatggaagtgtgtccggaagttcgggactctatttttgtttagaaaccaacggggagttgaacattgatatctgaggtatgagtcgacttggcctgtacaaattgcacagggcgctgttatagcgataagtagagtaactgggcgcacggtgatcttttgaatcggcccgtgagacttctcaacagcgatgctacatcatagagacacagtgcaagaagaaaagttccgagtgagtcattcgagactcaagcactgatgcgaaattatggagttcataccaggtaatctcgacatctgttccactaggaagggcagaggcccctacgcaagtcctagtaggcttgatatcttggggaaatgcttggagatactaatgacagaggataacgaatgagcttggagggataaacatgagaaacataaacaactttgtcactgactgcttcattcagagaatcgtaatcctgtacgtattttgagagatagacggtcgaggaaaccactgaaggtttatcgatgtgtcagcggagcgagaagaaaacacaagaatgagatcgaagatgtaatggacggcgtcaaagacgatatacagagtacgaaccatcttccattcctaggcctcttgcctgaagcagactctgtatcctcttcaacgccacggttgctctatcctttacgtcaccctggacaaacaccccttgttcgaccccacagctaccagagacgaacaccagaccagatgcggcgatagccgagctgaggaaggaaggcgcctgaccagcatacgaagtcttccaaaccaggaaataaagacgcacgttgagcgagacacgagcagactgtgggtttaaacatagaactggaatccttactgagaacgatatcttgtttggcatattggatgattggttgcgatgtgtgctctggtacatgctctctgggagcatctaagaatcgctgggggttacacacctcgccgtggttacgcagcaaaccacggcgtaattccagtcggctagatccggcgatgtttcggcccggtctaaacgccagtctaacgtcaggcttcggagctgtctcaaacattcatctttggaatttacctgcctcttttggtttctttttcgttgttcttctcgttttcgtttcattcttgtctgctctggcttctttcttcttccgtttctataactacctcactctcatttggttttcttgtcgctctcattctccttttaccatctcacggttttttttctctctcgtttctcaagatgcgcacccctctttccttggttctcagcctcctcatggccgttacttttgcctctgcattctcccttcacccacgaaccggtcggccacaccaaggcgcaaatattcgagagctgaccagcaacatccgagcgcgggacgctcatgttgttcccgatagagatagtttcaacactgcaggtccagttagaagggtccgcaaaagggctatctgcaacacatcttcttcgtcctcttcttcggtctccaggtctacgtctacgctttcctcgtcctcttcctcttcctcttccccggcctcaacctctatcaaacccagttcttcttcttcatcgacgtcctcgtcctctagctttacttccaccgtcaagtcttcgtctgccgctgctaccactacttctacttctactccttcctcgtcttcttcttcttcgcccacacctgtctcaacttctacttcaaaatccagttcatcatctgcaaccgcaaccccaacctctacctcaagcttcatcacgtcatcatcgtcttccacttcccgaactacctctacctctacctccgtgtctagcgcgacgaaaaccacgacttccacaagctcggtatacattgcgactgacgtcgcgtctgtcatcgctgtatggcccactgttactcagtcaggaagcagcccttcagctactgtaacttccaaagctggttcgtatctctcgcatattcttcactctgcgttcttgcccgctctctgcttatgcccatatatgccgatgccaataatttgtgtcgacactgggcctggtctcttatttgtttcacagatccatacgcacagtcactttcatacgcgctcaataattctgggaacaccttgttcacgaataagcgaacagctggagatctcacatactagtttgttttctcttgagcttttttttggtattctatgatctagatgctgcaactaaccgccaacctctctcctttgctttcttagtgagcaaggtcagacatcttgtggatctgtctatgatgatactacgtttaccgctgcggtttcctcactcctctacgacgcctggtttgtcgttcttactcttcatccatgtgttcctcaacatatcaactaaaagtcccctcttgtctattctttctcaatctgaactccatcaggcctggggcctcatccaacacgaatcgaaacccgatctgcggcccgttctctcctgggaggcttgacttgtcatccaatgtcaaggtcgcgtccgcttatggcagtgtgatgattggtggagatggtctgcttaactgtgtatctagttcgatgtgccgtgagtcctcctttgcttatccacccttcgctatcctatgtcttctttttttcctcaagaagaataagcgccgttatatctgaccattgctttgaccgatgtgctatatagatattccactaaccgccacgttgacatatagcgggaaatccgcaaaagtcctcatcgttgaccgatgtgaaggatgcgctgtagatgatgttcgtcattaccttttccctttcctctaagaatttcacttgaccgtcctggatcaatcgctcacttgctcatctgatcaattttctttcatacttgatggcacatcagattgatgtcacgccagctgtgttcaaatacctcactggaagcctcgatatcggtcgggtttatggaacgtccggaacgttctcttggtctttcgatactgctgaatagataaaacccctcatcgttccctttctccttttctctctgtagatgcctctgtgaggtactcaactcgcccctgtcctactgctttctctttcttttcttcaggatctggcttatcctatcttatcttcaccttgatctcaatctatctatataccaagcagaaagaaacttgatgttcttctgtcgccttctgtatgctcaacgaatattcatttaataatctataaacacaagggtatggataaaatgcgcctatcacatatctatcgtctccgatctggttcgtcgcgatccattatgtcttacgagcttttctcatccttcgtcgagggtgatgatggtgatgaaggagaactagccagtccatccagctgtttcttaccgacagagtattttccaatctttgccagactgtacgctaggcttttcatcggtccggcggtgatgatacccttgatggattgtaagagtgctggatatcgagtgatctgggatgtttctgttaaacgaatcttaatctatcagaaaaagggggcaaagaaaagttcggaaaagtcatagaggagacaacgctaaacgtacgtttgagcaactcggcggccaacgtctcgtcccctccaatcttcagccaaagttgcttctcttcttccgtactagaggattctctaggctgactggcatacttagttcggatggcctgctttaataccttgggtagtttccgggctagagacgcccggtgttccggcgaggtatcttgctgtatttcccattccgaaaagatgtgccgaacatttttagtcaatcctctgtcgattctgatggataggctttatgcttcacacaaaagtaaatgcctttaaaactcacctgaaggacatcgcccgaggatccggaaacggcaagggaaccaagctcgaccagtagacggccatagattccttggaaacggtccatctgtgcctcgacgatgttgaccactttccgagggttctctgcaccgggtatcatcatcctaggatcacctgatgaacgcgcgcataagccagttgtttaagagatgacaacaagacggcggaaacacaacttgagttgggtatattcagcctcgagtttagaacatcaaggaagaacacacctccgtaactgagcccggcaattctctcaaatagttctcgcttctcaaacttctcaggaagagtgagcagcgcaacacgcaaagccgaacatagattgacctgatgagctagtttgactctcgggtcatttcggatgatacgaatctatttataagatggatatcaaatgaaaagaagattgagtcttgaattccgggcggtggtcgaaagaaaggacgataggatcggagactgacgggcttgtgcatccgaccggaacagtacaacgtgtcccagttgatgaggtcttcgcacaacttgtcgacactgattactccatatttgatggtctaagaaatattccccctcgcccgaaagaataaacagtcgttaggaagatcagctttcgtcctggagatcactcttcgctgacagaatagaagggaaacgtttctcatggatcagaaagaagacgtaaggcgagtgaaactcacgaccccttcgacttcaacgtacgcattgtaccacacgccagcgccgcccttctcctgtaaccatgtgacagcgttggaccccaaaagcctcatgtaagctgggtaatggcttgggttctgctgcatattgatgctgtgaaagtgatccggatgcgtcgttgcaaacacaaaatcaagcatcggttttttctctgtagacttccttgcttcggcggtaccttcaacctggatattgctgtccatactagctgttccagggctgccattcgattgaggaaatattccggagccataggcgaatgcgtaccgaataggggccctgaaagacccgacgatggacgagagaacggtcagcgtagagtctggaagggagaccatctgattggacccaaagtttgccggaagtctggtggatgatctatccggttgatatagagaataccggggctgggttctcgagttgggctctgcattggagatgcggctcgggctgggtttcaaatgagtttcggttttgctgaagaagcggtattgtgagggaaaggaggtcgagggcgaggaaataaccccagaagaaatcagacggcagggcctgagtgtgtttccgggcgacaaaagatgcttggatctgagcagcatggtgtaagtacgatgagatggaagttggagagaccgagatatcaaaaagagaaagaagatggggaacgagtgaacggcgttctttccatttttatttttattctatttattttatttgcgattttcacttatgctcttttctccgctcggccggaagcatgtcggccgtaagttcaacagacccctcattccgagtccgttcatcactaggccaaagaaattggtacgcattcgatacattcacagaacagctaacatacctcgagctggtcgagaagtactgtgagatatacctcacaacaggcagaaggtgtcatcctagatctctgcctccacctcactcctccctttacctccgatggctcctcctaacttgtatccactgaccttatcccaatcaactttctgacgagtaacagggagagctcgtcgcagcctggttcaataacatatcacacaagtcgaagagattccatattagtacgatcaactatagtggtatgccataagagtcagaatagttgacgagaagagattaggacaaacgatttgaaggtcttgtctcctagctcctccagacgctcattggctccctcctgggagagacgctcgaccttgctgatctcagatatgatggccgcggcttgcgacggcccgaccggcggaagcgcgatggtaggtgtttggactgttcgcaattggacctgtaatttcgagagttaggtcgtcagcctggaagtgcagtcagcgacatgaagaagaggttcgcacgtttccttgctcataatagtgaacaactgcctggatttggccaatgaatgactctttctttaggtcaatgtcataagacgagcgccaacgaccagtcctaagtatcaagaggaaaagtgacgataatgcaagcgcaaattagtcaacacagatacagttggttaagcaacagaacattcaggctttcgcactggcgacttatgagcaagacataccagaaatttgtgggggagtaccggtgaccggatgtgacgatggtaaatttaccttcatcaacgcctaccgaacgacccgctggaacaattttgactgggacagcagatgattcttccttgtctaaagcagctactggaacatcaggcccctcatcggccacgtcagtggtgttggtctcctcctcttgattcacctgttgctcttccttcacttcttctttctcctctgccttctcctctttgacttcctttgtcgcttctggctcttcagggtcgacagactccgatacctcttctccaaccccgctcgtctccaagacactcttcacgccgctaacgactgcgtccttcaaagtttctaccaaccctggctcggcctcctcggtaacctctgccttgtcgttctgtccgtccaagatatcttcaactttttcagatgcttcctgtgacgacgagggaatctggaattctggtgtagattctaaaactggcgtagactcaggcgcagaggttgctggaatcggggttggatctggaaccggttcgttcaacacgagcgaaggaaagatgcagcctgctccgttactgtaatgattggatatataggtctggagaggcttttcgaatgatgcgctaatatcatcaaaaacgaaatattaagaggtttactcatgacacactatacaatatcaccaacgatgaatgaatagaaaagacacacatgaaggaggttgtatctttgggtagatctagaggctgcaaatctgaagcggtcttgatgtaaacgattcaagagacaacacttagtttttctattcagatgttcactcaaaaaagtttgagaaaactgagatgctcaccaaagagatgtgatcgaactcaaagctctgcccacttctcggttcgtagtaccgagatggctcgccaggtacaagcgccgctggagcgaccaaggtctataggtaagggagaacagttagtgaaataaataagtaccctatatttacggatcccaggaagcaacattgaccaaagtggtcgtgagttgagtctaaagaacctgaaggaaggagaaactcaccttgtatgataaacctggaacatcaaacgccacgaactgatcgtggttgtagcttttgacggctggtccaacggcttcgtcgaaagccttgtcatcttgaagcaaaagtcgagcatctgttcgcatcgatgataccaccacggtaatataggatgcatacaataacgacaggatcaatacaagctcatcttggctgacccggtgatggccagatcagagtctagattcagaggcagatgtgaatgagaacggaccgttgatgacatcgttgatctcacccggtggagcttgtcggatgaggttagaaaccagagcgactcgctccacgacagagagttgagggacgtcttcttcttcgtacatagattttgatgggagtgatgcgatacggctaaacaaggtgttaagtggttgatggctgtagcgatgctggtgatggaaagatggcgatcggtaattgtactttgattcgtagccgcttctttctgtataaccacaacatcggtgctctctcccttactcttctagttcttcagctctctcgtgagctcgttcagctctctcgctcgaccactgctgtcagttatggccaacattgagcaatggtaagaaccgtcttactatctgtcactggtcaagttgttaatctcgcgctaatcgaccgtttcagggtgatggaaatccctcctataactaggttggtttgatatacacatacctgttacctctatgccagcatttatctgacgatcaaacatctgttttgttctagagcatggatcatagcttcggtggcgatcagtgttggagtggtcagtcaatccgtatcgaattcgagtgtatgactccactctaagctaaacctcattgttatgcgccggctgccagcaatgtcaagtggtctcgccttttcatctatacttctcttggaaagcaacgttcggacaccttcaggtgcgtccagtcttatttcgtgactcggatattcctggaagaggacctactgatgatgaaatactccttttgtaaaaagttatggaggctgatcagcaccttcatatactttggcccattatcaatcaagtgagcaaatcacatatgtattcttttgtgttcctactagacgatttctgatactgcttcctctcggtatggctagcttcgtgatgcgcctctttttcatgtgcgtaaatgtctgtgagatttgctacacgaaatagaagctatcgccaacgtcttgtccatgttctctttttgtagaatgcgttactctcgtttgttagaggagaattcatatgcgaaccgtaaagcagactatctctggctgttgatcgtgtgtagtttgttcctactcgtgagtatatgtatccttatgtttgcgaatctgcagaaactgctcatctacgttctgacgacatttctcgttttgtagctcatctctcctttattcaccataccaatcttgtccggttcattaggtatgtaaaataagggatgaagcataagatgaatttgtattgatatttcttccaatgagtagccttcgcgctagtctatatttgggccaaacggaacccaaatgtcagaatgagtatgttaggggtcatcacgtaagttttttcatccttttggctactatcattatatacctgtagacgtcttggaggcacgatctgatcaagaactatctacacatgcagtattccggcaccttatgtgcctctttgcctcgttggcatctcgtggattttgtacggaggaagcagcgttgttgtagtggctgatggagtaagaccctgttaaacaatttccttggtctattcactttccagatcacttactgacatacagctatctcattcgaaacctatggttctcagcttggacttctggttggccatatctactactttggtcaggacgtttggccaatggagatgtcgagctcagggaaggggctatttgagacacccaatctgctgtatgtctcactgtgtaattctttctaccttcataggcatcaactaacatgggatcactatcccgatggcccaatctcacagaagcgcattggtagacggcccgagaacacagaactagcgaacgtatcgtaccgtatgccgatctatgtaattgtttgacaacgagtattgagagtgaggtgtggtacaaatgacgtggcagttgatattagggttaatgtcactaggcaaccgatttaatctcctggtctttctctccatcttgtttgctctgacgaacgtatgagttattcgtcaaccatcactgtcccttttctctctcttctcgattgaaagacagtcatgtcacctattatagagtttctggcaaccactgtgccgggcaagctccgggacttggcctcaaatccgtctaccaactacaaaggatttgtactttggttcagctttgctatgtgggcatttgaaacttacttgatgtatgtctcctgatttgttcttaattcgcacggtcttgcttgagtggagcagttgtttgcatgtagaggctgaaaactcacgctaatacttccttgtgatcgattggtcgcctgtttttcgatacctctggtaaattaaaaaaaagtcttcgacaactccctctatactcgaagcctccccctcctcatgctgctgatctcactccggaagaaatcaaaaaatcccaggactacggccgagacaaggcatggctgtcgctctttagtctcgcctggagtcaaggcactggcgcagcgttggtctactttgacgggtttgcgaagttctgggaactctcgacctctatcgtgggtcctcaaagagaattcagcgtgagtttccccttctccctctaagcggggatcatttgaggctgatttcatcagaatgaagagttacgacaatcgtactaaacaattccgaatatgatcgactcgaactagatcatcaattcacttctttatccgaccattctgacggtggcaatgacgctaccatcgatcccgctcagtctgtattcgacctttgtcgtcgagcagcgccatggtttcaacaagtcgacatacactctcttcttcaccgacttgttgaaatcacaaatcttgactgccgccatcggtctccctctcctggccggattcctcaaaattgtcgattgggcaggggatgggtttgtcaagtggctcatgatctttttgtacgtgatcatcataccttgcttcatatgtgtgcaaaccacaattgcgtcaagtctcatccgggtttccttatttctttaaaataatcacaggatcattgtccagctgttcctagcaaccatcttccctacgttcatccagccgttgttcaacaagttcactcctcttcctgaaggtccgatccgagagaaggtcgaggcgctcgctcataagctcaagttcccacttactcatctatatgagatcgatggaagcaaacgaagtagtcactcgaacgcgtacttctttggtctcccatggtcgaagcagatcgtgatctacgacacattgattcagaagagttccgctgaagaggtagaagctgtcctggctcacgagctcggccactgggcgatggctcacccatcgaaactcttggtgatgacccagttccacctgttgctcactctatccctgctccatctgttcctctacaacccgcatttgcttcgatcgttcaacttccctgaatccactctatcaaacccacctgtggtcgtgtcgttcttgctttctcagttgatcatgtcaccattggatcaagtgttccagttggtggtcaatattgtcactagaaaattcgaatacgacgccgacaagttcgcttgtcatatcggaggagaagagatgggtgaacagttgaagactgcgttgaagaaactccatgtgacgaattctgctacgctgaataacgattggctgtaagtctgttgaacagccttgtttctcttgatcgaccgttgctaaagtatctgggcgcttctttgcttctactgggcctatacatgatcgatcatagatactctgcataccaccacaaccacccaacgcttcctgaacgactcgacgcaatggacgctcacatgaacgagtattttgcccaggaccgacacctgaggcttaagcaggagtctggcacaaagtcagagttgtaaagagaaagaagggtgagacgactatagatgggggttgtgagcgaacgtaaggtgcttctttgtaagaaggaacgagaaagatatgcatgatagacttatacaaccgcgctgtgtgtttagacgacatcaccccatagcaggcaagcggaaacagaagaacagactacaacttgatgaaacagatattaagagcaagcgaacgatccggaaataaaggaatagagagattctcattgcttgctctttccggcgttggcaagaggtccttcgacactgtgaggtcgcaagatcagagaagtggatcacatggttgagtatgtctagctccacactcgagtacagtagatacaatgagatcgaagaagcttgactgacgtttctttggtctcgttgctgcttctggcctgggaatcgacattggcactaccagactcattcgtcatttctccctgcttgcctccttgtccagggagggcgcccagtccttcgggtgcaacctccgtctgtttcatcataaccacccgcatccaaccatcagtctggtcagtttctagacaaacgacggatatcagtttccgaagagccaaggatacgaacggtgtaatcagctggctggtacggtcctgcctggttgctatcagtgcgatcagctgtagatgcagatacgttctgctttgcaggtggcttagaggcgtatgatcgggaggcggccgcctcgatcgcagggactcgcccgagagaagcgaagagtgatcgtgagaatgttcggagagacatgatgagaacggatgtattcaagacggattgtgtatgagatgcgggacgctaagagattcaagtggaggagaaaaggaagtgtgataaaattgcgctctcctgaaacggagctagctttatacattttatcgatcgcttcctaacggctatgatgatgagtggcagcagcaagcgtcattgggtgtaatctaataagagtatttgattgttatctaagattacctatggtgtacggtgatcccgcagtcagacacagatctcaccaggatctcgcttgtcgttcaacctcttctggatagatctactctttcccagtctctctcgttctctttcagtcttccttgacgtttaaacctttgtctgttacttgaatacatattggagatgagttggtgagtctggtttctagttcttctttccttatctctttgtgtttgtgatggcgtttgctgatgtacggtgctgctggttctgttcatgtaggaacgggtaagcagaattctagtctggtcgtgactatcgacaccctcctaatcctttttggttcatgcttcatgtgtgcctcttggggaacaaaagattgaagaagagcttgtaagtgtgcaacattcattttcctaattatatcctaattctctctttagctgacactgaccgcgactttggaaactgtatcggtcgttcttagtaaccgagctggaacgacgttgatgcagaagacgggtcaggttgatcgaactgttgataacgaatttgatagtgaagttgcaaagtaccgagtgtaagtcctatccatatctggcttctccagtgtagataagactgatggaggtctcgttggctttggctgggaatcctatcaggctcgagaaggagctcaactctttacacaaggatgccaagtcttacttggatgctatgcgaggtttgtgctcttcccccttgatttgcgtagcattctgttgattatccgagtgactgaatctcacacgtcgtgtttgagaaacgctagcgatgacctcgtccgaagctcgactggccgagacgatcgagctattttactctgctgcagaactcacgtcggatggagcgatggccgggcacgcttataaacgagcggtcgatgagcttgacactggtgtcggtagagaccttgttagtcctttatatcatacctggtttcatactcgacccagcggatgtatgaagctgactggttcggttggatggatatccactgatggtactttatcttggatcccactcatgttcaggatcaaccatatcgacacacagtgctcgagcctattggtagattctgttcgtatttccaaatggtcaatgccgccattgagaagaggaacaagaaggtacgtctggagagttggttcgaatgtgattcttcatcggagacgtacttgactgactgactttccttttcttcttcttgttcacgtagcttttggactatgacgccgcccgtacacggatgcgtaagctagcagagaaggggaacgacgatgtcaccaagctaccacgtgtatgtgacttatcctgtcgactttttgtacttgagctttgggaggaggacgtcttcagttagaagctcaaaaccgatttcaaccttttctttccctataatccttcccttaggcccaacaagagaatgacgaggccgaggcggtgtacgaggtgatgaactcgacgttgctcgagggattaccccagatggtggaacttcgggtaccttatttggacccgagctttgagtcgatggttcggtgtcagttgaagtttgcagaagaaggttacgaaaagatgagcggcgtgcaacggttagtttgctttgtttcgtctggatggggagaaaaagaggaaggagaaacactagatgcaagagaatggaagaaaaatggctgatgggatgttcgtctttgtggcctattagatactttgcggacaacgttagagatgaatacgcgtctggaatgttagattctcaggtggagactgtgttggccgagatgaaggatctctcgatctacggaagtggttaatccaggagtattgtggtgtatttttttttgggctccatcctgttcagccgtgcgtgttgtcttatgtgttgtcggcccaagtgtcttttgtcttttgtgatttatgtttcgcccactctacgctcgcgacacgtgaatctgttcttttttctttatgtttcacaatcttatcgtttggttgagcatcgcagtgcgaaaaaagtatgcttagatagacaactgataagcaagggcagcaaagaagacaggagtcgggaaagaagacatgaagaaaagacaagagaggaagagaaaagtaactgagtggttcttaggacccaacggacacgggcgcgtattgctgtctagtttctggctggatggctgatctgcttgggatgacgtcctgttttgatggttgggatcaaaattgtccataggaagcttgacggtcagtccatctctctcttacgaacagcatcaagaccaacacaaagaggaaaaaagatgaggagcataccttccaactgctgaatcctctaccaaaactccaacccaacctttccatcctaggtcttgcgaaagcgacgagtacaaggccaaatattatgattatgaagatcgtaaggatggcttgatctcttggcgagcctctctctgtagtgtgggtgaaggttgtagcagggagagagcaaagaggcctaatcaggatctgcctggattcgagcttgaggacgaaagtaaaaggagtagaagcgcatgaggaacgaactgaaacatctggcctcgacatcaccttcggtaccggaggtgatgtcaaggttaatgtgacctagggaagcgtctttacaaatcggcagtttctggtcctgtagcagttgtaagccagataggactgtgttagattataattgacgttcactttgaagtaagagagaagagagagaaggaaaagcagatgagagaaggtcagatcgactgacgagacagaatgcttttgtacaactagcacaggggtgttttcgatcgttcggtaggtagagagggatgattgtcgagttttggaagcagatacatttacagtatgtcagttccaactgagttgttgaggctgcattcactggttggacgagctatatgagaagtgtgtctgattagtttcgaaacggatctgtaaccaagcaagagagaacaggctaacgagtgaaaacgacagaaagagaaagacgacaagggcgagtggtctactcagcatgatcagcgagagtatgttagtttgcaaagtgaggtatctaaggtatctctttccttcctgggaaccaagagatcaaccaaggatgtaaacggctcaagccagagtcgggctagcccgctcatgtgtacgtaagtgaagtggttacgattacaaccccaattacatgcacagctccaaaccccgtgtaaaaaatttggagattttcgatcggattctttcgcgttctttcagcagaagaaaaagaaggcgatggaaaaaaaataattaaaataaaaaatcactcgaggtaattctgtagtgtcaagttccagtcagtctaatacagtcgactatcaatcgcaccctcatataccccgacacccacccaccaacacatacctaccacccaccccatctatccctccttttcctttctttcttttccctttctctttctttcttagactatacaaaaataatggtatgtcgtccgggttctcttgagtttgatgttctcgtgctgtttcgttctttgggccctgtctgttcagagacgaccggttgtgttcctatcagggctgatttttttcccttctccttctctctttcctggtattctcctttccccgttgtgcgtttttctcttattcggtcaaccaattgttgggtgtatgctatcgccaactaggcttccgtcgtcggtcttgatcttggaaacgcttcctccaaagtatgttgtgtccaagcttctagtgtatgggtttactgcaaaattcggaatacttaaattcaatatctgccttgcgtttctttcatcctcttgtctagattggagttgctcgaagagggtccgtgctttcagagctgttctcatgtcctttcgtggtctgatccacagcttaaggaacaaggaattttgactgacgtgtttaccttgctttgttcaatctctcataattaaaatcctatagaggaattgacatcattgtaagttctgccacgtcggcgcttttttttttccttccttgatctcttttgccccactatctatccccgtgccgactcgaggcgctttcaaatgcaaagaaagaacataacatctaatggacacgcttcgttttctcttgctcacaggtcaatgaagtctccaaccgagctactccgttcgtattatttcttactcttttctcttttgttttcaagcttctagctaacgtcttgttgtttcttatgccattcacagttctcttatctcattcaccccccgacagcgatacatcggtgaggccgccaagactgccgagacttccaacttcaagaacaccattggatccctcaagcgattgattggacgaaagttcgacgaccctggttcgttctcgtagttttatatttctcactctttgtcgtctgttttctgaccaaaatacaaaccacaacacgcttgtaccctcaatctcttcctcgtgcacacagagatccaggagatcgagaagaagttcatcaacgctgagcttgttgacgtcgacggaacagtcggagtgaaggtttgtagaaatcgcaaccaacttgaatcctacacaaatatatatcgaattgacacgacattttcttcctcatacaggtccagtaccttggggagcccaccacgttctctgccacccagctcgttgccatgtaccttggacgacttcgagaccaggcctcggccgagcttggatctgccgtttctgacgtcgtcatcgccgtccccggatggttcactgacatccagcgacgagccatgctcaacgccgctgagatcgccggcttgaactccctccgattgatcaacgacttgaccgctgtcgccctcggatggggaatcaccaagaccgacctccctgagtcgactgatgccgccaagaacgttgtcttcatcgacgtcggacactccaacttctccgtcgctgtcgccgccttctccaagggtcagctccgaatcctttcttccgcttacgaccgacacttcggaggacgagatctcgacttcgcccttgtccagcacttcgctaaggagttccagaccaagtacaagattgatgtcctctcctcccctaaggctatcttccgacttgccgccggttgcgagaagctcaagaaggttctctccgccaaccccgaggcccccatcaacgtcgagtccatcatgaacgacgtcgacgccgcctcgaagttgacccgaaccgagttcgagggacttgtttccgacgtgctttcccgagttcaggcccccattttgtccgcccttaaggacgctggtgtgaccgccgaggagatcgactctgttgagctcgtcggaggatcttctcgagttcccgccatcaaggagcgaatcgccgagctcttccccggtaagaccctcggagccaccctcaaccaggatgaggccatcgcccgaggagccaccttcgcctgcgctactctctcccctgtcttcaaggtccgagagttcgccgttcacgatatcaactcttaccctatcaaggtcacctgggccaaggatgacgtcgttgcccccggagacgatgacaccgagcttttggtcttccctgctctcaacggtattccttccaccaaggtcctcaccttctcccgaaccggaccattcgatcttgaagcctcctacgccgagccggagaacctgcccggaaagatcaacccctgggttggccgagcttcgttcaagaacatcaagcccggacccgacggtgagcccgctaccgtcaaggtcaaggccagattgaacctccacggtatcctctcctttgagggcgcctacaccaccgaggagatcgagaaggaggacacctccgccccggtccccatggacactgacgccgcccccgctgttgacggagccgaggccgcccccgaggagcccaagaagaagaaggttgtcatcaagaagaccgatgtctcggttgtctctggttacgccggacttgaggagaaggccgtgaacgagttcagggagaaggagggccagatgggtgcctccgacaagctcgttatcgagaccgaggagcgaaagaacgctttggaggagtacgtctacgacatgcgaggaaagcttgaggaccgatacgccgcctacgttcaggccgaggagaaggagaagctcctctccatgctccaggacgctgaagactggctctacactgaggagggtgaggacgccaccaagtctgcttacgtcgccaagttggataccgtcaaggctgtcggaaaccctgttgctctcaggtacactgagtctgaggccaggcctaaggccgcttccgctttgagggaggtcaccaatgacttcttgcagaaggctcagagcggagacgagaagtacgctcacatcgatgccaaggacatcgaggccgtcattgagaagaacgctcttgccgcctcgtggttggataacaacatggctaagcaggccgagcgagcgaagaacgtcaacccagcgatgacttctgaggagattctcaagcgacgagatgaggttatgtacttctccgccggtatcctcaaccgacccaagccccgaaccaccgtccctcccaagactgagactcccccaccgaccaaggagaagaccgacggggagccggaggccgttgtcgaggagatggacgctgatgagcttgattaaataattcaaagaagaaaaaaaccctcatcgggctccgccgctcctgtgctttcgcatcttgtcccatctattgaatgttttgtgtatcccttacatacagaccctccttaaccctttctaccttcatctcacaccgcttttatttcgacagatttgtgtctcgttatattttcttgttttccgctatctttctccgacttgttttttgatgtatctagatgatgccttgtttgtcagaagggagcaaaacgaagcgaacagacatgagagtttcttctggaattgtttaacaggataaacacgtcgagaagaaatatacaaaaactcatgtaaatctgaagcaagagcgagaggagctaaaagagagattgtactcaaaagagaagacaagcaaatgatacaagacaagacaaaaaaaagacgcaaaggaactcaacctaacaatcttaaagcttctctcaactctttcctagcggtgtcgccgtcttcgtaattaagcgcgctgatcgcccacctcgcgtgcttctgagcacgttcgatcaactcgatcgttaattctactggttcggttg

SEQ ID NO: 279 - DNA, 21762 bp, Xanthophyllomyces dendrorhous
gtacgaatggggggaagagaagcagggacgtgtctagattcgcgcgtgataggagcagaaggaggtgcagaaggagggagaggagaagaggtaggagagatcgagaaatcaggtggttgagggggagcagatagatctgaaggaggaagtggagatatttggatcgaatgaggtttatcgggtgagatcggttggatcggtggcggagctagaccggaagccgaagggaataatgcggatgtagaaggaggggacggggagggagtccgagagcgttcaaacggaggcgcagatggcgcagataggtctgcatttccgtctgcgttcgttggctcggaaccgaacggttgaggtggagaaggaagtctggggaggtcaccgtcaatgtcttcgtggtcgacaacgacgggtgcggtggaagattcttctgattcctccctttcttcgttctcctgcttcttctcagcctcatcatcctcgtcaccttcggcgaaccggactttgagattactggagtctcttcgttttctcgcaaagaacccaccggtcgggggcagttccccacccaaagccttctccacgtcctttctctctccagcctcggtgtcatcgtcaacgatcacaatgtcattcgaacctagggatttgtccgactcatcaatccctggagaagcggcattactccagctcgtaaggtgtctcgcttgagattcctcttcttctgtctggtctatcacaggtggtaagattggtggggacggaggaggaacagggaaggttgactcgacggccgtctcagttgatgtcggaggtgggccgggttgaggagtgatgcctgctttgaatgctttcgataaagaagcagctttaaatcgggcatacttcagctttgcctccatctatgtcgacaaaggagaaacgagaatgggtaagtgtgaaggatactcaacggatgagtgcgagggaagatggagcttacttccgcatctagttcgccgtctccaaacgacttgccaacctcgatgaatgtagcagccgctaggaatgatctcacagtggccctaggtttgagtggaaacaatgaataacagatatcactcttagcatttgctggtcttttcaagtttgaggagaagaggacgagtgactcacggggttgctttgccttctctgtcttgatcgtctgcggtggcgaataccttgagcgcaaagttttctacgtaggcctggccggcaatctcattcgtcaccgcatcattgtctttcatcaaattcttcatctaaggaaagaacggtgtatgaacggaaagttagatttgggtgtccttgattgaagcaggctcggagaacatcacacttacaccttcgagcgcgtccagcaaatcaagcagagccaatgttccttctttggttctcttatcagcaactccgacctgagcagctctgtagcagcctggcagtcaaataacacatcacataccaagcgcgtcgtacccttcgatcagcaatctatatcagctgcaaagagcaagcaatggagagaggggtgcatacaccagtaacacatcacagggtcatgcgtcttgagttcttttgcccgtttcagcagaagatccgccgctttgagttcggccggtagagattctggtagcttgatcccctgcatgacgtctatcagtcgagaataagtgttgtatgaaaaaaacacagcgatggggatgagacttgataagagattggatggagatggccagccgggggcgaggcaagtgggtgtgagtgtgagtgtgaggtgggtaaccatgggttaccgaagatcacgtgatgactcaatcgatcgaagtcattacatcatcgatcggttcctggttccttgttccttgttccttattttccatatcgtcccttttttctgtactttttccatctccttcccaacttccacctcatactcttctcgttcatctcaagcaaccatctcgttcttgttcttgtccttgtcgttctgttaacttttatatttaactctcctcaacatgtctgtgcgtgcgctctctatccgctcatcatctgttctcatctccaaaccatccatatcacctctcacatcgtttctcgttcggtctctcgcatcgtcttgctctaaccgacctacgtttgctcacccgcatcgatgcttgtcaatcacccgtccaatcgcgtccacacaggctggccaagatccttacaccgctgtcaacaacgacgaccctaacgtcaagcagtcagtggttgttttgtctcggcgagaggcctacatcaaagtcaatcgaagaaaccaatgctgatttgtttgtttctctttctcttgatcttgtctgcaacaggaaagttgacggacttttgggtgttatcaagtctgtcggagtgagtcggttaaactgtattgactggtatcggtagcaacttgcacacacaagctaattctctttcttttttgagtaaagactgctatgcttacaacccgagcgcccgattcggaggaacttcattcacgagccatgtacccttgtacgtatcgtcatgcggcactcatttgtttttatatgtggtcaaggaaagctttgtctcacgtttatctctatcaatcttcctcctcagcctctatcgaccacctgaagtttactttcttcggcaacgttgagagtggcaagtttgatggaatcgagaaagacaaggtgtgtatctagacatcaccaatgacatctttatatattgaggctttccaactgacaatcggatccgaccaacaaacgtcagcacgtcaacatctcatactacaactcagataacacttcttgggtctcgatcgctggtgttgccaacatctctaatgacagagagagaatcaaggagctttactcccctcacctcaaggtgcgccatctttctcatcttgttacatcaggtacgaccgaagcgtgctaatgaagtagcttacatacgactgctcaggcctggtttggtgatctcggagatggcaagcacaccggagaggctgacgacccaagaatcgaactaattgagggtacgttccatacgtagtcccaaccttgttgaatagataggcgcttacctctccgtgtcattcaatatagtcaccccaaaagagatccgatactttgtcgagcagaaaaacattgtgaccaagtcgatcgatatcgtcacttctgccgtcactggctctgtcgctcaggttcgtgttcggtttcgtacagccttgcggcgttcgacgcggaaagacggctgacctgacacctcatcttcctttcttgtagcccggaaagcttgtcgttcttaacggtcacgagcttgaaactgccaagaagattgttggggccaccgtgaaggtataagaaactctgaaagccaacaccgacataaacctgtcgccatcagccttgtgttcaatcgttcatccctctgtatcgatatcaattctcgtatgcatttgcactctgtgtgagatttaaaatccgaccgatctaagcaaaagtcaatactgtagagttgctgagtaagaagcagggacatattgatatttgtattaaagctttttgcattgagatgaggaaaaagaggggttttatctattccttgtcattcaacagatgtgtaaggacggaacaggatatgtgttcacatttacaagtcaaagaacgactgtatcttagtacactccaggaataaacttgtacttgacgactgtgcaaacaaaccgataccaggcggtcagttttgttttgatctgtttccaaccctgatccttcgcagaaagagagaccaaacgcaacgaaaggaaaggactcaccggccatgtaacgatcccaatcctttccgtacttggctgcacacttctcaaagtctcgaccgcatcggtgaacgaggacgatgatgaaccagacagggtagaactgtttttcggttgatcgaacgaatcgacattcggtgcgcccccatcaaaaagaaaggaaagaggaagatgaaaaccattaggtcagttgtcacgtttgcgtgaattttcgtgagatgtttgtaaacaaattgtctaagtaaacgcaaagacgtacgtaagcgataggggtggatagaccggtagagagaccccaagtcaaggattggattctggaatttgagagaaaaaaaggaggagagatagcaaagagagcggtggtcaggaataagagaatcaagaaaagcttggccaacggaagaactggcatggacttacagatcggcagtgtagtgctaatttatcaaatatatattcattcaagctcttagttcgaaatcctgagaaagagaggatattcgagactatcgaaaagtacgtacaggcttgacggcgaatctgattaccaaaaccagcgcagcacaacacaattccaccacaatgatttcgatcaacaaaatggacgttaaagaagaggaactcaggacggatgacgaaaagaaaaactgacttgtaccagccggaagtaagaagcttgctaccatgctgagtctggatgaaagtcgggttgttcacccgtctccaaggtagttgggggaacgcttttcgagggacgtagtctgcgttctgctccatccggaagatagatttctgggagtttgctagatggaaaataaagcgacgtggtagggatcaaagtaggattaaaagggttagacttgatacgattcagatatgcaaagtaacagaaatcaaggaaacataccggtatcgaaaatgtagtaggataaaagaagcaaactgaaattcgtgaaggagacagagaatggaagacaatcgcttcagacacaacagtactgacatgttcaaaaaatagagagaaggaaacacaaacccaaagagaccgaaagtagcaggagttgacatcttgtagacctcagggttggttcgatgaagataaaggatcgagtacgagtatgtgaaaggactgtttgggcgaacgaataaggagaagccaaacagtacatgatgtcagaccaacgtattttgcctagtcttcttcagctacgttcaactaggacatacactcctgtgaaggatacaaaggaagagggggggaaagagaaaacgatgagcgtcaattttgaacctcgccagaggcaaaaagataggtaagaaaataaaaacgtaccggcaaagttccagaaggtcagcatgaatccatccttctcgtgaatcatatccatcgtagtggggatcatctcctctcctttagcacacgcgtttatatacagcgcggtggccaaaagcatgaaggccatgttctgtttggttatcatcacaaatgaaagcaggaaaggagcaggtatcctggttatacgtagtcgtcgatgtgcagcctagtggaatagtgagagaacgtacggcagtgacatagccgatttctcgatattgctcaagcgtggcagagagagcaatgaggaagagaagaacccaagggattcggacttcctgccacatcttgaggtcaaccgagccgattcgagggttgagtgcagctagagaaacaagtcaagaatcacacacgaacaaagagttagtcaaagagggtcaagaaacgtcgtatagagaagagattgtacatacctcccatgaaataatcgtagaaaaagtttccgctcatccggatgggctgtcctccccagcccaagaaaacagaaccaaagtacacagcggtcgtcaaggcaaatccaacgatcatggcaacagtcataagtggcccaaagttgtcgatcacagtcgtcagatcgaaaatgtcaaagtagtggactatcccggcggtgaccagggtaatgtaccaacagccgatggcattgcagtggtagaccaaagttttgtaattaagcgacgcaacgggaagacctggaatttttttgacaagcgatatgatatgagctaatagtataggattgagacttggagaacatccctaaccattctgctttttgccgggaacaatgaaggcgagtatgagctggaaagccatgagtccgaggtatgacttgaccgcccaagcagtagggtacgcatcctaatgagtcgtcatcgtcgagtatagtaacgatgcgaaggacgacaccagaagaatggagaacggttgaaatcgaaagagtgagccaagaagtgttattcagttaacgtggtcaaagattcgtggaacaacgcgccgcaacacgttcttatatcaaaaagtatcgaaaggaaaatgacaatgatgaacatacctctcggacatgcgccgccatagttcggaggaaaggcttgatgtcttccacggaagaaggatggacgaattttccctggtagaaccagagacaagcccagaggtagtctgttgtccatagaccgatgttgaaccgaagcgcgtacccaattgttattaaacgcgaaccgaagaagaaaaaaacaacagagcgacaataaccagttcatgccgtcacgaagaggagagccagtaaagatcgagatgaagctcatcagttctcttatccgcacaaacacgcatctaataaagtcacaaaaggaacgcacacatcaacatggggaatccgaccatcatcccgatcactccgggcggtcctccgaactcgtacttgtggtgggtatctccttcgatgtccttctttctgcctgcctcggtcggaacgaaacgcccattcgaattggagacctggccatttgacgatccgtttgcctgcttgcgctgcctgacttctgaaggagatcctgccatcttgtaaaggagaggatcgagtacaagttaagagtcaaaagtaaaaaaaaaggcatcaaccccaatcggagggaggaaagttaaggtacgatggctgggcggggtctgttgcttatgtaagcttaaaatcacttggccgatagggtcactaaccgtaaattacattgtaaccaccatccctccgtcttgtaacctttgtcctccctggatgcttcctaccttctccttctacccttgcatcccatcgaccttcactcacactctgcgtttcccagacaaagatgaacaggctatcatctcgtctacgagcaccgaagctcccgagtgttcatgatctgccggtcatcacttcgccgaataaacacatcgtcaccttcaagaagcaatacccatccggtcctcagatccagcaggtccgactgaaatacccgtacatgtccgctcagacattggccgattcagtctcgttgcattgtcagacgaacaagtcctcgcaggttctggctggtctgacccaggcattggggaacgttgcgacaggaaagttggctagaccggtgacgggaatcaagatcacgatcggaggagtgacccatgtcgagaaggttcgttggcgcttctttccttccttttttgctagtttcttctgctcttcagccttttctcttcatgatgatcgtcacttgatttgaactgactgatcctctttttctttcgtattcttttttttctctcattcactcatcattatacctcagaataaaacaacagtcgttcagttcatgcgaggcagtctcgccctgggaaaccgagataaaaagaagacgaccagacacggcaagatgggtatccgaaccacgcaggtcacactctgttcggccgctttccccttctagtttacgcacttcaagaggctgaaggattagagagtatcaggggaaaaagaacatggtgggtagactttgatgggattgaagtcaaatacgggtgggaaatatagtatgatccttgtacaagatcttggtactttcggtcaaatccaagtccgatgggtgtgctgtccgagcttattaaacatcttgaactgaagactgacctctcatgcagaaacagagacttgacatggtggtttctctcattccaggcaagcaacccattcagattgaccgtttcctgttccccttgtctctccaatcacgacttgtaaccagactatcggccatttcgagaaagcgtatagccaaacaatcactgcccaaacatctattctttactaggccgtttactatgaagatttcgaagtcttgatatccagtttacacgtacaaacagaagaaggagatagatgaagaaggaaactaaactttcgcgcgaaaagagcacaggagaagaaaaactacgagatctactcttccatagcgttcgcctccgcggcaggagcaggcgcagaagcagtagcaggcttatagacagacgcaaccaaaagaagaaaagaaactggtagttagatgaagaatggatagaatcaaagatcaacagaaacggatacgaacagcgtcactcttcatgaaagcctcaagttccttgtccaatgcatcctggttgaccggccccctctttgaaccctttcctcttcctcctcctcctcctcctcctcctcctcgtccaccccgggcttctctaccccctcttccagctccacccactcgaggagcggaaggtccatcagttcccttggggttagccgttcgcggtcccctactttctctacctcgactgtatttcgataatcccccagcaaaccagtcggtccaatgagtacagtcggtcctatgaactctatgaagcacgtgattcgtacaagagaagaagaaaaaaaaacacataaaacgtacgtagcagcgggcgcatcagtccctccgactaagcctccgagtcggccaaacaggggtttcccctcagccggtccggtggctcggacagttccaggtcggggcagtctgacaggcgcgtaggtgatcttgatcggttcgcctgtccggacaaagaaaagagatcagtttggatcatagatcctgtatcagttgatgatgatacgtaccgttggccttttggccatcaagcttttcaaatgcaagcttggcgtcggaaatggcggcgtaagtcacgtaagcaactccggtagaccggcctgatcgatcgtactagatgtcaagtcgaagtcaaacaacgatggtatttttctttcgtcagaaccaagtccacgaacgaagacgaaagagtgtctagcgaggctcacctgatgacgcagaaatttaaagtaagaacttgcgtcactttaaaaaggttctttcttttctctctgggattcccatcttttgttctttaaattcttgcccgagatccaacgcaacagccagcacccgacgcgtatgtgatgagaagaactgagaaaagccgacacaggaccaggtccactctctagacgacaggacgaaagaggcccgtaatgtcttatctcacaatagagtgaaccagtttgaagacacatggcgaaatgacaagagaaggaaatggtaggaggcagaaagtggggatagctgctggtgctggtgctgagttggatctcgactggtcaaaagtggggggaactaagttcttactactatcgatggtccttcggcgatcttgcctgcctgtgcaaagattttctgtaagggttgggataaccgacaaagaacgtttcgaatagatgtatcatatgagcctacgacgcgttaaatccgagggaagtaggaacatacgaggacatacctcgagctgaaagttttgaatctcatagtgaaggccctcgatcttaagcttagcggaggggttagtctgtgaatcagaaccgatctgaccgccttgtcggccaccttttcctccgaacatatcatgtcgccacggggcgtcggtcgaggcgggaggaggacgcttgaacgagagatatccagcaagacaggtaaaattcgggtgatgaaaagataattatagaacacaacggtgacaaggagttcaatcaacctggatgccaactgtgaaaagcgaaaggaacatacagtgtatggagcactaccggccgctctatcggctcctctgccagcgcctcctctgccggaaacagttcgatctcttctagctggacctcctcgagcagaggtgttggatgttttcttgttcttggacgcgaggtcgtcgagggacatgtcgatatccatggctgctgtatttataattgggatagaaacgagagcacaaggaggaggaaaggatgaaggaagagatgggtttcgatgatggttgatggtgaacaacaaagtgagggttttcccgccttgggatttgtctattagaaatttttgtagtctttttgtcatttgttctaatgctcatctgtagtcttcaccagacttgttcagagcaaacgtagcagaacacccacgacctgttcctcgcatccccacgttcatctcgacatgtatctgttccaggatagcaaggataatcgaacatgataatgctgataggctggatagggaaagcttccatagaatcgctaattctctctcatctgccttgctatgttcacgtctttgtaatcacctccatttctcacaaagtttctctgattactcttcatcaatcagttcactcgatggctgctctgcctgatcatatactcatgtcctccccgctagcgcttgttgccaaactcatgtatcctatgattcataccatcatgacttagccccgaggcaacacaatgctttgggctcaggcgtccgccgggttagtaacccgttgggtaaacagtctgcatgtgtccctcgatctcttcaccttcccttctctttcggctcgtccttcgacagcatcccgagttatccatcaaggaagaaggacaaaggatgaaacatcttgctctgagccaaacaaagaagcagacccttcatgaacatgttaggttcattcttgtcgccgagtttgatattgatcaaggctcgatcatcaagcatcagtacccttatccagtaacccaggccgacaaccagtgcgtcctctgtattctcttgaattcgttattctaaggacttttcttgctctgttcttgcatcatgacacttggcacgtcgggatgagctcatttatgtctccctcttctttactcttagtgtgctagctgagctgatgcttccagacggagctcatctgcacaaggaggaccataccgtgttttacctgaatcaagtcccagccaacactgtcagagatactgctcaggaagctctcagtagtctgggtgagcagaccaacacctctgaagaatccagtgatgagtctagaagatcggtcttcgctgtcgaaggaatggagaagaaggagattctttacgtgctgaacgctgtcatgatgaaggaggacaaggcactcagaaggttagactgtgttcctccttcccttcctctccctttttcttgtacaatagactcattttgtcctctcattctccgcatccacatcaacagaggagcagaagtcaaagcgattgccatttgtacacctcatccatggattcaagcttaccaggtcagtatgtctcgttctctctcaatcacacacgtatatgttgaccatataccatctgtaatatataaacatctacttcccatccacccctcagcgcctgctaattctttcccttgaagactacttcaagtcaccctcggtcgatgttctcgagaaactgtttgacgcgctcaatgggatcgatacctgtgggatgcctacattctcgagagacgaaaaactcatcctgcgcgcgagtgaacgtagaaatttgttggtcgacaaatttagagaagcacagtgggatagtgagagaggagatctcttggataaaatagaccaagccgaggccaaagatctgtcgaccatatgtgtagcctccacctctgcctctgaagcggaacaagacaaccctaagcggaagtcgaacgcttccgctgcttctcctcctagaatcagtaccccgttatctagaggagatcgttcacctaccgcctcaagctttacatcaaatcattcgcctttaaactctgtggcttcgggatctcggttttccatctcgtccttatctagttcgaccgacttgatttttggcttgtcacttccgacagggtcttcttccaaacggacggatgtactgacgaccgattttttgaccctcggcctgccgttcacaggagctgatggcgtgagctcgcccttaccgactgctgtggacagaacaaaaaaagggactccaaaagatacaaggttttttgagacgtcggcaagactggacggaatgtttgttccgttcccgatacagatcccactcacccttttcgaagaggaagttggcgaagttggtccctgttttgtgaacttctcttatctagatcttgttcttagactaagcaacgttgtctcatctttgttaaaaacgatctcagttctctctcattgccctcatcaaaaagttttccccgccagcccaaggtaatggcaactttcccgccccattcatcccgtctcttcatacatctggcccaacaactcatccggtcatcctcctcttcaacgcgctcatcacccaacgtcgaatcatctttctggggcatggtagagaggccggcgcagtcgctacgatggttcacgctgcctgtgcgttaggcagcggtagtggcagtgttctcagagggtttgccgctaggtgtttcccgtatgcaaatttggccggattggatatgctcgaacaagtgtaagagtttttttttgtacgtgaatgttcaatgtaggccaagctaacacatattaccatcaatttcatagtcctggcttcatagcaggtgtgaccaatccccgattcgaagaccttcattccagatgggacattctctgcaacatcgatacgggtcgaatcactgtgtcaaaggacatcaaaccggacggccctttccccagtccgaatccgtcctcgttcaccactggtaacttggggcaacaggcaggaggtagctcgccgatgttcagtcctttatctgtgggatccgctgtaacagaagaagaagcaatcgaatcgagccagataagatctcagtcggaagaaccatcatcgccacagtcgatggcaacacctccgatgccaacgatggcgacgatggtaacaggtaatttcttcactgcttcagaatttggcatggtaggcacagatgcagggatgtcgaccgtgacggagaaagggaaaggaagacaaggaagaagtgattcagtcgtcagcggatcaggagcagcggggaagagcaacctgatgggggcctggggagatacggatgcgatttttatggaagaggcaagtgaatctcttctcctctcaaaccacggaaattctggtctacactatatctaactggtccactcccgcatactccagatcacttcacttatcagtaatcattacggagagtctatcatccgagctcgatttgccgaatatattcaccgattcattcgcttagcttcccgatatgaggaagagacatacgcgccttcctcaggcgcccgaatttggtacccgtccgtaccctgtgatcctctgaaaggtcggcttggttcgggggctattctctgggaaggagaatcatctgcttcacaccccgatcttgggtatcacacgggtgggcttgcctcatcaactataacggcagcaacggtgacagggaagaaaagggagagtggcggagtaggagcagcggagaggaggatggtgaagacgtttgtcggcatacatggtgtacgaaggatcgagggttggagagctactaagagttacgagctttggaagcaggttcgatcatctccctctctttgttctttccaactgtgttgatggacagcttgatcctgcaaacatactgatagaaccggtccccatctggccttctatctaggactttgatcaacatgtttcatcgagcacgcttcagtttgatctgaatcatcagctctcccgacttcggaacgcacggtccatgtctactggcgaggcggagctgattttccgatcgttaggagaaaacgtcaagacatatgaccaggtcgtcgaggtttgtctgaacatttgctttgtttcttatgatgataggctgataatgtgctttacaacgttggggcttaaggtgctggcacaaacgccgatgagcatgggaggtctggttccattcgcctccgggttgtttcacaagagcaaccatgttaaggcgtacacgctagatttctttgataccctccaacaataccctgtatgtcgcgattctcttctttgtggagttttctctacttcctcatgacatgagtatatcaacatcagagctgacctactgatacgtactttgcagattggtcgagcattcctcctgcaacttaatgctttcccaagacttgcatacgctcgtctttctagtgagaggagagaagctgttgaggcagcgctaagtcgtcaacctaagggttgagtgatggtgatgttggcgtatccactgtgtctagaatcccttgattcaagtcgtggtggtgtgcacgttcatgtttagtttccttccccctgcacactgtcttcacacatatccgttgtacattcttcttcttgcctctctccattaataacatacttgtacatatatccatccatagatattcataaagataccatggttccacaacgatgcacagactgattagataaaaattgcggcattgattgtttgctcttgtattacgtcactgatactcgtcactcatcacgctcgactttccagccctacttaaggccaccgaggagttcgtcttctgtgtgtgtccccaacatcatccattgagcttaacatcatcagatcaattctgctacaaactccctaacatcagtttatcaataacaaaacaatgtctacttcccagatcggagctcacgctgaatgtgagtttcgtcctcctctcttccatcgttcgatctatcgctcccgtcgtttttcttctccatgctcttctcctgatggaccgtgatcctgatataagaaatattctttttcatgttttattttccatttctgaatatatgaaactggtatcagacatcaagggtgcgaccgtggaagcgatcggttccttgacgggttcaaaagaatggaccgagtctggagctgataccaaagagcacgcgatcggtgtatgtcgtcccctacttccatctatgggaacactacgattctcacccatttatttgactggtcatctcacgcaataattacaggatatgcggtctgccgcttcgtcctcccctcacggagagccccactcgtccaccatcggttcgatcgaaaagaaagcaggcgagctcgttggttgtgaaggtatggttgacgaaggtcagcgagcaactgccacgaccggagacgatgctgtcgctgctcctcattcggtcgccggagagactactgtgcctggaacgagcacattgaccaacgaggcattcgatcactcaaagcaggtctagaagtaggaagcggggtgtgatgaaggacgctcacgacaatatatccaccgaaaggaatgtctttgtatgcctatgtgtatttaaaagaacaatggatcaacttttttgatactaccacggatgcaagcaacggcaaaccgatagacggttgcaagatgaagagcgagtttatgtgggtatgatgagatgaaggccgacaaacctcagacgattatccccacagccgttataaacttggcacacatacaacacactagttcttatacaatgagcgccaacggacctgacatctttatttgctcttaacattgttggtgatgggtacccgcagcttttactatcatctccatatctgttctctagtttatgatgatcttcaagacatgtgttccagaatgtcggagaagtcggacgccattcacaatatcacgccgatgaagatgagattctgggaatttgggaatctggaacctgtgcaatcagaggaatagcaacaacagcaagatacggggcatctatccaacgtcctctgatgatagaaaacagcttagagatcaaaggatgaaagagatcgtttggattgccaatacgagtctcagtgttatccaatgatttgccagtctcgtttctgagaacccctcaagtcagcaccccatattgtaagctcacaaatgagctctttctttggcgtgcgttgctcattcaaaccttcaagtgtctttgatctatttggacatgatggaacttatagtgaaccatcctgtgacttgtgagaccttgtttgcagccccttgtgtacttgtctgcgtcgttgtcatcagtcgagactgactttctcggttctctcatatgacggtatggggtcgttcgtgatttcccccaaaagatcttgatatccttctggcattctgttttatactcatcgacgtctttctgtcctacctgttcaggcttggggtaggatctagcttggtaatcgccgctggtcgttgtgtggctcagctctcgttgttgagcttgatattggatagtgtgttcgattggggaaacatatgggcggtcgcagcgatcagcctttggctgaacatcgtgggcgcatgggagactggttcgtcaaatctctctcatccccttttgatgtgttctctttgcctatctgaaactgagatagactggcgagctcactcctgtttttgagttgtgcagtatataacaaatcccaacagagagtcatctggatgttccctatcgtgctcttggcgcttatcgcaagtagtacaccgatatgcatcgccggaagtgtagccatgcagagaaatcctatctggaatccaaagcaatatggtacttccattggagtctttactaggaataaagtcacaagagataaccaagatctttgagttatattagttcccgtgttgggattaatcttgggatctatcatcgcaactgttagtttgagtgtgtcgtttgtcttggttcgtccacttccttcagaattgtgtatctttctttctcctttccttctttctggagctttagtgattccatcggaactgaacaacgagaaaaaataatgcagaaagagtttaccctctatcgagatcggatacagaccaagctcgcaatgggagcttcccgatttgagatttctcttcctgttgctaggtcggctttgaaacttgctctctttccgactatcaacgatatgaggtcggtcagatggtttcgtcttgccttccttcgcgtgcattgattgccattgtttgagacgttctgagagttgactttttctttgcgcgcacatatgcacacgtctcatttttttctcaagtatgattggtttggtagccatcccaggaacgatgacgggttctctactaggaggtataccgatagatcaagctgccaaactccagagtatgtgtccagaccgtgcatattcgaactagatctgggttgttgaaatcgtttctcttttgccctttgtgttcatctagtgattctgatgttcagttcagttccatttcaccgcctttcgcccacatgtctttccttgaagttgcaactgattcatcgtattactttctcgattccatccctcccccccatgttatccgtcctcagtgatcgcaggcgcatgtggcttgtctgcgtttcttgtagtcatcctgacatgtatggtcctgatcgactctgatcatcgggtccgaccggaaaggacattctaccaagcgagcatcatcagtggaagtcttggattgattccttcatggatgtcgagtatgaggcagaagatatgggtgaggggggaatgatgtacaagaagggcctgacatcgttctgtctaaagtccttcgcttgccgacgtgtcgttttcgttttcttcttccttgatcggcaccgctttaaccatcgatcccccgaagacctctcccccacatctcaaacaatcccagcctttctcttgccgaactttcaactcactgctcccttctcctgaaaccatcgccatactgagttcggatcgggaagattctagaagcgcccctccgagacacgcataacagtatatacagccggcccagcaatctgcgcgaactggtatatggactgctaccgactcatcctcttcctcctcttcctcctcttctttcggtttctcttcctctaaagttgagccgaaagacggattcgatgagtccgctgattgtgccaacggagaaagctgaggaattaatggcatagaagggatcggaccaggcgcacatggcccattcccaccggtcttgtccgaacgggagtaacacagcggacaggcccgcctatcgatcttgctgtatatcccttcgtgtggtcgatgactcgagctggactgaaagagagaagaatccgagttgggtggtgctgtttgtgagttcatatccgagcgtggtttcagggagagagatgagggatatatcggaaggggatcggtcaatgtagatagtgtagaagtgaggccatgttgtatccgagaaagagggccaaggacatatggagccaacggaaggatatgaggcatgaattgctgtcatcaaaaggagttcatcgtcagtgaagagcccaagaaacagatatgcaagccatgcgagtgaattcgaagagcataccgataacgatccccagacgagttgacggttcatgaattcatacgacaccattcgtgtcagcttggacgaagaagggacaagcctgagccccagcagtctggtcaaaagtgatgggtagcttttcacaggacgagaggaaatcggacatacatcagcaaacgcatctgaccgagagagacaactgaagagacttaccgtccatcgtagaggaaccacagcagccccgccaattcgcctgcccggccgaggtcttcaagtttgttcacaccatcccagatccgtttccgcaagctccgacgaggaagatcaggccatgatctggagagagcatactgcttgaatcgctgaaggatgtaccgggggaacatttgtggagacagaaataagtgtagaagtagtagagttcgtactagaataatcaattcgatatctaccgtcagtattggacgaaactctcctagaaaagaggatacagaggaagagtacgaacgacgatgcttggatgacccgccgttccatcgttcaggcttgtacttgaggttttccagctgagacccaggagtgacaaggcgatcccacatacagtacttgtaagtgatcaaactgatgagcagatacaactctggctggaacgtgagcttgtaagaagactgtccatgtgcaccaatatgatgcattcagtctgtcgttacgtgagagaagcgatccatgttttgagagtatacgaaagaacgaacgccaaagttatctagagaagaagcgagacctcctccaagcatattgaccaaagcgtcatccaactcagcggcatccagctggcctaccctgagaacgtttggaaggaccgaacgatctgccatgggacgatgggagtgtgtgcgtatgtgtgtgtgtgtgatgagcagctgatggctggatggacggacgaaggaagaaggtgatgggcaagtaagatacaacttcggttaaaccggataaaatcgttccggccagaactttcatcctttcatcgtccatcccatctgatggtttcggggttggttcgtgcttctttgttcttgcttgcttccgcttagagtgtttggttgttgctgctgttcacatgtcacctcacgtcaccgctcacaggttggattagtgtcaagttctcatatcagatccaccggtcgctgcactaggggctctgcatctagcaaccaaccgtccaagacgtgcattcaacccaactagatcaaccttccttactcctctcgatgctctttgttcttcgcctagtccacccatcagactctccaacccgtccatctcaccactctctccttggacttcccattccttctctcctccgtgcgctttggcatgctcttccgcctgagggtctaccggaacgacttcagacatacggacgttcgacagatcacgaagcaagtcccggacatcctcaacgatggacgcacgatcggagggtgacatgacagagatcatccttggttcgcacgtttggagatgagaagacgagggaggacaaagcgaagcgagaagagaggatgcatacccccgaatgaagcctagcgtccgagaagaaggcatagattgggcgaggccttgatcgaatccggtctggatggtagagagcttgccgctcgagataccttccttgtaccctacctagatatgacccacgccaggtatcaagcacacagtcggatataaacacatgtaagcgtaaggagagggtccacactgtcgatgatgaatgagaatgagagtgctggcatccatacattagtgaatctctcatgtagggtagaccattcctggttcgaactagccgtgttgagggcgctcgatatggctggcacctcggacagccagtcttcgtcttcgtcatcaatgtggttgttgctactcgtactatacatgttgaatcaagaataccctggcgaatagatcaacgctgaagaacgagtgatgatggtgacgatgatgatgacgacggtgcattgcaaaacacaaccaaagaaacttcaaagccatgtctttctgttctcctccttccatcaccaccatcatcattgtgtctgatacctcgcagcgtcctaacgtgggaagagactctgtcttcttctctactccctttctctaaccatcatgtcggttgacacgccgatgcttccgagaaagaaacagattcgtctgccgtttcaaccatcataccttccgaaacacgccaacaagtctcaacctagatgcgccatgtgagtgtctcttcctcctttctcgcacctgtggagccttcaatcaaaacaaactattctcatgaagctagttctcgactgatgtgctattcctgtttttaccgaaaaccaacgatgtcagatgtacaaaacaacaatcaaaatacttttgcccccgttgcaacatcccgtactgttctctcccatgctaccaaaacacatcgaaacactcccaatgctcggaacccttctacagacaagagattgaactcgagatgaaggccgaacgaggagaaaaggggagcaaagaagtccaagaggcaaaaggaaagatgtgggaaatgttgaaaaagtttgaggaaggtataggtggtgatacgctggaaggcctcgacggattcgaccaagaaagcgaaggagaggttgatgatgaagaggacgatggactagatgagctacaggccttattggaaggatctaaactaggtgggaacggttttgtttgttcctcccttcagggtcgtgtacacgagtttctgatacacaaagctgatgtcttttggatcatttgtctctctccactcatgtatgtccatagacaacttatccccggaggagctactttccttgcttcccccttcacttcgatcggaattcatctcatccatcagtaccaactcgaaccagccatcggcagtgattcagacattgttagaatcagaagagctctcggctgacgcggaggcgccctggtggatgcctgtcgaaggagaacgagtcggaaaagtcgagggggaccatgaagaagaacaaggtttcttggaaggggcaacggccagggataagaagaaagaaacacatgcggtgccggatatgctcaacggaccaattgtcaaaccgacagaagcagcagctgaaaacctgatgtataacattctggctatcaccat

SEQ ID NO: 280 - DNA, 52233 bp, Xanthophyllomyces dendrorhous
gctgaagtcaaatcaactagataggaaggagacgtctcaacaagcctgtgaggacttgatgaaactcgttccgttcttggaagaagcaggctcaacattactcttgaagtcggttgaggatgccgaggtatttgtccgatctttggccgatagcaatgtacgtattgcatctactcccttctctgtttctaccacctgctgcttaagcgctaaacatcaattgcatttccctcctcatggtatttgggattgaactatatatctagacaacgattccctcatcaattgccaaagctcatcttctcccgctcctcgttccgccacccacgattgccgttctatccgacatcaacacgacagttgatccgtccattcctctagtccaacccatacatcctcttcaacggcttcttgcggatgttcaccgaactctttctcaaagtctatcctcaccctcggtacaccgttcaacagtcgatcgaacctacaaagcaagttcactcaagtcgacatcttccactcgaaaacgagctatcaaaaaattagaattcttagtagcttgtgtaggtgtcatcccacgaacgacatgggtccggttggggaatgaggctggttcgttctacagtacaaaagaacgtgaggaggctgaggagggagaagaggtcgataaggaaacgaacatctggctgatcgcacaagaagaccaggtccgagacaaacagaaagaggaacggctgcgagagagaggaatgatcgagtcgattgataaggatggagaagcttgcatcgagacactagatgatgagcaagatgaaatcgcggacattgcgataaacgaaagacgagggggaaggattccttctgggagggttatagaaattggatgaccgtttttttttgtcttgcttcttctggtatccgctacatatacaactatcgaccagcaagcccattcgagaagttgatgattcaacagaggaaggctttgtttggtttgatttaaatctcatgttcatatgatcgttgattcgaaccacccatctacactcacatcaactcgttcaacctcctccctcaaagattcctcggcactcgaccccaaagcttctttggcttttctcaatctcaaacaagccaaatatacagactcagacagcgggtccaacaataatacttgcttctcgccctctctcgaacaaggagattgatcagaacaccgcttagtatccaatgccgattgaatcctggaaaccgcggattcgagccgatcgagtttgttccgatagctggacaagggctcggcagtagaggagaggtaggcagaggcaacagtgatatctagttcggcttctctaaatcggttcggaggttccgtcgcaaaaagaacgaaaggcgcttggaaggcttcgactaatgaatctgtttgaccagccaaacgtatttcttcagtcgggcagaccaaggtagaaaagagaggaaaggagaaaatataaagactagaacagggaacgtaaagacatactgatagatcgttcatctaggactgtatcccacaacgtctctctccagccaaccatctctgccgctcgttgtttagagaattcccaccacttgatccaggccgtctcttgcgccaaagatacatcacttgacggaagaacgatccgaccaacgagatcactcgctaaagaacggatttcttggtcatcatcttgtaagaatcctcggatgagccgactcagagccagaaagacttttgaggaaacaatacaggatgttggattgaacaggacgtcactagcagagacaagtgacaagattgtagagagtcgagtctcttccgactacgaatgtgtgtttcagagaagtaacaattcagtcaatgtttcggatacattggcaagagggatcagataagggatcactaacttcgttctcgtctgcagagctttcaagcaaggcaatatactgtgccgcttcatccagagtgacatcctgtttgttggcgaggatgaaacaaccaaagatgagatcaactctctatgaagcttgggggaggccgatagctgaactttgaaacaacatacgatttgaatgttcgcgccaagatgtcgcaaagcaacttgcctatcaggtaggttcgataaaccttcaaacgcagccagacgttgagtgaacgacatccttcgatcatccgtcctgttgtctccctttccagagtgttcatcggtcgactccggagaagtctcagactttcgaacatccttccatcgagcacaagccgctcgatacagatcatacccagggaaatttttcttcgcctcctgatcgtgttctcgatccaaggtagcgaagttgaaaatttcttggaagtatcctattggaacatctgaagacttggtctctagcgcctgaacgaccttgatatacattgcccttgtaggtccacacgggttcatgctcagcagattctctcttccatcaagcacagaatggaagacctggggtgttgtcaagaaagagatcaaacatccagtattttctagtagggcaaggacctggaggaggagaccgtgtgtttggttctgacttctgatacgttctttccctaatccaagagatatgatataatcagcaacagctgaccggtgtatcaatgctggaagtgcttgggatgccgccaaccggatctgaatagtccaacaaacacaacaaagattcttgagtaaagagccaagaacataacaaatgtgtgcgaaaagagatatgatcgacggtgaaaactcacgtcgagctctttgcttttagagagcgcctgaattagaggaacaaacgctagctgatctttcgttgcaggttctgatgcctgcaagttctgaaacacttggaggacagcaaacactgaacctgaactgacgatctgatgaaaggaagaaaaaagaaagaagcatgcgggataccaaatggggttaagcggacagaaataaaaggaccataggccgacaatgaagatcaaggacggcagtacctgttcgttcgactgtgtagcttccaccaagactctattgaacagaggtaacaacttgggatacgaggcgaaccagaccgtgaagtactctcgatgttcgatggtcatttcggcttgacttcgacggtcaaaccctcttttaacgagacttccgagcagttgtaagccaacgtttcgaactgttgacgtatcgacaaaacaaacaagagcgggttagaaagcttctcgagttttttttgtttgaggcaagataataccaggagcgaaacgaacctccccaggttggtgaagccaatgagtccatagcggtcatcaccgcacgctcgtaataagccggaaggtgagaagcaagcttcgcatttaaacacacaacctatcctcaagaaacccgaacccgaataaagaggaaattcccacgattttggtcagcttgagcacgagaaatatgttcggtattccattgtccattcgatcgatcatgacttacctgaagagtgttgatagcggcgataacagtcgtaggctgttggtccgatttccccagttcaaagagcgcctcgaaagcgatcgagacggtgtttggtgcacccaacatgacggccaagagaccgtaaggaagtccggctgatcgacgaccagccgttctgtgatctgctttcaacgcgtctaggtgatcctacataaagtcgagtacaaagacggtaagctccggtggatactatccgccgttgtttacatgtctcaagaagaatacaacgacagaaagggaaaggcaaaaaggaggcgacctacatagacccaaccaagaggcaactttgagaacccgttcttgacgaccacgccgacaagttcggagtaggcaggaaatatcgaaagaaatgcgcctggatgtctgatttcgctgaggagatctctatagagcgcggcagcttgaacgatgtaacattcttcccagattggtgagattttgccagaagtatgtgaccgaccggctcgaataaagaggatggagagcagagtacttttggtgggaaacgcgaaaaccttgagctgctacggaacatctatgagtcaaaaagagggctgtacatacctgctctccttcaccgccctccaagcccaactcaagatcgcactcttgatctctccttttccgcctgctgtgtttgttttctctagaccatcagtagcagcagcggaagcagcgacgacgacagccctagcctcctcatgatctgccactccatcttcgacttctactgattcggacgaaagaacccgacgggtggtttgccatacacgttctagaagacgaagcgtccggagaaagatgggttgccaagttgacgattcgacttggtcgattcgaggaaagatctctcttcgtatcaaagaatggaaagtgaacgatacgtgtttccatcaccaatcagtgaagcacgataaagatacaactcagagaaaacagacaaggtaactcactgaagagcttggagtaaaccgtggactgggaacttttgagcggcttgtacgatatcctttacagagatatctactctttgttctaggttgtccaagatcttttcaacaaaagatactgtacaatcccatgattgacaatcgatgagttttcttttgttctcgccatttttcttcttgctccgcgctttgggagagctcaccttcttctttctggccaccaagattagctttgatatgaaagactaatctgataccaagagcgcccgtgtgcgaatctgaccctcttgggttgaacaggtaggtctgttttgcttctcgctcgagttggtctatcagttcgggtgtgtccagtcctgggggtggagactctgtagagccgagtctgggttggcacggataatggatttgagaaatgccgaacaaagcacctgaaggaaggaaaaaggaggaagaactgacagatcgcaggcggcctctctgatctcagcatacgtactcccaaaacatctcaagattctcctcgtgactctcgcaccaccatcaaacaagccgactgctagaggatgatcgttcgtggcttgactctgctttgaggaaacgtttgagtattctacaaagaacccggcggaccgtataagatgaagtatcttgagagagaggattgttcgcgggtaagttgatcctggtcgaagatttgtgattgtcgtataaaccatccacttttttgtttttgggcaggagatcaatatatagatacgaaaaggtcagcggttttatacaggcgcgatggatgcgagtcataaaaaggagggaacacacatcaatcaattcccgactggtttttaaatccttttcaagttgtttaaccttctcctcatcatccagctctggctttatactctcctttagttctgtggacttggctgcacgcgctcgcttggctaagagtttagaaagatctctgtgagtagccgaagtagacgattttatccgtttgagaaggtccgccgtggattttaaggtttgttgtctcgttctggtcgaaatgagcgtgtgagataggagacaagagatatgcgtttggtcaggagcaaagcaagatataagaagagggcagaagtgagtaaaccttggggatcgaaacaaaaaagaaagaaaacaggagaaaaggtcgaaggaaacaaaagagtcaaaacgaggaagaattcaagagagcacctacctgctatcccacaagttcatggctcccttgaagaagagtctgacaacattggcctcggcctccgtcaatggagtgttgaccgcaggtctctccgtgactagtccaagtacggctagcctgacggtatcattcgagctctgaagacaagtctgaataaggtcatggctgacggccatcttcccttcttgagctggttgaccgataggtgagcagagtgagaagccggctccgagagtggcaagtgagagatagacctcgtctttgagcggatgggttggatgagtgtcgagaaggatctgcgcgatagagagaagggcatacgggtttgactgagtcaacggacggagggtgtgctggaggatgttgaaccggatggtctctgtgtcttgggtttccgttggtggagagagaaggatttgaagaacttgaccaaccaagatctcccaggtccagttcgaggtcgaggtggaatcggatgggtagtagaggaagatgatgaaaagaagaacggcaaagagatgacctctatagcttgcaaggtctcgctcgggcaatagatcgagcagttcagtcggaaggtctggagcggaggctgaaagttgcagggagcaagaatgaaggaggagtgcaagaatctgaagaggagcctttgcgatcaacgcttggtttgaagaaagacatttttcgagtaacggttgaaggagagaatttttgctgatggtatcgaccgaggggagggaggaaagaaaggatgcgagggactcgtaattttgaatagctccccaggcagctatactttttgccttctcctcgctcgctgccgagctcgatactgccagcgctttccatactttgtcgccgatagctagctgtcggctaggctcgaataaggacagagcgatcggtatcggatctactgatgcgttcggaggtgctcgtaggaacacggcgagccgcttgaagattgaactgagtaggccgtattggtcctgagtgagcggttggccgtcgttcgcggaagatgggtcgagagcgaggttgaggtacgtctcgagggtagctctaaaggaaggagagcaggatgcaataggttccccaatgcaagtaggggtgtaagagtgggtgagcttcaggtagaataacctgtgaaagagctagaaagactgggctgaccggtcgaggatgtcttgaccgtcttttaggatggacagccggagctgtcggacggtcgagctctgttcctgtgagcgcataagatctttgagactctttctgctgaaaagaaaaacaggacaagtgtgaaccagatcagtagtgagtataataaagctgctgacgatggcacatgtagctgaacaaaccgacttggaaggtgagtgagcggaggaaggttgaaaggaggaacgatgtccaaagacgctcaacatctggagttgactagtgtagacttcggggtcctggttaggatatgtgttctttccttctttctcgcaccctccgtcaggtattctcatgtcttttacatagctagcagaggatagagaacgaggtggtcgttgtcagagtatattttggtgttcctctgcctcattatcgagtgctctgtgggatctctcagctgacggggaaacacatcatgccttgtctctcagtgttggttgcactaggtattgagcacggagctgcttatttgttcatgtccagtgtgatgccacagtaactttcttataccgaacgaagctccgtctgtcgttcgtacgtacatccaaccatccacccatccactctcagctctgtctatggggatggtgagcaagcatgggtgatgaaaagacaggatggtgacagctcgagagcgcatatagtcgacattgtaataggacaccgtgaattttccaatacatattttgtaatctttcccaacagtccggcgccggtcactccattagagaattcttactcacttcattagacaatccgcccgatttttcctatcagcctttctcgccttctccctcccacccttcatcatcgggtcgaagttgatagacaagcatcaacacatccagctctccctctctcacactcttccataccctcattcaatcgtcacccagctactcatatggccgacctggttgcagacactttggcccttagtctggattcgccgacagacaagaaagctggcagctcgccccttccacctagttcgaaccgttcgtcctttttcttgccagtgtttctttcttttcttctctctttttttttcctctttctttctctctcgatgccttggatctctctctctttgtcctctctccttttcattctccaagtttgtcccaatgtatgttccgagaagagaataggaaggtacagaaagagaacaggagagggagagaacggtcaacgtccgacggcatcgaagatcgatcaatctctgcccgctctcaagctgcccctctcatcgatgccacacgtctagtcctgaggtctctccgctcgacctgttccttctctctcgctcccagtatcgcttcatcagccattccaggtccagaactcaaccaggaatccttcgtccgcctcttcgtctctcctgtctgcatctcgtacatggagagacagagacagacagacacacccacacatatacgccacgatctgaccatcacatccttttccttcgtatttgatcttgtgtcttgaatttgttctcactctctcctctttgtttttcccttctcattcggttcctgccacttctttcttcgtcctcgctcttcctatctcgtaccctccactgttcgccttggttccctctagactccacgccgccgtctttcagtgcggcctcatccgcaccaaacgttcccactcttgaatcaacctcaccccgtccgcccgctccgtccggctcgttggcaggagcgacctccggtccccgtccacccccaccatccatgtccgctcggagactaggcatgaacccgaacggactaccagctagaggacccgtcctcggagcgaacggtcctcgtccaggtggtggaccagccctgatgccaccaggcctggccgccaagcttgccgctcagtccgcacaaaggcaagccaccggaggtccgtcccttaaaggaccgatcaattcgtccagtccggtacctccgtcattgatgaacaggccagggatgggccaggcgactgctagcgcccccggtggtttggcaagcaggcgagctgccgcggctgccgctgccgccgggggtggcccagcaggcggaatgggaagacctccgcctggaggaggtattggagcgaggaggttccccccaggaagaatccctggtgctggcggctctggtggtatgcccggtggcatgacgttgaacggcatgggtctcggtccaagaaaggacgcgttctcaaactttggaaagatcgtgtatgtcttcatctttttctcttgcaatttttcgcttaaccttagcatccttgccgacctcgaccccgacttcttcccttttttttttggtggtcatcctccagtgatccatcaggtcgattaaatttcgcatccaaagcggtcctctcggcggacggtgtcgacttttcatccggtcagtcttacaagatcaacatgtctgagctcacccttcaggacgagcttggcaagggtcagtacggtaccgtccagaaagtgttccataaacctacaaaggtcgtcatggccatgaaggtcggtcgttcttttctttacgatcactgtgttcgttctcgcacaaccatcttacttttccttccgcggttttgttctccttctttcttcataggaaatccatctggagcttgatgattccaagcttaaagggattctcatggaacttgacatccttcaccgagcggttgcgcccgagatcgtcgagttctatggtgcgttttttatcgaatcttgcgtatactactgtatggagtacatggacgccggttcgctcgacagagtttatgaagacggtgtcagtgaggaggatgtcttggccaggatcaccagtggggtcgtcaaaggtcttggtttcttgaaggacactttgcagatcatgcatcgaggttagtctcttctcgatcatatattcttcttctcaaaatcattgtggagagtcgctgattaccagctcttcgtaactgctctactcgcttccgattcagatgtcaaaccaacaaatatccttgtaaacaggaaaggacagatcaagttgtgtgatttcggagtgtccggccagctagaaaagtcactggcaaagacaaacatcggttgcgaaacctacatggctgtttgtccccccatctgcctctacacttctttttctctcgccttcgtacttatgctttcatcctctccatctcgaaatctttcagcctgaacgaatctctggcgagtacgcaaacagcttaggcacatactctgttgcctctgacgtttggtctcttggtctgtccatcattgagaccgccatcgggaggtacccgtatccgcccgaagtgttctccagtccgctcgcacaattacaggccatcgttcatggagaaccgccgacattgccagagacgttcagtaccgaagctagagacttcatcgcttgctggtttgtaccattcgtctatacttcaaccccttctcgatcaggttttgagggttcgttgtgactaatgttttattcatctctttctttagtcttcgaaaagaaccgacagcgagacctacgtacgccgagctgctcagacgtccattcctactggccgacgtcggtcgagaagtagacatggtcggttgggtcgctcgaaatttggaaaaacgggtggcaagaggtgcgccaatcatgcctccggccgattccggaccaaaggaaggttctgcaccggtggtcagtgctcctggaggaggacccaaatgagaaaacatcagcacagatgccccaattccattccctttttttcaactctatattcatcctttttcatcttcttgtctatcacccttccttcatcatcaatccgttcgatcgtgcggtaacattctggaacatctttcttcccaagtgcctctctgcccttttctcttggatactcgatttctttctcttacatacatgcgatcatcgtgtctttcttcctctcgatccttcctctcctcttctcccctctccttacaagcttctgatccttactcggttgcctctagtctttcctctcagaaacctcactccttgtcttcgctatattacaccaaatttctatttttcttccatctatctctttttctttcttatacatacatcgcctgttctgccctatccctttctttcatcggtccgttcgtccgctcttgttagagtcttcttctcctttcttctattcgctctcttctcctttgttcatctgttcgtctgtttcctcgttgagttgttctttatcgttattgatgtatccttgattactttctctgtctcttttatctccttacccagaaaaagaaaaacaccctctcttgtgttttttttcttcctattcgaagacagagttggatcaacagagagaaggagaggcgaatcgatcgatagggatttcgttctacatctctttttcttttcttttaaacttcgatctttgtctcgttcctgataccttctgacggtctatcgtcctagtcgtgcgtcgcacatcgcgctctccatccggcaccatctatcttccccaaaaaacgtatgaacacaaaaagaacaacgacaaaaatagaaataaaaacaaagaaagacgaacaagaaaaggaagcagaaaaaaaaaaagaagaggaagagggatcaagaacgtaaagcacaaacggtgtcatactctactctaccgagtctccatgggatcccgctttgtgcgtagaactctcgggggtcttcatcctacgtttcatcccgggttgcaagatggggttcaaagaaagcaaaccggtttcgaggacagaaagagtcaaatcgggaacagttgggtttgactgtcaacatggggtggggaagacaggaaggaaacagaaagagcgacgtacggggcctagattcaacacagtcgaaatctgttgcaacctgatgaatttctctctcgagcctccaaaagatgtctgggtggtaaggaagtttgcgatcgatcgtagatctctatcaaaccgtagtgcgccgagctagacccgtggaataaagcacacaagacaacccacccggagagaagaaagatacacggattgtcaggatgacggaaacatgattttgaaagtagacaaaagggggggagaggggacagacctcggtgaatttcatagtcattaacaatttctcccatggtcggaccagtacttcgacgctcattaggaagaacgcttggtagtttgcgtccgtaaatgagtcctaccatattttcattccagcccatgttgaggtcaaaagaagaaaccccttgtcagattcatatgcacgttcagaaatgaagacagatgaaagtctcaccctgtaaccctcgaccaacgcgtcccatcctctagcaaatctttttctgacgacgtcttggaactctgcttctgcgtagctatcttcgtccaatgtataggtaactcctttgtagcaatcttcaataaatgctcgcagtctcggtcgaacgagttggttgaatagttgatcgaggcttgcctgtttgtgggcgtgggttatcaagaaggaagtgagcttgatgttcgatggactaaacttgatctccacattttatctgtcgacgacagctcacaaaaagacgcaccttgagagtcacccggaacttgtcagccaatgcattcaaaggcgcgaaggctgcgatggccttctcgacctcttccgtcaagaacgcctgggggattgcgtcactctccagaatctcatgtagaagtcgttctgtgtgatcagccgaaacgtccaaatcatttgcgtatacctggtacgttcaataaagaacagatcgtcgatctatcatcagaaccctctacgagcataaagaatgagagagataaggacgaaccacaaacgttcctctcatctctctctctaatctctctgcctcacttcccgccttcggtccacctcctccggtggtaccaccctgagtggctccggtcacacctgcacttctcacacctgcgtacacaccgtccatcttcctcttcacacccccaaggtaatcaatttcgatcacttctgccactctggccgtcattctctccaacgtactcagactcgatccggcaattaatcggtacaacactgatttgagcaaatagaacgtatcgtccggtgcggatgaaaggtgtggtctagaagatgtgtctgagatggacaaccggagagctttatcggtcgtatgtcggaggaagaacgtctcaaggggctcatacacattttgaaggctttgatggaatagttgttgagagccactggtctcgatcaggttggttccgtcaggagacgactgggaaggtgggagtgatggcgggaaaagtggagagtttggattcgcagaaggcggaggtactgaacccggatcgacgtcctacgtagacaagattttagatgaatcacattcaagcccagacaagcacacagtccatcagctcaacagaattctatcggtgccctgaaaaacaaaacggacctgtaatcggccccataagaaacgtcgatagagtccccaccggctggtcatgcctgttagctctctcaacaacttgtcgatttccctcggatctggtcctgtgtcttcgtcagccggatgaggagtaggcgtcgagctcgagggagtgacttttctattggcgttatatgtgttcagcagcgaggtggcagcgttaggaagagaggataggtgagaacttgacaggacactttgaggcggaggtggcgaaaagggtgatctagcggctgtggttgcgttcttagtggccgacaactatgtaccgagcaacaaatgtgatcaatcaaacgaagaagaacagaagatgcgttatgagatgatggagggaacagaccaatctgcgaaccctcctttcctcctcccaaccttctagcaaacctttgactactcggtcaacctcttcctgtaatcgaccaacaacagccttcatccttcctgatccgtaatatttctccactactggttgatgctggtctactatcaagccaatagactcgaatagagccgtaagatgagctatatagtataacggagaggaagcttggaagtttcaggtgatgtcatcagacgtatgagatgaacatatatttagtattgggtcatctcacttgacaagcggaatgacgggatatctcactctttccagcgctcatgtttcggcctcgaaccagacctacgacaaagtcaccatatgattccagtccctcgttctgtgagtcggttcaccgtgtcaagagcgagttatacacgagttgagccagaagacgaatgtgttcatcaaacccgttttacacagacagctgagtagtctcgccatagtttgacttacttcagctccgatctctggccataagcgaaagaatcggctagttgcaacctcatctcgagaagctgctgctattccgaattgacgagaaaagatgtgaagaagctgggatcgaaggtcatgtaaagactgggagggaagagatggatactcggatgtaggctgagaataattttggcgatgatcgatatgcgcaacttgatttatatcagaatctggaattgtaatcgaagtggaagaggggatagaacttacaacgacccgagctgcaaagccgccttccatgatctcctgaggaacgtccatggctcgtcggcaggatctggctgctgtttcccagtcttgggatgcgatggaagtccttaagatctctaaagaggtctatatacacacatatagttcgaatgagagtgccaagttggagaatgaaacgagtaaactgataagtctgcacagtcacttggatgtgttgccttcgctcgtgtgcagtctttgacgagacatatgagtagagaagaacggtgacgaaccttgagctccatcacttcattcagtctatcgactgcttcccgaactctcttcagctccagatccagccctctgacctttccgccgaccctctctgcgatttcattaaccaccccgatcctctttagcaggccttccttcttctctgcgctccgtccgagttgtccacctcggctggtcccatcgccatgctcgtcacttcccacctcagcctcgacctgctcaatccgaggaagcagttttttgatatttgtatgggccgagtcgatggtagttcgatctgataaaagagcatggagatcctgagagagtgtagactcgagcgtctgaagcgttgccaagtgagggagaagagctgaggagagtaatgtcctaggatgaacacgagaaggacccggtggcggatcgaccgaaggcgtagctgcctgaatgtccattccgagacgcaagctagttctactgatgagtacgacgagtcactgtttgaggtacagttgaaagatgggagatgaaatccaaagagccccggagaattgagagtagcgttggcagtgagcccgtgcgaggctggttagggttaaatcccacgtgttttgtgccctcgcgacgcgtcaaagaaacgcgtcagatcgacgcgtcggtccagctaattacacaaccttctcggtcactctggccgtcttcgtcctcgccctcgttctcgacatcatctctgtgtcgtttggtctccttggtctcttttctgtttctaatttccaacagcgataagtcccttcggaaatttaggggataatcaagaagtttgatccaagttttcctcagatcggccgatttttacccatgccacgctccactgtcggcacgaccaagaaacgtcggactttgtcacacggcaaaggagcgacatctacatcctaccaacaaacctcagaagagggagagggtgaagacagctcagatgagatgctggacctcatagatatgagtaccgaggacggacaggactcatcgacagtagatgacgaagcatccgaagccacaccacagccgccttcatcgccgcatcttccgactccgatacctgttcctgtccttgaatctcgtcgtgctcaatcaatcaaacgggcagccgctttgaggatcagaacatcagatcaaactcctcttagctcatctccgatcgtgtcccgagagttgaatcctcattcctcctccctcaggcgtacatcatcctccatgtcatcgcccaggccgcacccacctcttccaatccctctggtctcctacctttgcagtcaactgctttcaccatctaaatcttctcacccaggaagatcgaccacgcctctaccgaacttgtacatggctctgtcactgcttcgaagctctctaagtgctccaggagcgagctctggcccgagagaagaaatcgaaatgaggctgctggagggatctgtcggagtagaaatcgtcaagctgtcattggggatgggagttagaaaacatttagatactcaggataacgtctggagagaacgaggtaggattgaggctaaagaggtggagcggggactgggcaaagcggtgagttcgatcaatggaatacatatccgtccgcttgactgcctctcattcttcttcctatcgttgtatgcacataagatatcactctgtcaaagggtgagtatatatgcccatttatctattgaaatcttctgattaaacctcaatcaattgccctttttttttaaacctttccagcatccctctctagcctcgcaacatctttggcgcttggtcatcctccagactgatgtcaatgccttacttgtaagtcgtctctgcttctcttggtctgacagtgttcagtggctgatcgatggctgcatgtattttaattataggggaaccacaggattgctatcaaagccctcaaaaaagcactggattcgccaacgttcgtatattcttctctttttctctgagacaagtgtaggcaaactacgtttgcgtatctctcgtattgatcgaagcattcattggtgtctttatgtactcagcctctcactagctgcccgcttccaacttctcctctctcttacaaaccactacatcaccgcttcgcctccttctttgtctctcgctttgtctacactctctactctccactctcttgccacaacgaacgacgagcctatattagctctcctttcctcaatcgcaaaattaggtatcctggctcgagaaggaagctggcgagaagctcgaagagtgattgattccgttcgggcccacccagaagttcagcctttcttgtcagattcgaccgatccttccaaaactccagctgatacagcccgacctatagagggcgtgaaggcaaaggcattggagaagcagttgctcatacatttcttgggcttcgccgcgctcgtctacaatcatcttggtgaagctcaagaggctaatgcgatgatcaaggttcttcatgtcaccttggatgaaggcaatgagggcaccgagggactaggagggggagtttgggaggttagttcgaacttactgttttggacactcatatgtgctgtgaatacgattagaggtttgctgagcgtccatcttgtttgatgctccttcagatacccttgcaacctactgctttcggaccatatagcgatggatcgatcagcgtcccacttcaagtcctgttgacacctccgcatattctatacgtccttgcatgtctgataacatcgctttccaagagagaccctgctgtcaaacggcctaagaaacgagtgtttgcagaggaggggatcaggcaactcgaccaaggaatagaggcggcaccgggaatatcttatccaccgtttgctacggtattgcacgtaaaggaatgggaggtcaaacaagctacgatgcatgctgagcttcagtgtgagataattagtgttgccatcatccgttcagaatttgaagaagcccaggaggtacataatcttctcttttatcggtctttccgacccctttgcttaaccacgctaatcttatatatctcatcacacccgaagagcatcgatagtctaatagcctaccttcggaggaagtctcttttcccctccttcagcgcacaagtaactcttcttcaagcccatttatctcattcgacacttcaaaccgaccgcgctttaatactctaccgagtcgctcatcacaccgcgctacagatgtgcacgacgtcggcgtcggctcgagatctggctttagcggccaagttgggcgagatgggtctaatggtcgggctcggtagattggatgaggtcagaacagaatgtgaaaagattgcgaagaagtcttggggaaatggattaggagagacaggagcatacgtcgtcccagctggctcagctacggtaggtcaaggaggtgaaccaaggtctgaagcttcgagtaaaggagggaagatgagagacgttacaggggctgagaatgtggtgttgaaggtttcaggaggaatgttgttggctttgatggagaaggagattctcaaatcaaagtacgtgttcctcttctctttcacgatattgaacttgaaggcgcatgtctctcagctgatctagtcgattatccttttctttccttcttcaagacaacatctgagatcctgtcttgagctagctacaaccgctatagacaacactgcccggcccattattctttctctaacggctgctctctacttggtacgtctgattaataactccttcgttcatcagtgccaacatctcgttctgtcgaggaatactgtccttagctttgttcatatgttgaattttttaatacctcctttatcacgaaactagaacactcgagctcagcaatcgctagtgatgcttcagacggcccttcatctatcgcgcctactaggaaaggacggttctcacggtcatgcagctctaggtctctggttgggagagaagtatgagagtgagtacctacactgtttctctttgttctcattagggttgtgtgtgacgcacagaaattcctgacctagtggtcattggtcgtcttggtacgggtataggtgtgctgaagaggaacaaggatccaaatgcggctggagtagcgaaactgtaagtctcgggtttcaaatacgaccagacgatctgtgctcaacctcggtcttgtttggttgctacagaaaccaacgacatcgagaaaaactcgccgagctttctgcgtccctcccccatcctagcccaatacagccgaaaaccgagcatcagatgatggagtgaatcatgaatccatctgtcttttgcctgattctctattattcatgctttacaatgtttgatttcacctgatattttgatctatacacaccaatcgaaagaccgattggacgtttcttctcttctttttttttttgcaagtgacacgcaggaggaaagcatttcatatctcaactttatccttatcccacgctctggcctctccgcgctttgtgtactgcatctccattacccctttctccctattctccatgtccttcaaccactcgggtttcgaagcttctttcttctcttttcgtcgtttccttcttcgcctctcggtagatgtgtctgaatcggatgaagaagatgagccgagaacattctttcgagattttcgagccgcttttcgatcggccttctcttgtctcttcttctcctatgtttgtaaaacgaaagacaaagacgtagaccatgaatcagaaatcatcattctccccttctggatagatggaaaaagctaaggcggaaagaagacagcagacttaccttcttggcccgccgtttagcctcctccttttccttcagtagatccaacattcgttcccaaccttcgcctactaaaccctgtttgggcacaggcgcaacgtccaacctagggtcgtagtcttcttcgaaatatttgtccatcttggacggtttcgtgctttccggtaaggacgatggtggcggcggggacgatgcgttggggtctctggcatttgattttatcggtagaggtgatccagcatcccggccgtggacgcgcgggtaagtctttgaacttgacatggagccttctcttgatagagacgaaggcgtatgggtgtaaggcgctttgacgatggaggatgggggaggagcgggagatcgaacgaaagattgatatcggtctgttccaggtgtttggtgagtcatcggtccgtctggttcgatttcgggggagcggtctttgcgacgcgaacggtgtcgagaggaaggtgttccccgttctttgtcgtcttggttgtagtgacggttatcgtctgaatcggactcgtagttccgcgattctcttctccgtttcgacctttcgtccgtctctctcgaagaggaaaccttgatctgatccctatcccgctccttgtctcgcctgctatctcgatcacgttcccgtctgccatccctatctctatctctgtctctgtccctctcttttcctttactttctcttgctctacgatctgtccgtccttctctttcggcttgctctgtgatatcatcccacccgctcattcctctgggtggtgatcgagatcgagaccgagactgtcttctcgatactgaacgactggatgaatccgtccggtcgagagatcctctggcgagagaagcctgttgacgaagcagagcttggttgtggtcatccactgagcgaatcatagaggataagaatcgtttgttcgttcgtgtctttggagcggccgaacttgtcgagctggagaagaggaagaagtgaaagacaaggaaggatggttgggacccgttagatcatgcgtttgaacgttttgtatacatcaagaccgtccttaagctcgtagctttgctggagaagtcaagaaggagaatacgaagagcacgaactctgatcgatctgaataagctcctagaccatattctttccagatcctttccttctcctttgcttcggaagcgatcaacgccgctacgtccgcgtcggacagagtaccggaggccgaactcgaaccggaagcggaagtggctgcgagaccgagagatgctctttgaaggtgaaaaataatggagcttgaagaaggagccatcgatgagaaggaggcaaagcttcagcaaggaatgttgctgcttctgtcggcgttggtgtgatattggcaatagcggggtgttgcttgtaggtggtgactcgatagaaagaggacgaatgttgaaattcagatgtcacttctatcgctggctctgttcaagttccgcttcttcttcttctcgttccgatcttactaatcgcttttgctttgtgaagtatcatcgatatcaatcttgagagatcccactgaccaccatcacaatcatctcgaccaaccccgtctaccgctcaaccgatggctacccctcctttcactctcagctccgctcactcgtacgcttggtctattcctctcgctttgaaattttgactcatctttgtgttgcatcctccgttctttcattgaaacggcacaaaccaaaaagaaaagtgaagatagcccaagcgctgtggaacacccaaaacgcaaacttggtgacagccgcttacactacagactccgtctggcgaaatcgatcgacgttcgttacaggccatgaatctatcagacagttcttgacaagcaagtgggagagagaaaagggatacaagttaaggaaggaggtaagtcgagcttggtcctttcctcggtttgcatgcgcgcatacatgttgacatctatcgtttctggtcggcgagaatccgaaagttgttttccttttcggagaacaagatcgccgttcaattctggtacgagtattctctggatcctgcattgaagaccgattggttcagatgctatggtctcgaggtttgtgtcttttgtttcttgcacgagaatgagtccttcggagaaagcaaaggaattaagtagagaatgacgttgtttcgtttgcggtgaccttagcattgggtgtttgcacctgatggaaagatggcacgtcgacaggtttgtttcccccctcgattttgtctatagggagacctgttacccaaagaaaccgagatgctgatctatgtaggacgcttgatcatatacagatgtgcggaaacgacatatcgatcgaacctcaagagcgatggttcaaagatgacatcgaccctgatgcgagttaccgtctcttgtttgcgctcttctgaagatttgagactgactgattgttctcggttgaaacagagcgtggagatctctgctgaacactggacgttggacaagccggtgttccaagagtagggatgataggtcctttcagtgaagagatctagtattatgcatgcgatattacgtatggagacttctattggtacatggtagtaggatacaacttggaaatcggacagatgcagaccgtaagatgcaggagaaggacagaaagaaaacagacgacatccgaaaagaagcgagagacaatttagtcgacgaacctgtacaaaggacaagagaactatactgttagcctttcgatcgaaagcagacgaacgggcgcagacgatcgagtgagagaaggaaagcaacgactcaccacggcgcacgacagacccattcggcatcatccaccctgccaaagccagagagatccactcgatcgcttacgacgacgacgggcagagcggacatcacggctctcaccatacgtgacggaccggcttcgctgattgtttcctagacttgatattgtagcaagagagagcgagagggtgtggatgaggatcgatcccgatgagcaagacaagcaggccaacaggttaaacacgtacaggaatagactgatggacggatttggtcagatggtaagatgcatagaacgatccgcctgcgagcagggcacactgcttgagcacatgggaagggattggtacgagaggcatgataggtgtgtgttatttaaggatcgggtgcttgggtagtgaggcaataagataacaaggcagtagatagatatacgatcgataagagaacgaagaagaagagaaagaagaacgactctaacggaacgatgtgcatctttataaagcaaacgaacgatggagcccgtcgagtcaaacgtcagcgaaccctctgaccacgggatctgccagcacgggaagcgttgtcagcattgcgcacacccggcactcgctcgctcgatcgatccattcatccatccatccatccatccatccatcctcagacgcaccaccgcgacggaacgaattcctgctctttcttgaatctggtggagtcgtccggggcgggaagggatcaatccttggctgactaagcgaattctataagccacgaggcttcgtcgccttccggtcgattcttaggtcttcgatcttccgtcttcgatcatccatcagcttctcgttctttccaagagagacagtgtgtgtgtatagtgtcttttatgtttgtgcttatgtttgcgtgtgtgcgtgtgtgcgtgtgtttcgaataatcccgttgatcatcgccgcttgttctgtagcgtgccaattcattagatcttttcgccgagaactttcatccctatggctccctcttccgctcctccggcatcggcctcgccggctcttgctttgctcttcatggattcgacagcacagactgacctgccgtccgatctttcagaatacttgtcgtccgctcaaactcttctcgcatccttcccaggtgacggatggggtaaaccaaaggtacacgccggagtcgtggacacgttcaaaacatccggtaaacctatcggttcggttaccgccgacggacaagtctggtgcgcgagaagatcgatccatgttgttccagaaggataccaggccttcaaggtagaacaaacttcttgcctattctcatacttctagttgatatccgaccggtgcattacccacccgttcactcactttcatccgtgttgactgccgatgaccttccgataccttgttggtgttacacccgtagaatggactgttgatcgatcatgccaaacacgagtcagagtatatcccagcgctgaaagaaatccgcctagtcgactcgctcaaccctgcagatggatcgtatactgctcaaagtgcgttgagaatgtgtttcctccttttttttcccattcaattatgtctcttcacatcccttgtatgcgcgcgaggcgatgttaactacggattctatgcggtttcaattatttcttcctcactcattctcattctcattctctcactctcacccacccacatacacacactagtctggagcttggactaccatcttcctagaccactttctcctagaaactttgtcatcctcttcttaggaatcgaaaccatcgttggcgaagagttcatcaacatctcgatcccggtcgagaccggccagccgtcagaaaacgtgaaaaccggatcggtgagaggacgttatgtcagcgtggaacgagtccggctcacgggtcacaaagagaacgaagtagagtgggtcatggctttggcttcaaccccaggtggggcaatccctcagttcatcacaaattcttccctgcctggagagatctcgaaagatgttggctactttctcaaatggcttgagaatagatcttagcgtgtgtgtatatgtatatgttgatgtatatgtcgatctgaatgtctgctctaccactgccaacgtcctctgtcctcataccatcagtcttctctgatagagagtgtctccttgcagtctgtaaccatggtaacatagacccggttacatccgaatagccgggactctgttctaccggcttgcccaaatcatctccatcctcatcctcatcctcatcgttgacctccgacctccgaccacggctctgttctctgtcctttgctttgctatcaagtcttcctggccggcctgactcctgtcggacacagatcctcccaatcatggatactacacccagcctgcaacccacagcatcaggcccagcctcaggctcatcaactcagatagaccccggtcgtcagactctcctcgactcggctgtttctttcttgagagatccaaaggtgtgtatcccgaggagttctcctttcgggaaagagagaaagaagagaaaatagagcaacactttctgaccgtttactctgataaccaacgctcaacttgtaccaggtcgcgtcttcctcgctctctcaaaagattactttcctccagacaaaaggcctctctgatctcgaagtctcccaagcactttcgctcgccggatccaacgtttcctcttcctcttctgattccccttcggccccttcttcctctgctcagaagagaacatatccttcatccgatggaccgacagataggttctcaccgtacggccatcaacaagctcagatggctcgaccagctctaccaaagagagattggagagactactttgtaagtcgttgtcgtttcgatacgtcctacacactgcgtaaaagagtctcaagatgatttctgatatcattgatgccgatatcctgggtccgattctcttctggtggatcggaggaaccaataggtgatggctgtgatctctggagggctgatgtacggtcttgtagctctcatcaaagtatatcttttacgtttctctctcagttgttctgttaccatgctcttcgaacaggatataacctgatcgttttttttaaaactataccttatcaaacatctaatcacctcgaacaactctagcattatatccttccccacctcaagcctccgccaacatcaatctttacccaaaccagtcaagctatccaagcacaatttgaatctttgaccacatccctccaagcactcgtcacctcgaccgaacagctcaaagctgagctcgagcaagacagagaccgagtcagaggtttggtcgaggaggttgagaggacgttaagtcaagttagaaagagggaggaagaggagagatcgtggagggaggaggtcatcggtgaagtagagggaatcaaggaagaactacccaaagttggttttcttgttgctacccattgcccacagggcttgtacagacgtgctaacccttctatcgcacccgttctccttctcgtacgatttagatgctttcgtcgcacacaactcttctccaatcgaatctgacgtcgcttcagacagaactatctaccctgaaacctcttcttaactcccgatcaaacccacccacattttctgccaacccccaaggtcctcaaggaatcggtcgtcccatgggctataacatcggtggtatcggagcgggagcgggttcggcaggtggaacacagggaatccctagttggcaacaacagctgtcaaacggatcatcgaccggtagtccagggatccctagctggcagcaagcttcagcaagtgaaatcccgagttggcaaaaaccagcggctgtgtcttcggggacggaagacgaggcggccaagataaagaccgaagaagttgccacaaaggaatgagagagctgtctgcctgcctgctgtacaagttttcttttccaattttctttttctttctctttaaccggccttattctatggaatctatgttgtattgttctctgcatgcttatgaccaaccgtcgactgaagacaaggagcaagtgaatggcccgtcgtctaagaatggccgaaggagggtggctatgaaacgatgacgcgccgggttacccgattttgccggtcgggctcaaaatgagattttcgcctccttcagttttccactctttccttgaccatcctcatccccttccgttcgtttcatcgctccttccttcctcttttgccactggaagacatcctgtcccttcgtatttagtaccagggtcgtttcgttggctctttgtcttttatttgtattcttctcagtccttgtttctctcttcagtcttgttcgctcctcaaactttcggaatagattcgtgttcataccgactctccatctatcgacacctccaatctatattcggcctttcaccacacttttcttcaaatacaaacaaggatgagctccaaaatgaagatctacgctttgcctcttgctaggaaagcaggatccaaacctctcgttgtgagtctctccacctgtcaaccgtggtctactcctatttcttgtcttcttttggtcttacacgccggtgactgatctgattagaactcgcttgtctgtcctccgtttcaatgcgccacagtacttttatacctctctgcctcctccatcctcaacggcgcccacgcactcgaaccctcatcctgataaacatccgctccgcctgaaaattgagcagaaactggacctcctaccgagcgcgcctctgcctctccagttaacagccaaggcgactgctttctggatggatttcgggaaaccagatgcggccagttggaaacagaagattcataagctcggggaacgttggatggataaaatcgatttcgaggagtggagtctgaagagcgtagaacatgggttggtaccggctgatttgttaggggaaggcgaggaatcgcacggtaagatcaaggcggctctcaaaggcgtcccggaaaagggaaaggatggagaacaggaaggtgtgatacggacccaaaatgcaagaaagcagagcgtggtaggtctcttctccctcgggttaatgtgaactcgtatcggcctgactttgcttctttctccctcataccgatatttcgaccagatcgagctactgtatccggaatcgcccaaaatcgacactcttgatacatttgaggactttcttaagagccgtaggtccttcatacccctgttctctctactttcctcttcgaccacctcgactgagaccttcctttctcttcttcgttcttcctgttcgtcaaaatgtaggccaaccgttccacgacaagatgttcaaacgaacgctcgcactcgttccagctgccttagcattcggaatcttgccgatcgtaccaaatttcccgttgttctatgtcggttggagagcatggagtcactggagaggtttgtcttatctgtctccttcatgtgtctctttggatatctcttcattttctccgtttaccttctcgagtcaaggagaaccgcgctcaactctcctttcgtctgttgtgcttcttcgattacggaataccaaatttttgataaaccagcccgaaatgcatccgcgctccttctgaacctactcgacaaggaccgaataaagccaacggaatccaaagtgctcactgcgctatacgaatcatcctctttcggcaagaagacaaagagcaaagagaacggcaaacaagaagaccgacaggttgaacggttcttgacggagaagggcgtggaggaattagtgggtcaggaaaaactcggagacgccgccaaggaagaggtacgtgtctttccttctttgcttctatcgttgccgctttttttctccccttcttcttttgatgtggctgaaagatggagatcaggaagctagctgaactaacacatgggacacttgcatctccatctttatgaaaattggattcgatcagatccttcgagcggtccatcagacagctatccggttacccaagtcaaaccaagaacagagcccgacaccagaatcacacaaggaaaaaacagactagaagcattccttcccccccccttctttgcccctattcttttccgtcccttcatatttctctacatctttcttcatctgatttttttttcaatttaaaggtataccaccaatcgagcctgtacacgtttccctcccatcgattcatcttttttcttcatcacaaatcctctcctctttctcgccttctcctcgattttctcaggatgtgtaactcttcctctcgctcggtctcatcctcacgctatctttgtcccttgcctgtcttcccttctttattaaggaggcatcacgattctcttgtttcacacagaataaacaggtcgttcactatagatgtaacggtgtgactccgttggtgcaaagccaaggaagcagttatccaaaggataaagaaaaaaaaatacggccggaggttgaacatcaagagaaaagaacgaataacatgatacatcgaaagaaagaaaaaaagatatacaacattgaaaggaggacagatcggatcgaatcgaatcgaatgggagaggagaggagaggaggggtgtcgttccctccttttttttcgtttaatatatgaatgcctagtctcatcgcaatctgattttggaggggtcgttgagagaatgagaatgtggcggcaagagcagtgagcgtccgaggagtaaaaagataaaccagccgagagactgaaaaggaagaaaaagataaggacatcaaacaaaggttgcaaggagggatgaagagatagtaggaaagatgaacgagcggtatctatatgagcgtgatgcgggtaacctcccgacacaggtggagggtggagaacaaagaaatgatgccaggatatgatagaatgacaaatcgagacgttatggagacgttatgaaaagataaacgacttgccacacggagggaggtaggtggtacaagatagaaaaacaacaactctggaagcaaactaaaggcggtaaaacaaatacactattcactagctgcttgctaaatgtgggaaggaaaacgatgggcgttcatcacctaggttcagctgcaattgaaggtggcggtcagaacagcagtcgttcacaaatgtgatgtgtctgatcaatagaacatacccaacgatgagccattcaaaagcgatcacgtcttcatcaatcaaacatatcgtaacattcaactatctagaacaaacaagatcgttatgtcaggtgcactgtacaagttaagagattggttcatcatgttgaagggtcatacggaaacaggtgcttgagtgcgtaaggacgaatcacttgaaatctgatagtcatcatgaaaccccaggggagacgtcagcctgcttccgactcatgtacagtcatgatcaaacttactctaagagggttcgaacgtccggtagaacctcaagcactattgattcaagctctccacttactgaacagttggcctttcagccagactgagcgccatgaacgcgggaagtgaaatcgcgcatgagcatctagacacacggaaagatgaggataacggatacaacatactctgccaaggggtctggcgcatctcgtcgtatgtctgtgtcacacttctcgattgctacaagcaggtcgttctctgtcgcccgttctagccgattggctctatcctctacgctgaccgtcactggatcccttgatgtcctttcatcgagattcaactttccgccagcactcgatcctatgacactaggcagatcatcgacacccataacggatacttggtccgtcacgctcagaacagggactggcgctgggacctccaaaggagttacaggataactcgcgcttatgtttacctgcgagacactttcattgttccgtctgtctggttccagatctacttgagctgagagaaacgggaaagtggggttgataggtgccgattgagttcgttgaggcatagcaaatgagggtggtcggagttggtctaacgatattgggtgtggttccgcaatcgagttctccaagctggcgtctgctccgtagtattcaaactttgagccggtatcagctttcatctcctcgtcctcctctgcctcatcatcgccatcgtcgtagccttcatcagcatcgtcttcgagagaaaggatgacccccttggcctctgcaactttttctcgaagaaagtcggtgttgaacagacagagcgcgcgttccttcttcttgagggtcaagatcatgtctgcgatctcttctgcgtatgtcggttcgatcagcgagatccctgctagtaaccggttgtgctctgttttaccggcaagagaattcgtacgggatagattgggtgttttagacaaagtgatttcttctcttgatgattctctactcggttcagtcttgatgacgacgactgaggggatttgaagctaggagatcaccaggagcataatcaaggcagaacggtcagtcacgatctatcactcaaatattggcacctgccgcttgaatagagagaaaaggaacataaacatttacgttctcatcaacggattcctcgtcagccgatccttgagtcatcgtcggatttgatccggtcagcatgctgacgagttggtcgaccccttgggagaaatcaatggatgtgatagcatgttcacgctttccctgctcgatcatgagcgcttcgtgtcttttttcgggactggaagagaacaagttgttacggctgaggctctgagctctcgtctggaatgtcatctggtagatcggaatcgagtcaagattcttaggagatgattctttctttacgcaaacggagtctatcatacgcacggcctctgcaggatcactattccgtctcgaatggcttcccgactcgggcgccaatcccaaacccagacctagacccatactctgtccttcgagatgacccgggattgagggaaaggccgcgtggtatccaacgctagggccgtcgggcgagcccttcaatcgaagctcggccaatttctcccctcggagttttttgggttcatgaagccgtaccaccatgcgtttggatccaagtagggcgcctattcagacaccagagaacacgtctttcacaaatcggtaagttgtccggggcacaccatcaatttaacaagtactgaccgtccatagcgactaaggcagcatgggctgttcaggataaagtggcgttggttagctcaatgctgcagacgtggtcaaaaatcatcaagttgcctaccctcttgaggtgtctgatagctgacaaatccgaatcctttactgtttccagcgtcatctcgcatgactcgagcactggaaaggcaagagagttgttcacatcgaagggctgagcggacgtaatcagacctagacgcacacaggtttggtaaaacaactaacctgacgattcttccaaagactctgaagtgagtgaacatatcattggaactcatcgaagggtccaggttctatagtgatagtaatgagtacacctatcagcagacaatcatggaaaaagagtcgagttcactgagacttgccttgcaaaacaaattacaagggtcgataagtcccgatacgctcgtcgaaccaggtccgaaggaaggcgcgggctgaacttgctggccaggtcctgttggatagacatagacagtcaagatgcttgactcaggtatctgacaaaacaggcaagaaaaaaatccaaaaaaaaaaaaaacagaaaaggcagaaaagaaaagtgggcgcaccatagtggccagcgttcagattcggactcgccagacccaacatatttggactacttccattcatgatgggcatcggaatctgactgagaggagggcttgccttccaagaaccattcatcccaccaccgttaggaacgaatgaaggggcaagtggagagaacccgaggaagggggatcggaagtagtaactcgaaggagaagacatgttggacattgaacgaagattaggggatagcggagcgattggtattggtaattggcgacgtggattgtaaggcacgatagatctgtcggtttgataggtgaatttggaagagatcagaaagagattttatgcaacgatatatccgatgacagggaagagttcttacagaacttcgccagtgggcatgataggctgtggtcatcaccagcgcagatgaagatggagagtgagtaagcagacaatctattggaccgtcggaccgagaagatttgaatgattacagggtttatctcaaaccagcgggcatcgtcctcataccaaaactcgacgagcgcttcgggagaatacccggtgtcccaatctatatgtcaaatccgacttatgtccaggttagtaagcatgcatgagaggaacagtcgaaatggtaccatgcagaataaagggagagacaactcgctttgatgcggcaggatcagagatcgtagagcggctggcctgagtgcttcccagataagaccaggtgaggtcccttcggggaacccagagatgactcgcggcacactatcaacaggagccgggaggggaacgaaaggagggggataaggtgaaagttgaaagaggttggagagagtggtaagagccttctcggctacagaagaggaagccaaagacggaaaaatcgaccgagatcagtgagtaacatgtgaggtatagatgtaagtgtgcgctttgggtaaaggcagaccgacctcgaacagaatctctaaattcgacggttcctacaccgacatcaagaacggcaaggaccataacccagaaaactcaggcttcaacactctacaaacagaggttgctatatgtgaaagccacttttgaagaaaaagacacaccttcgatagacccgtacatatcgaccgcttctctgccaaggttcagtctgatcggtagacaatcctgaaagagctcggcaatctcaccattggacatgctcgccggaagattggaaatgtgaaggatcgttcctttctagaaagtcgagacaagatgtaattgaaagaggttagtgacctcgagcaagtttattaaaagcgaacacgagatctcaagcgaaccaaatgggggtgaggtcgggcgttgaacatgatgatgtacgtgtatgctgatgtgatggcgtgggattgagattgagattaagattgcggacgttcaaggacgagactcagatctatatgggttttaccagtcggcacaacgttaaagactggagagacccaaaagatagagagagagaatgtatcagacggtgactgagttctgtgcacaaagagaaggttgaatgcaaacgagaccaagggaaacgacagaagaccgagcgagaggaatgtgagagatagatagaaaagagagatggaataatcgattggtctttggcaggaacagaaccagatgcacacgccaggggagagcgcgataggcaaaggcgtcggttgggggtgcaacgcctacacggtcgccagctcgtcttctggctactcactcaatcagcgtccacctgaactatcacttctttctttatcccgacgggcttgtgatcgatatcatttttgctcgagagagagagagagctcaagcacacgcacacacacacacatactctattgtgtacacatccttacgcacttaaacgtatccactcactcactcactcacatcatcacatacacactctcactcacgcactcactggattcttgttcacagcccaggaaggcaggcggtcaggtatagtcagcaacacaagtcaatgagactatttgtcagtcgaccggtctaataacagggtccagctcatgggttcatattgataaagggtccgaaagcccgatggcctctcttggaacgatcagatatgcacattcaccccggtacagcttcgactgagcgaaggaggggcatcactcatcgggtgggagtgtggtctagatatgactaaaagggacagaaacaaaccaaaaacagagcggacctattgatggacagggtcgactgacgtaatagctttctatcaaaggcccttgccgaggaacacgcccgattcgctcctctgccggtttccgctcgagccggttaagtccggaccctctgatctgatctcgtctgatttagtctaatttttttttctgtcgtctcgtctcgacatctattctccgatgcggatctagaccctagatcttgtccggccaggtcgttctacaggtgcgcgtgttctttgctcttattgacctcgagactgtttgtttgaatggatggatgaatgattgattgattgagtgaataattagatatagccaggcacagaatcacattcggagatgacggtgagtgagagctggttaagcagctgacaacatatatatgcatgatggtttctagtgaagggaattgaatgtgtttacgtgtgtctgtatagttatgatagattacaggaataacaaagcttttcttcaaaaactgtgtgtatctatttgtttggtaagcagaaaaggggaatgcagagtaataaaaagataatgtatgtagacagagcaggtcgttaaagagtttgtacagacatagaaggcagcaagggttgaaaccgagcgatcgtaaacgattgggagacacaagtcagaaatcgagatgaaaggagaaaaagacaaaaagaaaatcgaagttttgtaaagttagcgagaggaagaaaaagagacaggaagagctctaccgataactggggcttcctacgaggaacggagcgtttgtcgggggcattgacaataatgtcgaaacccccgaagaggacggtgatgatgaagaggagaaggagaacgcaggagacttcgggaacgaccgcgggtttcgagcaaatgtaagcgtcggtatagacgttttcgagaagggcactgcagaagccggagacgaatcgtcagcaacaaagttccacacgacaaagggaaacaacgaccagacttaccagcaatgccactgataaacttcccagtcttctcagccgatcggcccttcttcgcccaagcctgcacaggaacttcgtcctcatccgccagatccccttcatcttcgtcgaaatcagaatagtcctcatcaaacgcattctccccctcactctctgatgagagctcgtcccgctctacacactcggcacattcgcagtcggaccctgcggagcgagaaggagaaggcgaagctgatgccaggcgagtaagatccaaataagtcgtcgatgggggcgaggtggacagaataggagggatcgacatgtcgacaagtccttgcggctgagccgatcgagcagatacctgagcaatctgaataggcgatgactgaacgggctgtcggacagtcggctattcgttcacaatatgaaacggtagtataagtggactggctcgatcgaggactgggcggcccaagaagagaaaaaaaaagtcaaacatacatagaaaaacctcagtggcttcctctgatcggatcgacctcgacctcggtcattgtcctcctcgacttcctctaccgaggcaaccttgaagcttctacggctactgtccgaagcagaggatgcaggcttggagactggaaagctagcgagaaacattgttggatagggatgtatgcgtgctagatgtcggggttgacggtgaagaatgggaaaggatgttcgcttggaagttgggttttaaagtaaaccttctacactttcaacagattatacaggagaagaaagatgataataaagagatatagaaacaggaagaggtcagcccagtcattcgaacgagaccctgtccagtcggagcagtcagggtgtaaaaatatcagtagaaacaactagtgaccaacctgatgtactctctatcgatgttatctaaataatgctttgagtgctggggttgtcgttgttgtttgtggtcttggtttttaagagaaggagaagaaagagggaaaaactgaggaaagagggtttatagatactcttcggaccaacccaaagccgttgtctcgatggcgtgagtgaggcatgatgtttgtctgagtgtggtggaaacgcgtgtcaaaatgatgaaatgaaataagatggcgtgcttaaaaaattcgatcatccgaagcgcgaaataataaaacaaaataaaatcttactgaccaatacacaatatcatccgtatatttcgttctgcttcgtcatgtttccttgtctctagtgattggtgatcgatgatcccgccaagtcactcatgcgatttatctacttgaattaccaagaccagccgaggataataatgagataagatctactcatacaatctgtcacgtccgctgggacatgcatgtacattatggagagaaacagagagaagagggatgggtaagaatttgaggacagaaaaaggaagagcaacatcgagcgaaacacccatgatcgggctcgacttgcaaatacaaccccaaagtcaagaaaagaagaagtaaagaataagaactaagataaagaaaagtataaaacaccaggcaaaaacagctgatggaggggaatcaggttagaagatgagaacaagtatagaaaaaagtagtcgtgaagaacgatccatgcgaaagtggacaagaagcaaaaggcccagacgaaggggtagttgagtgaaagacgagtggtgcgtgcaaatgataaaaatgcagagacataatgaaccgtgagggccaaaatgaacggaaaaaggattttgtgtggtagtgctgctgctgatgatgatgatgatgaggagtgtattggagaattcaagaacattgacagttcggatggaacaattctaaaatgagctcaattggctaggaggaaatctggccggtggaacattgggtagatggtggggatgatgaggaagcgaaggataggccgatgaatgcatcggcaagcgacccttctgaccattagggaatgaaccgactatctctttcggcagcttcggagacccctctgtgcctccgttcgtgagctgggctacatctgtcaaaggactcgagtgggagactccgttcatcgatgtcggcagctgaggaatacctaacgatgggctagacacaccattcatcgatggtgccggacggggaccagctccgttcgaagacgcgacccgacggagctgaggaggctgtggcggaggaggagcaggtggtctgacaagaatcacaggaggcggacgttccggactctcttcggctgcccgttgagcagccatgaggtgactcgaatcggttgataggagcgcgatatcactctcttcaaacagacttagtctgactttgaggtgcctagagaaagaagcaaaaaggtgataaagtcagaacaccagttgtgttccaaggacgatacaggcggaaaaaacggaaacaccacgaacctctttccgtattcatccacgacgagacgctcctcgtcttccagacctcgagtacccatacccacaccaaccgcgccaagctctgagtcgtatcgccaacgttctgatattcgtcgagcatagtcccgttgatcgtgtccatgggatgcgatggaaaatccttcgattccatccatcggctgagacgtgtccttagactgttccagagttggtctcgaatccgaacgaagggaggaccactggtctgggaagagctccgcagaaagaggttctgatgatgattgagtatagtaggatgatgtgcgaggagacgcaacaggaggatgttgttgacgatgatgttctgatttacgatcaaatcgcatgatacctcctcgacctcgtcgcggtcggaaggacgtggcgaaacggccagaaggccgagcggaggaagttgttgatgattttgcagcagatagtactgaggaggaagggaaggcagaagaaccttcaggtagcaacgggcggaaatgacgtgcaggagtaggaggaagcaatggttgatatgcgacctgaatgaagaagagaaaagaacaggtatcaatataattctaatatcggatgaaaaagactagcatatgacatacgtcggtttgatcttcccattggtaatctccttctcgtttgcgagccacgtctcgctcgatctgcattgcaatggcaaccattcgttctcgaagggcctcgagaggataatggcgctctccgggctctcttctctccttcccttcgataccaggcgccggacttccagtggcagagccactttcccggccagtcgttccattctctcgttttcgagaagatttggacgctttgtcctcctttaaagaactgagaaccgactcggctgtcttcgattttttgttggccgaaccgatgcctgttcggaacaagagctcttcttcatccggtctgagaggttgggagggaattttacgcttgatgtcgataagtcggagcttagcatcccatgcgtctcgctcacactgaataagatctgacttgcgtcgctccctttggagagtgtccgatgccagctgagaagctttgataagctcactctggagcagaacgagacgatctactgattgtgaatctgttcggcgcgtctttcgaacagacttgacctctcgtcgccggaagcagacatatggatcggcatcattggattcgtcatgctgcatgtcggaagagtcggaaaggaaaaaagaacttgagatcagaaacaaaaaaaaagtccttgcacacaaaccttccccaagaaacaccgccgtatggaaaggatactcacgttaagctggggaatgatgtatcggccaccgctggcaagtttgcgttctttccagtgaggatagatagctttagccatgcgacacagaatgccaggcggtgggacaccggcgttgatagagtatgttgggaaataggtaagaggtaacggatgggaaaagaaagattccatatcagtgagagctggtatgcgagaagtgtcctgaagtacacgtgaaagcaaagcaatatcaatacaacgatactcgacgttaactataaagatgtgaagaaattgtacatactgtatgcagtgttggcacgcgctcttccgtccacttctccatcaaagccatgaccagctcgaactcgtcttccgaaataactgatggaacaagctcctccttttcctttcctttgatccgaaggccacgattggggtcggacagaccgttaggcgcagaaccgttggcgatttcccctcgagcaagacggttatttttcttgagccactcgtcatctgtctcatctaatgtgtaagagaacccaaggccagacggaccggcacatgcttcctcaaccgtatcggaaaagcgcacatagccaaccggatcatgccagcgctggggctggtagagagcagtataattagtgattactccggtagcatcgggtgtgggaatggagtagagggcctcttggggttgtgtggtcttgtctggggagccacgggctccagcagaggaactagacgcgactgtacgtgaagaggcagaggctcgtatggcggctgctgaaatagcagcctggagatgatgttctagaagggacaatcggcaacaaagagaaaagatgcattcatcatgatcagcaaatacatcatttctcaataggaccgataacaaaatggttggcggtcaacagaatcacaagacggtgaaaacgtaaggatcgacaaggagagaagattaacgatatgcgagagagcataaagcgcatgcataagagtcgaaagatagacatcatccaagaattcgtggatgtatattgtttgttgttggttgactgatcctggtctcgtgggtcgtgtgtgcttgagcaaagacggaataagaaagaaaatccccatctcatcccgtaatttccgccgctctgccgcgagatgaggggaaaaaacaggtggcaaaacacggaaaaaatgacaggaacacggcaccttgccacccaaagggaaacccatcctccagaccgatcgaatgatgttgcaaccttcaaaaacgatagcaatgaaaagagtgatctcaccttggtcttctcccttttcgactccgtcctgattcaggtttgttttcgagttgtcgtcgtccaaaatgaccggctcagctccatcgatctccccccggttaatcccgagacgagtcttgttggtgagcctggcctgccttcgggatttcagcatcgggttgaacgaaatggatggatgggagtagagaatgatatctactggccctcctgaagagatctgaagcgttgaaggagggctttgccagggctgatgagtctggaaagggcaggggcaggaggaggggcgaaaatttgcacttcccgccacatcaacgatggaccggttgggcgtagaggagagagaaaaattacagagtccatttacttccgaatgccgaaaatctaacttgacattcgcgtccacgcgtagacacaacaccacacaaacacaagataaccagactatccgacaaaacaaggaaacatcaactacaaacacacaaacatccttctctctttagctttttgttctcttgcgtgtcaattgtttgctctcagtacaagatctcaaggggaagagaatatgggtaagtgttgcgtttgcgcgccaggctcaaagctcgagcacacctgtgtgggtcaagaagacaatgaatgagtacagttcatttccaacccgagacagatgatgaagacaagacatacaaggctgatcagtaaacgtacggattcatggctgaatctaagaaaagggactacacggccttctatgtcagctgctacacatgaaagactcaagatcgatcctgatgatgaaaagtcatactcaccgtcagtgatctcaaatggtcaaccatgtgtgcgctacggaacgagcctacatcttagaatttgtcaagactacgctcatgttatgattagaggaaactatggtgataaaacacgcgtgtcaattcaccagtaacagacgtggagaacagaagtggaatagaaaaacgtacctagaaatacatcaatgcgcacatgtgccgcaatactctaacttggccaatctgaagaggcctttagttaacactacaaaaccagcttctggtatcgcatgaattgagattgaccacatccctaccctcccagagcagcctgatgacaccctgtggtgtcttacaaaaagcatgaaacgtcgtagatcgtaaaatgggcattcttcacaacgctggtttttattttattttattaaggagcctaaactttcacatcgttgggagtaggtttcgaaactccaaccaattcggggtgcttgagagccatgatcttgtccacaagctccttttgatgagtgttgttcctggcctgcatgctgtttgttcaggtgaagttggggtcagaaaaaagagagaaccgaatgaaaggagagtgaagtgaggaaactaaaagatttccctggagaaagtaacattgaatgccaagaagtgatgcaaggaagatcattcacgcacatttgagagtagatgatccatatagggagacctagaccgacaatagtcacgagtgaagctaggaaagagaccagacagtttaagaacatcgatttgatgagtttctatagacgagataggcacagggctatatacagcagaagaacagaagaacaggaggatcaagaagtgttactcactaaggaaagcatggaacttcttccttcgtggaggtggggggggcaatttctgattgttcaaaacccaacgcatacagaattgtcctttcaggaagattcacaaggaacgcaaaaagttagcgagttttctctttgtaaagacactaacgtcaaagctaaagacctagatcgcaaccacaagaggaaaggaacaacgtttgcgttagctactggaagaacttggcatacacctgatcaaagacatcttccttggcctgtcaaccaaagcttcagacctctaaactgaaaagacatacttttgaagaaggctgtggataatcctcagcagtggcagcaggtagcctggatctccattgactgatcgcacccgtagattgagctggagagatagcggtcgattcagaggcgacagcagaagccggattcaatggactcgacctcggagctgctgatgagcgaaaaggagatccgaagaagagtcgagaaacggaaggtctcatgttgtcaacaagaagaagtagaggaagcaagaagaaagagtaggaagtattgaagggtgtaaacgtgtggacgatgggagtgaacggtgtggagtgaacggaaggtgctgaagagtttgcactacatcagaacgcccccgacccgacacagttagtccccatcaatcttaggtaataaatcataaaatcacaactgaagttagtcatgtttcctcacactcgatactcaaacgtatacgtctatccagacaacatcaagcatgtctattgtaacaacaggtagatcaacacacatgagttcacatttagaacaacatcaatctaataaaaagcgagaatagcgcctatgagctaattcttgccaccatccttccagatcatatctttctctatagcttgttcaagatcctgttcagcgctctcagaatctccaaggcctgactgctcgaggttttcttctggactgagagaatcacattcacatagggatttagtatatatgtcttcatatcagagcgcaggtgggaagagaagaaatatgagatagactcacgttttccagatgtttttcgcagcatgcatcaattcataaagctgtcccatttgctgagagggaacaagcgagaaacgacattttttgataagaaaacagaaagaaaaaaaaagagaaaaaggtcgcaagatgacaggtacgtacctcattggacatctactcatcgccagaaagagaatatttcaaaagttggatatttagtctaacctcctgacacgccaactacgagtcgcaaacagaacacggtcataccttctccaatttctccatatccaatgttcttcctcgatcgagctctcccttctccaatgaatcaagataatgtttccattgagataagaatccaatgatatgtaacgggttgtccgtcgatttgtgccgcttaaactctatcagaacagagatgcagggtatgtagcacgaacaagaagaatgccaatcgaggcgtatgtcaatgcataatccgttgtgacaggtacatgaaggttactgatatgacataccgtctcgaacataggtatcccctaaagaacgcatgtctattggaagctttcggtgagctcgaagtagccgtcgaaacaacctaagagacaagtgatataaccatgattaatgtcaatatttctagtgttcgctcattagtgaacggttaccccagatgggtatgagtccactctaggatcgagaaagtagttcgaagctcacgggatcggcggcaggagggcgacactcgcttctctgacatcacgaggagctttgatgacggtggccgcatatctgacagccagagtgcgttgcatcgtgcgagaaagagagagaatgagcttgagctaaaagagaagagagaagagtgggcgaaagacgtggttggctattatgtctaacacgaagttagatgatgatggttatgatggccggatcaaaattcgggcgattcccttcgatccctgaaacatcgcgccgttcgatattttgtctctcagtgaccttcatcaacatccaatgatctccataaatcctaaccctgtcgtcgactcggcatatctgattcattcggtatgtgaatacatcagtacccaatcgagttaaggtgagaagactgatatatatgtgtcatgattccaatatataaaagcaagctcaagatgtcagattgtcatgcaacgagcagatcgaacaggcggctgaatctgtgagtatcctcgcttgcttgagaccaaacaatcgaaactgatcagattcgtcttgacaaccgaacagctccttccctatctgacaacatattctcctctcacgtggcaaactcaaccgctccatctactaccagcatcaaccccctcttccaataaatgttcgctccaatttccgaaactcaaatttaatcaggacgataaggcctgcttagactggatctttttcgtatcatctttgaatttttcgttctggagtgatctgccctctggagagaggtggggaaaggaatggtatgcggatggatggaagggactaggagggaagaagaaacgttgggaaggctattggggactcttagccgtcgtcaactcaggtacgcactcttacccagatttgcgtatgctaagcaactcgatctaaaggacttattcttttacttcgatatcttccttcgcgatactagctctagagaatggacatcccctcacagacccttcattctattcatccactaactccgccgatctcatcaaatctcttttcgcgccaacttctccatcaaaggaagaagttcctcttcttcaagatcggctttccattctccagaagaacggttctatcctctgctcgcctagcaacaactacaacggttcctgggctggatttctggaagatttcttctccaaagatgagagaagaggagcgcttgatcttgtcaaagaagtcgttagagtcttcgagagttttagggacgagggattatggaagggagagaaggtatgcttttggaagagagctcagatcttagttgcagagacgtggtatgtttgtttcttcacaaacgcatcaatctagccccgagtttgctgattgttgatgtaaaaacctgattttatcttgaaagggctgcattctatccttctgattcatcgatacctcatcctatcttccctaatggtcttggagaacttacaatgttcccagactatcgagtgcgtgcttcttgatcatatctttgccgtcttgtatgcggaatcaacaattctgacttgattatgacgggacctctttaaatcattatcaggttcctcaacatttacatacgttgaaactgttgacatactctccctctctatacgaaaccctttcctcgcatgctaatcttcctcatggatcgaggctcgagatggaacttcgcgctggctcaatcgtcgccatcgaggaagtcagaaagacccttcgacgacttcgagatggggtcgatatcgagagtgtggtgttagattttctgatctgggatttagccaaagagatggaagctaaagcggcgaaggaaggaggcaacttagtagaatgtcaccgaacgaggagtatatattattgaacgttgattcaacttgtgtgatatgaactgcatggactagctatcccacaggacttgaccgcatctgcatgaatgttacctctcgcaaccctaacaaggataaagtgacgtcatttctctcataaacaatatgtaacggtaggatcatcaacagctgcttgcgggcagccgtgatcaagcatgtcttagttgatcttgtggacgactctcctttcaacttcaagtacatcccttaatacatctctgctgacgataccacaagtacatccacatccacatccacatctaccaaaatgaccaatcctctgcaatccctctttgacgctgttgtgtctgtcttccgggctgtttatgatacgttcgtagtacatctttgtttcaaaccttttgaattactcattgacttcttcttggtttttctaattataatccatctggtgtatccttgtatcaggttctacgccgtttgccacacaatcttctctgtattggagaatgcgacgatcctagtctggaacatcgttactgggatcctcaagacgacattcaatgtatccgaagctacattagaaggcgtcgccaagctgttcgtcgatgggctagagcttttgtggagtacgttctgttatcttcactcgaaagataagatgctatctttacaagcgtacgagtaactgacgataagtttacggaattatcattcgttttgtggggtttcagataacaaattggttatcggagctattgctttggtccttgttgtccttcaatctcgaacggctcagaagacggctggtaacataaagcagaaggctaaatctgcttaggcagggcactcttctttcctttgcttgattagtataatttgaatattccaagttgtaataactgtcttcctcatcttgatttctattataacctcgtagtcttatcttgtatcaatgtttacatagtttgattctgacgttcaacataattcagctattttgtatacaacttctcactatcaccttatcaaacaattttcagctatagaaatacggcccatcatgaagcaaaggatgctcagaataatagaacaacacaagaaaagaggagttggcactataagatatgagagaaaagcgatcagaaatgaatgtgcactaaaagatatcaaggaagtgaagtggagtctgggtatcaacggatgaagtgcgtgaagtcaatagtaagagaagaaggagatattgagagaaagaaagaatgggagaagcaaaaacgctacagcagctaccatcggttaccgttccactcatcatgctctccagcatgcgctccttgttgtttccggcctagctgctgttgttgatggtgatggtgctgctgttgatacatagattgcataccccccattccgaatcctaacccaacctgtgccttcatattaagttcgcctgccagcccttggccaccgggtcgatacatttgcgctgcattagctccgtacatggctcgggccagatccatcgagagaatttgagaagagatcgctccgttggcagcataattttggaagtaagggttgaattgaagagaggcagggttcaagccgtagccaggggtgataaaaggaggcgaggccggactaagttgaagttcgggtcagaaaaacaaggtacaccgtatgagtaacatgattgagaaccaagtcagatcccaaaagaaactaccaacgttcgagggccggtccaactctcaggactggaaactgcttcctcttgtgtaggtgagcctttcttcgtcttagcagcatcttctcgcacgcccttttgagcggagttatcagcaaatcggacgaccttttatacagattgacaaatgtagacaagatgagctattcaaactttagtcatccttttatacgagagcagatcaagacgtaccaaaggagcacttgcgcctgacaaaatcttgccatgaagcttcagggggtaagttgaacgaagaggcgacatagaagggaatcaagaaggtgagctgcatatacaacaacttctcgcgaggcatctatatttgtaataccttgtcaatcattagatgagcttcttctctggtttgaagtctataatgtcgaccaagtaaggttcactattcagcatcaccaagaatgcccaacagaacgagtattcttaccgaacaagagcctgagacacgaatttagatgaaaacatagataaatattcggcgcataacaaaaaatggaggatttatacatacgacaccctttccatcgaccccacctttgccgctttccagcattttgctcgaaacgatgatattgggcacaaagagccgctggaataagggtagaagtgatcgtacagttgagtttaagaaacagatagaattggtataagatgtgcgttgctgacctcgagagcctgaatatgaacaatttagagaaagaatcagcagtgttcttcaaacacacacacatgttcagcaacgatggatacgaacctcctgagggtagttgacaggcaaactatagatgtacatgaaagtcatcagcaccaaagcttatagacgatagagtgatacctgacatttactttttaacatagaggttggtctcgaagggatctgcaagctgtgatgagaaaagcaagtcagcgcatggtctggtaagcattgatgcagatacaaaaagcttaccctctctagcttctctttgagggtttcctattcgcgcataaggtagacatcaacctagatgagcatacaccccatgtagaagagacaagagagtgaccaaccttagcatacccaactttgtaccccttttctgacaaaccttggatacaggctacagcttgggggactgagcaagagacagataacatcagattaaactcctacgtagacaagaacgaatccgacacttacttccagcaaacatgatgaatccaaaggactttccctcgccaggtttggcgacaaatctcgcacttcgaacagttccaaatggagcaccgagagcacttaactgaacttcgttgcatgtgggaggtaacctagacaggaacacttgattgtgcacacaaagcatgacaggtacatcaggtacagccgaggtaccaatgttttcactgaagcagcacataccagtgggagttggggtgggaggaacaagggtcggagcctgcaaaagctgaccggctgcactcaaagtgataaaagtatgaggggtcagaagcgctgcgagtgttttgatcagatcagaacagaacaggaacaacaggcacaaaccctgagggccaaactcattcatggcaaactgaggagtaatctggccagggtgtccagacagagtctgggtttcgggaatagccgcaacggttgcatcctggtgagtagggtacattgtcagaaatcagttagtttgacggaaagaggtcgggggtgtaatgggcgacagggatcaatgggatggtgcgaaagatcaaagttgtatggataatatgcgagtgatgcgatggagaagatgagttggccggagattgatatcggctgttttgtaacagcaacggtaagtggatggtagggaaggatgtgccgggtggaagattggaagatgagctcgatagacgggacgaaaagaaaagaggaagaaaagaagatgagaagagaaagaaagaagaggaactagtcgaggactatctttataatgaataattgacaggaacaggtcagggtcgagacaggatctgtgaagagactagagaagaagaaaacaacaagccaacaaacggagtggtcattttttagagcctctacgagggacaatacagggatgaggcacaatgaagtttgagctaggcaaccgatcagcagccggtgagccagcattcatgtctctatactcatgatcagtaggggcaaggaaacatgagagatttgatcaggcagcaaagtgtttttgaggcaaagtaagcaaagtcactacgcatatgcccattctttcaagtctgtctattcgtccaagtggaagcaagggtgacgccttttctccgagaaagaactaattatccaaagacctgccagcgatcaccatcaactaatccaatctcccttcctccatgaagctccaccaagcctctgacttccttgtcccttggggattcactgagtatcccacgctgatcctccctgtcacacattatagcccctgttcgagcgtcccaggctcggatacgtctatcctgacccgaagctaagatcgtacgagatgaagcatgatacaggagagggagacccgtcgagtatgtgttttgatgcgatggaagagaaatcaatggtgaagtacagggaaccattgtcgaatgtgctttggtgacgttagaaggcaaggtcggagatggagagaaccggctaggtttaggaagaaatcgaagatcataaatgttcaactgtttcaaacatgtttattgaaggtagagaacggccttgaattgtcagctaggctttggtgagagaagaccggacgtgactgacgtctccattcattccaccgcaacaaacaaggcctccccccatatccaccatccctactacgggagtgcccaatcgaatcacctcgccgccctcacccagattctgtttctgccgttgaccttgcggatgcatgcctcttccaccttgccagctagaccgagtgtcaaacagcttgacggaacctgaacgaaggccagccaaaaaagtcgagggggaaggtgagaggcaagacatacagagcacagatgacttgtcggtagcgttaacctgaagatgcggagaatggattggagacggcgtgctcaaaatctgagaatcgcagccttgaaaaggatgtcatgaatgatcaaatgattaatttggaacaacaacgatcaggtttcttctcgtgtcttgaatgattttgatcataggacgcgcgcgaaagcacagacctaacacaatgcctccactaggaaggaacaagctggaccatacgtctgttgccttttgaggtcggatgataaacattggtgtactctcctgatctagaggagcatgcaagagtcctggagacggtccgaaggaggtagctatgaatctatcttgatgtatattaatggatgtaatctacggaaagtaagacaatgaaaagaccaggcattagtcctcagtcaacaagcctttcttcattaaaattctacgaacaggactgttcatcagatttatccggaacatccatccagacgaagaagacatgttcaaagaatggatcgatcctttggaatcgcccgccaagactacgtcatctttcgcctgttgaggcatggttgtggaacgttcaagaagggcaccaataaagagtcagattcgtacgagaagaacaagttcagagctaacagaatgctacatacagctagacaagtgacgaaggcttcgggggtcgataatggtagatagctggattccttcgagacgaagcctaacagcgctgctctcgataaatccctgctccagcgggcgtcaaaccaggagatgttttctcccctatatgaggacacgtctgataaagagaagagacgagagtcatataagaagaaagacttactctcgagacctgtccaaacttctcagtgctatgtttcctcttttcatctcccacaatgctccaaccgtcccacctcctccaggaagattgaatgctctctcctttccctttctcgactctttctgtaatttctcaaagtgacgcttggttggttggtcacgtctttcagaggaccgagaggaaccagcctgagatgaagaggacgagggtgttgggctgacgtgaccgaaacatcatacaatcaacacaagggccaaagcagtcgatagattggcatggttgaataagctagtatagaaaagcgacacagagccgtgtctatgacaatgactcaaacgaacaaatatttcttctttatgggatcatagacaaatcctgtacaccccgagtggacataagcaagctgaagatcaaacacaatcaaagatgaccagctgactcaccaggaagctcgaacgcgaaagacatgctgatatctgaccagataatgtgaactcgagtcactgattgaatgtccgagcgctagcgcttcctaaaattcaatcggcggtgcgcgattggcaaagtcgcctattatctcaagatgggggtagtaaccggcaggttattctgtcggctaaataactcaagcgacacttaagcgtcttatctctttaaaggtctctttcaatctctttctttcctctagatctactttttctttcgcccacgttcagatcctctcatattcttctgcacaacatcttactc

SEQ ID NO: 281 - DNA, 17851 bp, Xanthophyllomyces dendrorhous
atcttactcttcaaaatgattaccacctccgttcgaacgactgcctcccgtgtgggcgcatttgcggtagccactcaggcttccgctaggggattcgccactccctccactaccaatcatgaggccttggtcacgatcggtcgagagcacattactcaagcaacgtgagtacatgtgctctagaattgtatcttgacaccatttcttatgaatgtattaaacccagtggtcgaaagtgggacgttgttatggaggagggtcagggcttagaggtcactctaggagtatgttcaatcttatgtttcttcgtgttcgaagatgtgtgattcactgatgttcaaaacctgctcaacgaatctttgaaatgtaggatggccgaaagatgcttgatttgtgagttcaaccatccctatcctccttgcatgcagattcgagttatttagacctacgctattctcttgtccctgttctgtgcagcacgtcgggtatcggagtggtaaatgcccaccgctgatttttggcttacaccgagaccatcgagactgactcggtatctttcatctgttgatattgtagaccaaccttggacactgccacccaaagatcaccgctgccgcccagtctcaggttgcaaagatcgttcacgctcagaatgctatcggattcaaccgaccgtacatccagctcggtaggtctcttcgcgtcgtgtacttgtatatctgctgttcatcatcattaacattcgctattgatacagtcgaacgattgcttcagcgaatgcccgatccttctctttctaaattcttcttatggaactcgggctctgaagccgtcgaggcagcgatcaaagtaactcgaaagcataccggcaagaacaacatcatagtcctccaaggttcataccacggccggacatacggtgcttctgcgctcaccaagagcaaggtgatatactctgagggagtcggaagtgttatgcctggggtgcacacttgtccgttcccctactggcacagtcttggagttagcccagatactcctgaggacgagctagtcagaatggcagtctaccaattggaattgttgctcaagcagaggtcgagcccaatcgatactggtaagtatatccctctgttagtctcatttagacgttagcttcaagtgactcacgattgatcttgtcgatggaaatcatcttctcagccgccatctttattgagcctgtcttgggagaggggtaagtctcactaccatcacatatatctagaaacgggatctaacttcttttgttgatttggtttaaccaacagcggatacattcagactcccgctgcgttcctacgcaaggtgcgagagatctgtgacaagaacaacattttgatggttgtcgatgaggttcaggtcagtcacatggaacacaggctgatccatttctcttcatatgtcatctgagtcaatatttttctcaatctttttttccgcaacatccaaatcttattgtccatgttctcgaacctcagtccggatttggccgaaccggaaaattcttcaacattgagtattcaggcgtcaggccggatgttcttatcttcgccaagggacttgccaatgggtatgtaccacttggcctgttcgaagtttgagatgtctctttctcagttagtagccatggctaagttgtaatccgtctgtcctatttacctgatggaacagtttccctctctctggaattgctaccaccaaggagatcatgggtagcatgcctcctggttctcttggaggaacttatgctggaaatgccgtgtcatgcgctgctgctgtcgccgttcaggatgtagtaagtttacttttgttcttcctgtacatgctaagcctttatgtatcgttgacctaaaccttgtcttcttccatttctctatcagttcgacgagcaggatatccttggaaacgtcgtcgcacgatccaagcagatgtttgatgctctccacaaggtcgccgctgcgcctgagacgtctcacttaattgctcaagtccgaggttctggtgtaagtaatcgacatatagtacaatcgctccctcttgaatcgattgctcattttatttttggttttgtggcattgggtacagctcatgatcgggctagagttcaatgctcccaacgacccgatttgcgagttgtcgctcaagagcggtaaggcgatcccaaccaacatccataatcgagttcaggagaagtgcttcgagcagggtttgatgctgctcaccacatctatctactctgttcgttcttttcttacatgtttcttgctcgttaagatatgtggatataagactaacattgttgtttcgcgcctcttacctcattaccttaggttatccgatttattcctgcgcttatcgtgactgaggaggagatggacaaagcgatcaagattatcacccaagcgtacgttgaggatttatttcgtcaagtatagcgccccgaatacgtccacaatgtgactaacatctctttcttccattttgggcttatatagtatccaggaggtcgcccttgagggttagaagagttcatgatcaactcctgaattccatataagaaggtcatatatatagcctaaggtttcgccaactcttgtgaactcctcataaataacgttgtacgactcgctggaatgagacgaaccaaatcagtctcaccaacgttcacttcattctcttactcttgtacttaattctcgactgccttatatctgctttcatgtctttctggatcatatataaatttgatgttatatgggtttctcataaatctacaaatgtgcctacatgcatcagaagtatgtcgtatacatttttgattaaacgttggcctaaataagtcatctcattcaatgattactcgcaggagacaacacccgatgaacctctggaccccttttattcagtcagctgtttccgtcttctctccatctcgtcttcttcaggtgctcatccgttaagctatgtctcgtcctacgtctcctgcctcacacacctctgaacacgaacagatcgaggaacgacgacaacagcaacaggaacagtccactccttcctcccctactcgatctcctacatctctcgacgaccaaagctcgaccttacctctagaccctgaagaaaccttaccgtccgacaccgatatcgaaacatcgctgaaagctgatgatcctcaagcaactgagccagagactgtagacctgaccgaaacagctgctcacccagattcagtcaagccgtctccagagacagtggtgaacgatgtacaggtgtcagaagaagaatctgcattgctagacgactcgaaccaagagggaccaggtctgatgcgcacaaagatctcttcttcaaagaagactgagcggccgatgtctgctcatttgcacagctctggttcgtcttatgggtctcaagatcctaacgtagtggtttcagaagaacgatctgacgccgttatagacttgacgtacgaagaaattgaacaacgttcggttgcatcgtcttctaccttgagatcatctctacctgtatcgacagaagacatgcccttatcaaccacaatccctaacgcatcttctttgaatgagcctgatccttcttccaaacctgtttcacctactacttcccacttgtcgacagacaccgcttttgcgcttgcttctaagccgaaaggagatcgaacctcccttctgctctccaatactaccaaacaacactcccgatcaagttcggccgagggtcaagcactccttaaagaggagttcgataagatacgacagtcatataccggtcatggatccccgaaactataccatcatcggggcagcagtcgggtgagcttacatggaaaaagccctcttgtaggcggaggaaatgaggaagatctttgggacagagtaaagacgggagctcatttggatggccaagttgaaagaaccgatctgtattcgagtgaattggcagctaaagatgacggagaggcggaagaaatgttcgatgagccgctagttgaagacgacaatggaggagatgttgactgggcattttggggagaggttatgaatggtgcgtcccctttttacaaagagagaatctcctataggtactaaatagtgtttcgtcttgagcctctcaatctacagattatcaagctgttgctaaggaagatccggcaaggcttagtcaagctatccaggatggaatcccagatgtgattagaggatcaatgtggcagctcagtaagtgatttttttcctcatggagttcatcatcaagactaatctaattgacttcaatttacacgttgaacattcagtgtcgtcatcaaaagattcagaactcgaatctctgtattcaaatttacttcaccaaacgtctacacatgaaaaatcaattcaaaaagatcttgctcgaacctttcctactcatgcattcttccaacgaccgacatccatgttggagcgcacaaattcatctgaggacagaggtaggggtcaggacgagctgtataatgttgtgcgcgcttacagtttgtaagtttttgatctttggccgttctgtgccccgagtatcgaggggcatcacttatgtcttcatctctgaacatcatcatggctagatatgacccagaagtcggatacgttcaaggcagcgctttcatcgtcgccgccttgttgctcaatgtatgtatgccgtgtcgttgatggtcttgcacttggctttgtaacgcctgactgatcagatgtgttacttagatgcccgacgaggaagctttttgcgtgctagtccggttgatgcattctgtgcgtagtcgacacatcggccgttcttccaagcgaacatattattgattcttgtttgatctcttcatctttattcccccccaaaattgacatagtacggccttcggacatctttcttaccagaaatgcctggacttcaactccgactatttcaattcgaccgactaatcgaagagtttatcccgttgctacacatccacttcgtccggaatggcattaaaagttcaatgtacgctgggcagtggttcttgaccttgtttagttatcgattccctctgcctattgtctatagaatcctcgacttgggtatgtccatcatattttgactgaatgagaacgatgcgactgaccattcatcctctgtcggaacacagtgtttgccgagggaatcgaggctgtattcagatttgctatcgcgcttctgctcaagaacgaagaagagcttcttgctcttgggttcgaagagattctgagttatcttcaaagcaagctatttgatacctaccgagtgagttacatcatgatcttgcacttcttgcattagtcaatcttgactgatgtactaattcctgccggcacttcttttctgaatacaaatctcaagattccacccaaggatgatgataaggaacaagaagaagcctggaacgcggatgattttgtaaaagattcatttgcagttcgaatgtgagttgccagaatttgtccttcgcgtctgttcttgaccaaagatgccaatccctcgctgactataaacgtatctttttgttcgattaagaacacctttccaattggatggctatacggccgagtggcaagatcagtgtcgcgctcgggattcacatgcgattgaggtcgacctgcttcgaacagctaacagaaacctttcagcacaagtgtgagaccctactgcattcatagtgttggggttatacacttcctatcgccagcgtgaagagatctttgacaaccttcttatggggcttatctcttcctaaatcacagtaaacaactagaggcaagcttggctcaactcaatactgaacagtgagtcttctgatcctactgtatgtcttctggcttgatggatgctaaacggcttctgtctcatctctttcttacagttgcgagattgtcaagcaggtcgttattcataaggtcgagcgggaagagatggagaatgagttggtcaagtacaagatgctgtgtgttctcttcttttgttttaatacttgctctgatcggtagccatactgactccctagtctggattctgtcggtctgatctagatatgctgagctgtctcatcaatcagccgagtccagacaacgatcctccggatcctctggcacgtccggcttttggggtttagggaagacgatgggtcgcagtgttagtgtaagcaacgtcaagaatacatctggatgagttctaagccttggtgaacactacgccttgaatgtatattttcatttcaatattatcatctttcttctctcatactcaacgaccatattgcattcataccttgcctccactttttccccattaaatctctatcttctcacgctgtctttaagcttcaatcccacttttttcacataccccaacttatacgcgctacccatttgatgatattcctatagagctataggcctctactatagttccacatttttgcatgatatgtcttgacgattttgtcggcggtctgggcaaagtcttgtaggaagcgactagaaggttaatcaccggttcagttggcatggcaacccaagggaaaaagttgatcccctatcgatcaaatgatgatttggacgcattacaaccatcaagcggcttacccttcacacatactcccaacacacatcatgtccgcgctttcccagtaccaagagttgagtaagtgagagtatcccatgtgttctctttttggcttgagagtctcatccttgtggttcgtgacagttccctttcttagggatacaaaccctcaggtccgacagcttgctctttccaatcttctcggtcaaaccgtgaagacatcgccgtacagacaagctttgttcttcccttcttcgaacctcagcaatccaagcaacacatcttcttctgcttcatcagaggttgtggatgcaggaaaggacgcagctcttccgtcgtcaagtaatgaaaagagcccattatggagtttgaagcttctctgcagagatcaaacgatgatcgcccacgatgccttttcggctttagttaacttgagtgattcggctctggtccagaaggaattaggagacgatgccttcttggtcttcttggtgtcttatattgttgtgcgtggattttgtcgctcattcaaggaaactctttgcaacatatcagcttcgctgacaaaccacttttcgcttttctctacaactgcttcgtattacgtgttaatttctttccatttatccgaatatgatactatgcttgcaacgtcaatatgtagaaccctacctcagtcctctcttccctggcatctatgctcctttccaacatcacctcctccctagcaatcaccaagtcactctctacccttctcatccccttcatccctctcttgccaaactcgaccatcaacccgcctcacctccagacgtactatcttccttcgtccagatcggcttcagctctgcctccgcccaacatggcgcttcccaaccaggaagtaacggtcgaatatgtgccttgtttgagtctcttggttgaggctttcatccagggtgcggcagctggagagcctggaaaagagggggaagaagcaaagaagggcacgaggaaaggagattgccatttcctggcaacagttttctcaaacttgtctatggtaatttcaacttccttccagtcaagatgaacgaagtgaacaagtcatgtcaactgatctggtcaacgatctatctgttagcttcctccaatccgacaagctcttctgtcccctgccgtcgaatacccgaagcatccggagtcaaccttacctgctactccagaagcgcttcgatcggagtctctgcttagcaagctattgatcttcactgagcataaggatacgattcgacgaggaggtgtgctcagtacgctcaagcacattgccatgagtgcgcagactcatcccctcctactaactttggaaggtacgtcttggaaaaatcccccatcttttttcagaaagcatgtatgcgtggcatcagacgtttgcttggattgagggtacgagagctattcactcatgtctatacgtacattcgtcttcactgcttccaacgatatccgcatcacagactccttgattgcggtgcctcacctttcggacaacccccttgcccgttcgggcgacacaacatcgattgagattcgaggagtggatgtcctacccaagattctcggtcctctgatgggtggggaagagatcgacttggacgatatggaaaaattgccatcagctttacagttccagccagaagacaagcagagggagcaagacggagtcttgaggctgacgtgtgtagagattttgttgcttctttgcacttgtaagtttggattagcacttgttcagatgttctttttcttcacacgaagagagaaaaacgaacttatgtttttgtcgtctttctggatgacgaacagcgcttcgaggacgaaatcagcttcgagaccgaggcgcgtatgtcgtcatcaagttcgctcataaggccgagaccgacgaaaaggttcgtttcctcacctgctcatcctctttagactcgctctcacactctgtccttttttttcgactcctttcaaagattgccgaccagatgtaccgactcgtaaatctgcttcagcgagaagaaggtcccgacactcgaatcgaggagatcactccggacgaggaaactgttgacagtgaggatgaaggaattgtcgaggtttgaaagaaagaacgaacaggagaacttcgtattcgtatttagatgatcatatgtgcttatccttcccgagcgctcttggttgagcacctctaagtgtggacctcgcatgacgacatgaacatctacatgtgccaataaataatgtagagaatttgcctataaagagttatttgtcgaaacatcgaatgtgtaacttagccaaactgaatgcacgatgggccagatgagaaatatgggaggagaggagatacggattctatgctatggaagtggaagaaaaagaaaatgtctgagagaaacgtcaaacgatcaaccgaggtaccaccagatcagagcgaagcagatcagtgtgcctgttgcgcccagaaaaaatatgatagtatcttgtttactgtagatgattcacgcaagtcatttgggcaagcgataggtttaacaagccaatcagttcgtcggcaggatgtctctctggatcaaatgactagtaaggacggaaagagatctaccttcttctttccacccagccgacgacttgtctacctcctttaatcccgtttgcagcatcgagtaacctttttctggttcctttcagccatccccgttgttcaaccaaacttcccaagacttccctaccttgactgatcaatagatccaattgggtctccgcattatttacgaaaccttcttctcgaagcgcgtaagcagcagacgcatttgacgtgccggagtataacgaggcgccattagaagagttcatttgatgaggtcgagggttgtttggcctgtaagagaacggcgattctcttgtaggagatgacggaggatcgtatgctgatgaggatgaggacgagggttgtggctgagattgatttgacctataccggggagtgggtgtctgggcactctgctctaggagatttgaacgcgcagatgaggcagacttttcataagagagataataaacatgagtgagcgacgttgaagcgagcctagtgagcaaagagaggtttactcacctgagcggccttttctagctttaacgcagcgaatcgatctctgagagctttgaaatcgttcttgaacttttctacacgtctgttctatccagagattcaacagagagatcacaagaagtatccaaagagaaaaaatgaaagaacatcagttccgtccaggtgtgacgattgaagaatcagtcagctccggaaaatccgaacatatcaagaaaatgatcttacgtcagggctttatcctttttagacgcgatgatctcctttttggccatggattcataatcatcgatcgttctagagagagccgctatcgaggctgtgatctgtcctgtagattcatacattcacaaagagaacgagaagagcgagaaggcaagtagaggaggcgaccaatacacatgtgaccaacaaataggttgagagatcagatctgtaagatagccgagtagacaggctagtagaccacctcgtatacatgcataccatttagggaggcagaggaatctagctcggactggagtttgtccagatcgttgttgagatttgcgaattgtttgagaccatgggtatagagtgagttcatcgtggtccaagggttgatcaactatcgacggtacaagtcaagaccatggatagaagaggtgtagcaatgagatcacgtgattgcctatgagccctgagcatgccatcaggctgacaccaaaaaattctgaaagccgttcaaattagcacaagaggatacattgagcctttggtgaatacctttctgatcagtactatatcaagccatgtcttaccagctaccaccaaacgctgctcccttggaggataacgacgactattcctcctcctctggatcggataccaccgagtgtgacaacttctcaaactgggcagaagatccggaggacgcttcggcgctcgccgtgcccttgttcggtcagcccggagagcaagttcagaacgttcaacaggccatggagatcgatcggtccaagggatttgatcttgagcgagaggtcgagagacttggttcgttgacccgtttagttatctggatagtacagcgcatcgttgtggagttttccagccgaggttgactaactcttctattaaattaggcttggattttcatcaacgtgttcgactgatcaaccatatcagaaagactgtatgttcttttcagtcagtgtcccgtgacagatagcatacgtagttaatccaactgctctattgtccgtatcatcacagaccccttccgtcgagactgttgccaaacttaccggaaccgagaagctcttccaagatgactcgcttttgatcccagtgttggagaatgacgcttacctccgtaagttctgtcgttcagcaacttctcttgtctctcagtatcgctgaccctattattatcaacctcaaatctgaaatgccttgcctgttctcagaggtcggtgactcatgggattcggactcagatgaagaccttgatgctccttctcagccccaatcttcctctgtaccaaactctcaaactccgaaagaatctgacgcagagcttcagaaggcgcgccgcaagattcgaagcctcgaggataagatcaaagctcttcaggcggaggcacaatacgaacttggatcgttaaagaacatcttgaaggaccgaatgaacgccagcaacggtgtcgaatccagagaagttgaggtcaaggacggtgctgaaggtgaagggaagaaggtgaatgaggaaggcaaaggaaaaggaaaggaaagagacgatgatagccactactttgatagctacgcttacaacggtacatcagcttttttctcgggcagtcatcctcaaacacagctcagcaaagtgttgactgatataccttctttctccacgtgtcctgtacagatatgtgtgtcatttgtctttcataaccaaatcagctcagaccgtcttggatggaatctctaagtttatattgacacagaaacgctttctttctttgtgttcatcgcttgcagccacgagatcatgcttaaaggtacattcacgtcggttttctgatctcagcgttgatagtgttgacatatacttgtccatccgttacagacacaacccgaacaaaatcctacgctattttcattctttctaaccctcatcttttcaaggacgccgtggtccttgtgagtttccatcttttcagtcgtgtaactatagattccttcaaagctcttatgttccaattgtttcatctgcttgtataggatgtcggatgtggaactggtatcctatccttgttcgccgctaaggctggcgcaaagcatgtttatgccgtagatgctagtgatgttgccaagtacgtatttctccttgtattctatatatgtgtgtgtttgaccatttacgcccgttttctgatcaaatttaggaaagcgatagaaaacatcaagaacaacggttatgctgacaagatcactgtcgttcgtggaaaggtcgaggatattcagctgcctgtcgaccacgtggatatcatcatttccgagtggatgggctacttcttgtccgtctctttatcccttctttaatttctatcatgaagttgatctttgaaacgctctttctgatcattcgacgtggtatttcttcaacaggctctatgagtccatgctcgattctgttttggttgctcgagatcgattccttcgaaagggtggtgtcctcgcgcccagtcagacgaagatcatgttggccggtgtggactgtgcagacttcatgaagcagcgagttgggttctgggaagatgtctatggtctgtagccaatttcctggaccgactgtgtagagagaggaaaaagactaatcttgttgctctgaggtctttcgtaaaataggatttgacatgaggacgatggcacaagagatgaatgaggactcattggtcgaaatcatggaggagtccgagttggtgacttcctgctcttgcatcaaggtttgtttctctcctcttgtctgatgcttctttttagcgtaccatcatcataccaagctcacattagatacccggaatgaaaaaaggacatcgtgatttcatcggcaacgatcaaatcgctcgactttacgtcacctttctctatcaccgcctcaagagacagcaccatgcacgccttcctcggttactttgatactttcttcactcctgatgggtcagcggtggatgaaagcgtagaggtggatcttttcagacacgatgaggaacttaaggttgaggcgaaagacggagagaagaacatagtctcattcaccacaggggtaagaaactgactccatgctgttatgttgaagtagacgttcatcattgacttgatgttttgccgatcatctagcctcaaggagtcccgacccactggaagcagactctctttatcctcaaagagccgatacgacttcagaaaggttagctttaacctcctttccttttcccatttgtccagaattgaatttcttttcctgaacaccacatactttccctctcctctgccttgctcatgacaggagcgaccattaccggaacattcctctgtcaaaaatcctatgatatcaacaaccgagagctcgatgtcgagatccattatcaaattacggagcctgatggttcagctcgggatgcttctggacgaacgaacgtccagcttttcaaggtcaggtagagcctcggctgattttgagaaaggagtaacagagagggagaatatgacattttttgaacaccgtgtgtctgtaggttctaaacatgcatggtacattcacgttgagtcgaactagatttttagaattagtgtgaaaggtctcttctaagaaaggatgcactcaaacttttggtcatgagagcaagtaaaagaagcaagtgagcacgacatccatacgacaatcagaattgtcccacctttcgcgcaagccggaggagagaaacctctgatttctctatcaactcctgttccgattcctctccacaccatcttgttcgagacaaacataaggacacgacttctggcgctttctggatgtaggcgaacggcgttgcacatctgctgaacccggatgaccttctcgagaatgtggcgccggatgaacgaagcaccgctcttcggccgatcacacgttcttgtaggtcaacatttcatccattttctttgccatgattctctgtggtgacccttttctccacttgaacctaaggagcaccttgttaaacccattaatgtgaccctatactgatttgtaacagacgcatttagagaatttctgaagcgaatacacgcaaagtgttatttgtgatctgggcagtcggctgccgatcttttcatcagccgtttccggcccaacctaaattgaactgactgaacggataacaaataacggacctccgtgtccttttgatcgtctctgatgcattccattatcatcctatcccgttggggagtcttcttggttttttcttcctgattctgaaatttttcggttcttcattctataaaagcgctctgtctccggtgcaatccaattcttactcgttcttcagcccatcgcatctctcacaaacttcacttcaaccttcctgttctcacttttcaacccaacatctaatctctcatcatgtccactgataaagtcactttcctcctcaactggaaggccaccgcctatcatcttcccatcttcatggctcaggccaatgggtacttcaaagatgagggcgtcaaggtcgccatcttggagcccaagtgagtagtcgtttgtgcttgtgatacactgtcataggctgatcaaacattaaaatcttctacgtcgtctttagcgacccttccgatgttactgagttgattggagcgggtaacgccaaccttggcgttaagggtcagtctatcaatgtacttcttttctcatccaagaccaaactgatcccagacatgttattccacagctctcatccatactattgctggaaagtctcgaggcttccccatcaagtcattgggaacgctgatggatgaacccttcactggtgttctctacctcaaggtgtgttctttaagtttcttctccctctttgtttgtgactcataagccttttcctttccttcaagcaaaacggcttgactgaggatttccaaactctcaagggcaagaggattggttatgtcggagaattcggaaaaatccaaatcgatgagatcaccgctgcctacggatggggccctgaagactacacccccgtccgatgtggtatggccatcgctgagaaccttatttcgggcaacatcgatgccggagtcggtcttgaaaacagtacctttgtctcctcaatcaactcatcaaggtctattctcacagccgtcaactaactggacattttgctttgcttgcaatgaatctttatctggggacctctcagtccagcaggtcgaggtacgatagatatctctccttgactggtcacctcttcctcgaagcacaaaaagtttttttttgcacgcgcgcgcatgtgaaaagtcagcgggcccatctttgtagcaccacgctatcttactagtaggctcctcttcccagggcattcccctgaagcagcgagtgccttcgaagccgccggttcttctttcatctcacattcttcgctttactgagaatgatgtgaggtgttttgagaatctggcttgatgctcggagtgctgagattacatcgcctgaacttgaccacgtgaccgcgtggctaagaatgctttagaggaagccagtcttctacccctcccccttccgtccgtactcactattgtccttttcatcaaaattctcctacttcgtccatcttctttacagttagagcaatggttgatctcccagggacgacctatcaccgatgtcggtatgcagtaagtttccatctcaagattcactttgtagaggttgccgaaatctgagacttaactttgactcgctctatcttcattattcaagccgaattgacaagcttgccaaccccgctcttggatgctgctgcttctgctcggtatgttcagcctatgacagggttttttcaagttttactttgacactgactgcttcgctttttgatttctgcagatcttgctcattggtaatgagaactggatcgacgctcatcctaaagaaaccgctgcagtcatgaaggccatcaagcgtggaacagacttcatgttggccaatccggttgccgcctggaagcgatatgtcgaattcaaggtgattccgaatacgctcttttcaaacactccgagatgtgagctgacacatttgtgactcttatttcatatccagcctgttatgaacacccgaatcaacgcgcttcaatatgataggtctttcaactatatgagcagggaccttgcaaacgtttctcgagactggaacaaggtacgtttaatcaaattcgcccttgagtacgatgtttattgattctcttctgttcgacggctttactcccaggtcactggatacgccaagcgactcgggatcgtccctaatgatttcaagcagaactacaccaatgagttccttgtttggcccctcgagaaagaggccgaagacggagaaatcaaacagtcggttttcttccctctactccaatctgtggatggcaaaatatagactcatatatgtaaattgatggttttctacggtacccaggcaagaaatcacggccatccaaaaagagatttctcagaccggtggtcttcttttcaaagccaacgaaatcgctgctactgcctaagcatctttaaatagtttgcttcttctatagaaagatacatacttcctttcaaatatcttctcctctttcgatcgttagcatggtgatgtgaatgattcaaacggtgttatgtgtctcagagagaaaggagctgaatgtacaaaagatacaacaagattgttttcggagattatgatctttgggcggaggagccttaacgtctgaacttctctccgttattgtttgcgcacagagacttcaccaaccctggcgctccgtcgctcactcgctaaattcttcgatttgtaggtccgcctcaccctctctactagccatcttccaacccttctactctacactcgctaacctggattggaagaataaatttgtgtcaagaaaaagaaagcaaaatgagaaacacgtctccttctgaccggaataatatcttctttacatcgatcgttcagcaaaatctctcactctagacaacacatctgccaccgatgactcaacaatatcgttcgcttgatctgcatatgctccggtcaagtttagtgtaggtttcgtttctatttttcctcggctttgttcaaatgtgtccgggattgatgctcattttcaaccgtgaataacactacagatgcgaactatgactagaatatacttatgtcgtcagcgagaaccatcactgtcttgtatcgactccacagcagtaagtcaaattgggctttgtatcaatattatgagcgcatattgactctatcgtgcacgcgcgcttaacatctcactcagctcttcatctgtgtcaagcaatcagatctcggtgtagatccttgatgcataaaatcccgtctgaagggttcatcaaattatgtgattgagttggtaggctcttcttgaccttgacgaccgaatgggactctgcttgtggtggatagcgcaacaagatattgacgtttttatctctctcatcatctacttatcaggttttgacttttgccccagtattcatcgtcatcagatgctatgtaatccctggaatccacataacaagatgctactgccgacactgctggctgcacctcaagacgtacactttcctgtttcatacattccgaggacccggtcttattatcattaaaaagattgtttcaaatctgaccgacctattgtaatacatgagtctctcatttgatgactattgacatcgtcttttcatatccgttctgtttataatctatgtctcatcgaattcacctat

SEQ ID NO: 282 - DNA, 30424 bp, Xanthophyllomyces dendrorhous
atcgacagcttgcattacacgaattagagggaggggggggggaatgttgtttctgtcaatatctaccaggacgcagacaatgagatttgttcggtctccacattcatgtatcgcccggtttggagttaatcctttcttcacagtgcttagctctatatacttccaatcgtaaggcccgggttatagttggtggagtcatcctcaatcggataaatcattcttttccatgcgtcatctttgagatatctagcttcatcttgaaatacctgctcactgctgtatgcttattccaagatcgatcttctatctgtttgttcctcttctgagaacattttgtttgatctatgatacataaccttgataaaatgtgagaatccttgttattctcattaccaatcagcatctgcttatgatcatcccagattttacatctatatgcatataaatggtgaatcgggaaaaaaatagaaagaaaaaagaattgaaacctggagttaaagatcgccgcgttctagaaaagatgaacagaaagaggatgtagggcgtcgcgagtttacattgatattgacatgatgatgtgttaatcaaaagagtatgaagatgatgatgtgatatgtctcgaccaattaagtattaaaagaacgccaacgaattaagatgtcacgcagtataagtacacgtgtattcatgaggagaatagagaaatacagactggtggagtaatgaaagagtatgtgatagcactggctgtagatgcggaacgtgatgaagatacaaacatatgcttgtccaaaacgataagatgacagagagattttacataaacatgttttctgtgaaaagcgtcagaatgaacaaatcagtttgtcatcttgaatacaagaaagcacatatggtagacgaaatagactaagacgtacctgcgagcttgcgttcttcctatataatattccagcgcgtacattcctcatacacaaatcaactactgactctgtattgaagaagaagaagaggaggaatctcttacctcgttctcgattgcattcgctctagcagcgatctgtccacctgtgtggactattggactaactgcttccctgagtggctcttggtggattcgacgctgatgatccagatgaactggaagaggagatgagccagatggatcgttcgtattagccacaccagcactagaaagttcatgaccccctctatgggttgatgaaaagtgggtgtgaccaggtgaaggcttcggatagacaggagtggtaggcgtgaagttacgcagggcgccggtaggaggcggtcggtcttgctttgtctaaccaaataaaatcatgacgatagttagcaagttcagagagacagacttgtgagcaaagaaaaagataagagaacatcaagcaaagaacgaatcaacgaacccctttccgtgtagccgcctttcctaaagccccgatgacgcctagcttcttcacgccttttttccagatatcctgagtgttgtattctttcggcatcggtcgagacaggacctcataaggatcggccggggcgggttcgtttcgaacatgagtggatgcgtatttcggttcttcatttgactgatggccagagaagataagtgaagaagtcgggggtggctgaggcaaatcctttgatttctcgcgctgaggttgtcgccgatgctgatgctgatgttgatgttgcggtgactgctgttgttgagttagttgatgttggtattgctgttgctgtcgggattgagcttgaggtgctagcgattcatcgtcctcatcactgtcatatagctcttcgaccacaactcccctttctctccccttctcgctgtgtatcgttggatcgaagttagcccgaactctttcgtcactcatcctctttttcaaatcatcggctggttgcgaactcgatatatcttttgtgggaatcatcaacttgggtggtggctgtttagacaaccagctgtttgatgagtgagtcgaggacatatgctgatgttgaggtcgcacaatcgaccgtgaaggtgaaggggagagttgatcaggactcatcaaaaggttataacccttcgtctcaggtaaggtggaatcttccagcatcggcggcgtaggaaggctagaggaaacagtcgagtgcggagagcctgacgggttggtctcagacggattttcaggattttcagagaggaccgtgtgatttttttcggcttgcgctttctgcggcgtaaaggagttgaagtcttcaaacgatccctcaggatggatagtgacctgggactgatttggacccctcggtgacggttggttagcaggtccactgggtgaagaaagcgatccagaagagtcttcgacaaacaaccctgtggcctccttttcaaacggccttcttgtttcttctatgatgttgcttttgttagcaacatcctgttctgttgatcgttgggtgcacaaggacttctgtccaggatctataactggggataccgcatccggcacatcacccaaaatgctgctcgcgatagaccctcggatactataaacatctccgtagtaggacgatgctgatacaggcaagagaggtgacagtgcctgatcagctggaggatagatatgcgtgttcaaggtgaggggtgaagatgatgaagatccatgagattcgggcgagccgtaaatgatgcctcctgagaagatgatgttccgttgtgtaggcagaagtgttaattgaagacatctaagcctaagtggacttcatcgacacagggatataagcagacaaatgaaacttacgttcttgcatttcgttctccactatcttcagtgatcttccgtttttttcgaactcgaacagtctaccatctatgatgacccttctcctcatctcaccctctttaaaccctttttccaagaaggataaataatgaccatcaatatctcttccgctgtatgatgggcctcgttcgctcgagcccgccggcgcagattcgctgaacgatctggagattggccttctttctgacgaagaaacagtctgttgctgcactctagaggctccgtgtgatccttctgacggaacggaaggtgccttcaaagatggactgacagccacctcttgagcggatctagtccctaaccagctgtaccgttctgagttgggtgactctctcgacgggttgttttgataggatgaggccgaggccgaggaacataccgaacgtctaccggacacatcctgagatcctatgtagtcgccagaccgaacttgtgtagaactgctagggccgagaagttgtctagctaatgttcgccttcgttgaagtgtatctgggttgattttagcatttgtcgtgcccatccggtgagaagatgatctgtcatgagcggcttcaggacgttgatgctgaattggcggctgaagatcttgagaagtggatgattttattcgggtgttggaaaaatctggtgtcccagaaacagatggttttttccacgcggagaagaacgaggagtttgcattcgaatgaccatgtctagggcttagttcatcggaggaagagtgtcctccaataggggtgagcgacatcgcagtatctagggaagccgatcgagagatatgcatggacgtctcaatggacgacagcccgaaacgcgcagtgttagtggtcgatggtgaagaggcgacaatgtgagagtgaggccgaggcctgatagaagtattcattgaagaggaaggcgaggagacttgaggagatgaggatacttgacccgatgcctgattcagaaccgaagcttcagatatgttgcttgactgagagggcttgagaggggctgatattatgttagggcccaatgatctggatcaacggagcacaaatagaaggaaggagcagtcagtgaacgagacaagaggaagactgagaacgatacgatggatattgaatgacaagaaggtataaagatgaggataaagtttgagagggatggaagagtgaggagagggaaggtaaggtaacgtgtatgcatccctgtaccagcatacatcgtccgttaattcctttccacctgaccaaccgaccgagctagttggctgtgtgccaacaaacaccgtccactacgttcaattgttttccaattgttttctctatgtgatatgcgacttcgatggacttacatatcgacgtcagaagatatcggaaattgtccagaaacgaccggacgggtctggttttgtccaccaacctgattattgtctggcagcctgccgacatcgacacgtccgttcacactttcagccgctaaccaagaacccagccaggccagatcttccgtcatgatcgataaggtagtaatctaaagagtaagtgagatagaacgccgagtataacaaactatgttcaacgcgacatcaggtacagatggagtcaacgagaaatcctatcagacggaagggtcggggatacacacccacgaatgacggcctttcagtgagaggcttcttatggtacttgactgtcaagcctggcgccttgttcgggaaaacctctttgaagctgttcaaaacggagtggtgcaagaagaccttttggctctagccgtccttgtcaagcagctgcttgcttttgtctgcccaatcttatatgatgtgctattcgaacttgtttgtcactcgcctcgaaggtggtcaatgattcaacatctatgtcacgtgatatattcgggccagtccgcttttgttcttgttttctttattcgctttgtctgttctttgtgtcgatagcatcaagtgtgacaaagggcaacatgttatggggggatgatcccaatctctttcagttctccccagagtgcgctcttcaccggctcgatagccgcctgcctctccgagccttctccccaacatacgcccagcacaacgtttgcccagctcaaaaacatgtaagctcgagcaagatgcctcagtccagtcggatctctcacaggaagaaggatagatagattgagagagatcgaggcctgagacagcaagtgagtgccttacgaagaagaaagatataaaaacagttcaggatacgtccagcgacacagagtagaacatcacgactgcaagacccaccaatcaatggccaaaagggtccatagccaagccaataaacctttagaactgcttcgcccaatttctcagcctcactccatctgccttcatgatgtgcgtcttcgaacctttttgtcaaatttgcaatctccttctctggtattcttcctataaattggccttcaggtcgagggatgtccggatatgctgtaggtttagcggacgcacgaggaagggccgggttcgagggaatcactactggcggaggtaaaggacttgaggcaggaggatcagcagatgagcagcatagcgagcatacgcagtcaaagtagtagattgttttgagagtttctcgtcgggttttgagagacgtcaatgggtctagatagctaatagtgacctttccaatgatgacacaaagtatacccataatgaaggtaagctagatgatttgtagatccggaaagaagctcgattcgaaacaggaagccatcagcgaagtaagcaacgaacctcttctccttctttcaacgctctcaacgttctcaatccgactatcagaccatcagctccccatgagcagctgacagcagcactgggcgcgcatgaatgattcaccgctctgctgatcggagctagtacggcatgagcaaagggttccaacttcatgtccggggtcgacaacacatgattgtttcgttgaaagcgggaaagtagactcgataaaatatcaggagtaaggtgggaaggtagaaaaggagggagaagctctggtagaagggatgaagaaggtgtaggtgttgatagtagagagaggaacgtttctgacggcgaagacgatagagaactagcatgtgccttcgtcagattcggcaaggaagcttcgttgatgttgctgaagtactgaactgctagcttgcacaacaagagaccatccgttcgctctgactcgttcatttggaccgatagaagtgcatgtcgaattcgtggaaggaccttgcaaagtatcttatgatgattcaaccaagctttctgttggcctggttgagagggccatcacatcaatctcgactcagcattccagatgattcaaaggtagaaagtgagcagagaaaggggctgaaacttacatgaagagtcacagtacacatcctctctacacattctacattctatcggacgagtaccaagcacctgaagacattcgtcacaacgaactcttttaaacgagtcgagtagcacagtcacagtcggtggaccggctatgagaagacttgctccaggattaggcaaagaccgggatgtgatacattttgatcgagcatgggaagagtcgaccagcttgatagcatccatcctagtaagactgatgatcttatatcagagttgatcattaatgtgtcatcaattaaataggagtccagggtcttgattatgtaattaccgcgtcgcgacgcgttcatcgcttgcttaatgacacgcgtcaaacatcttggaaccatcatacagtacccacacatatatactaagtatgcagagcacaatcttcaaagtaagaatcttcatttgcgcacatgcttagtgatcaagcgtctaggatataatgctgacaattggattgccatggcctcatctagatctttacaacaaagcactctctgacgctaccatcccaggtactcggctttgttgaaaagattctaatcgagcatgaggtcgaacgagatatgtgggcagattcatgtgatcatctggcaagagagtatatgaggggagagggtaagtgtgaagtttatgttcgaagagaattttgatgttgtagaaaagatatagaatcttatgccatcggttccatttagacccgtcgcctctggtcactttgaaggggatcgagcaggcctaccaggcacttcagctcaaggtttgttctctttcacctgctctgatcgggctcgatggttcaagtagttaatgactcccttggtggattgaacctgtcatagacggacatcaatgaagagaatgatccgtacgttcagatataccctcaactttatcatctgggtactagacggggactatatggatctcagatttcaaattgctcctctcgttcctcttcctcagcctagcagaatcgacggacgaagtaaatgtggagaatcacttcaaagttatcgattcatacaagatgccaggtctacgttttgatagcaaccgaggtgtttggtcggtgtgagtacatacgctttcttttgcttgtttatcgagtacttcctctcgtttccagctagttcaactagttttctgaatttggtcttctcagagctccccataaacccagtatagcggctccgccactttcaaaggcatcgttcttgagggaaagatgcgctttaatccgacaggttcgctatttttcgtcatttgttgtgagttccttgtgagtatcaaaaagagtagagttgacacaactcggtgaggacatcagattgttcttcgttccgaacacttcaccccaccagtactaggaggaagagacaaggatgaatacatgaaagttagtgattcaaactacttcggaagtttagaggaggcgctaactatagacatgcatcaacgctgggcaacaaatagttgaactcaataaaaaacctactaggtcggccgaatcagaggttcctccttctgggcatccttggtcgtacaattgagggagagctctgcttagaagatggagacggaaaagtgaccttagatatggatgaagctgtaaggatacgcatgcttgacatcagattattcttgtgcgcatatatctgatcagaattgcggaggctgtcgtcattcatactgttttgttcgaaaacatgtatagacaccaggagaaggactgttcaccgagggctgtgttgttctggtcgaaggcgaatacacggacgaagagaggatgagggtaattgaaatggggcatcctccaagtgaaaaacgggcggtcgctaggtgcgtaatccctcatttgccactccctttcgttgattcatctctgattcagatataaattctgtgtctctcgctcaaatctgcattttactgccatcagatctttgtacggtcatgtagatttcttaggggtaggagctacctctcagaaagacgaggtacgtaccacttgtctctatcgcgttatgattttttcccttttcacagcctgactgttcgaattacatcttatatgctcactggtccatctatacatacacacacaggatcgatttgctccactcatcgctgccaactcacatatctcattcgtgatcgtgtcagacctgtggctcgaccatcccaagacgttttctaacctgcgccggatgtttgaagtttacgcagggtcgacattccgaccgttggcatttatattttgtggaaatttctcgagttcgagttgtatcgtcggtggggcgagtggactagcaaaatacactggttggttttgatctcgatcctcttgatcataagctttcagaacattgttctaaatcatcttgatctgtacttcttcagaaaacttcaatcagctagccaacttattgtcttcgttcccggatctcgctcaaacttctcactttattttcgtacccggcccactcgatccctgggggtctactacattacctcgtccgcctattcctgatacgttcgtcgctcgtgtcaaggcccggctgccaaaggcgcaatttatgagcaacccgtgcaggatcaaatactttgaccaggagatcgttatctgtagagaggatctaatgggccggatgttgagaaatctagagggtgtcaaggaaggtgtcaaggaaggggcggatatgaagaaatatgtgcgctctttcttttctggtcgtactttttacatatcatctctcgctcatcttcttttcattgaatcagcttgtacaaacgattctagaccagtgtcatctctcacctctgcctctctcggtccgaccaacattatgggactttgaccacgccttacgtttatacccaatgcctactagtgtccgtcttttcatctgtattgatacccaaagggataatcgtttgtgctgatataccttacccggtcaaattggacgtgtaccttcatcatatctgtttggttgcgcagcttatattggcagacaaatacgaacgatatgagttgacatatgagggatgccatgtattcaacccaggcagcttcattggaaactcatttgaatggtcaacttactatccgtctacgcagcgctcggagagaaggtacgtgttgttccttggtcttcttgtgctttgtggcctagtgaagacgatgggatccttacctgcaatgttctcctcttatctcttcattgctgtagtgtgttatctgaagattcatgagcctttgtactttaacttttgtcgattcatttttctaatgtgatctacattttgaagtctgctgttatcgatctgatcaaaataaagcgatcggcaatactgttgtaaccctaaagatctagaatttatagatgacgtaagctgtggttgtatacgtcattgcccctctggggctcctactcatatcctattcgaatctactcaacctcttccttctctggaggtttccatctcttttttttcgtggtcttcgatgttcttataaagattgatgcttcctaacatcgtacgaaaactctctttcttccctcgaaccctttgcctatctcaggtcacaaaaaaaattattcagcctttccctagacccatcatcactaaacttttcaattcctctcctccactcaaaagtatgagctcgcttatgtccacctcgtttccatctcacaattttctggcagaaatattttcactaatctcacctttctctgtgtgcatgattgaaaaatctacccaaaccagtgccctcttacgacgacgttgaagttatcaccgcctatgaggccaatttgcctaccaaagcattcgagcaggatggagctggtctcgactcggagatgccagttttggcagagcacacgaagctcgaggcttgggatgagaacggaaaaccctacttgaaggagtatgagggtgctggtaaactgaaaggaaagattgccttattgactggagcggattctgtaagtagtcacacatcatttgaagtgatacgacgattgactactgacgcaaatgatacatctttggggacaccatattagggtatcggccgatctgctgctatcatgcttgctcgagagggggcctcaatttctatcgttgccctttctgaagagaaaaaagagtgcgttccctaagagagaggttttttctaaatttgtgcgccaagcgcttactcatctactcctccaactttctcttacttgattaatttagtgctgaggaggtcaaagctatgatcgaaggcagcaagtattctcctcaatccaaggtgaacatcatctacgccgatttgtccaagaaaggggacggagaagccaaacgaatccttgaagagcacactgctgtgtatggtcaacggttggacgtacttgtgaacaacgctgctcaacaagtcacacagaaggatttgacaaaaatcgacatggacgtcgtcgagagaacattccagtgcgtgtcttccgttcttattctcaatgatttggtcgtcagtttaattctctaatccatcatctcacccgtttcctgatattcggaattcaggatcaacatcatcgccatgttcgccatcactaaagccgctcttcctcttatgaagcgaggatcggccatcatcaacaccacctccgtcaccgcctacaaaggatctggaggtttcatggattgtatgtctttttgtatcacccttatacaccaaccatctactgatatgtgacattacttctgtcgtcttatttccagacgccgctacaaagggtgccatcgttgccttcactcgatctctatccgttcagctttcccctaagggtatccgagccaacgccgttgtatgccttttcttcttcgttcatcgtcattgtctatcatatccgtttcccagttcctaacgcttgcttgcatactttgacttctgattgacaggcccctggcccgatatacactcctctccaaccagcagcccgaccgggcgatgagatcgacggatttggtgcaggcgctgtcccactacacagccgagccggtcaaccggcagagtgcggaccgacttatgtctacttggcttccgctgatgctaactgtacgtggcccccttcttgacactccacttaatgacaggatgtacactaggatgaatagctgatctttctctgcctctttccttcttgcctcttctcctgctatatgtgctatctcgaatatttagacgtgaccggtcaaggttagtcaaactttcttctctccttcagactattaaattgaatacgcaattgaacatttacctcttcgtcttatacattcttagttcttcacgtgaatggtggaatgctctgcccgtcgtagacgactgttttttatttggttgaatttctattcccttgtcggttgaaactactgtagctctgttccatgtcttcatctttgccctagtcctccgattgataactcccttttgttcgacgtgtattgcttggtctttgaaatttaaggatgaagagagagaataggaagagaacaaagtctgaaacagtgaaattgtcctggcagaaatgatattggtaacgctaacgattatgtataaagaaaaaacagagggaaagcgagagacaggaaatctggcccaaaaagagaaagaatgaaaacagacagattctactacagaaacagaagcaagcgagagctgcgagagaagaaagaagaggaatagaaaaggccacgtgtaaagaaaacaaagaaagaatcaagatgtatgcaaattgtgatgagtttactcgacggtcaccgacttggccaagtttctcgggaagctagtgattgacatggatagcagaagtgagtttagtctgacatcagacaaccacatgaagaaaggaattgaaagacgtactcgacatcgactccgcccataacggccaagtggtatgagagaagctggagaggaataacgttgatgagaccctgaagacagtccacagtgttgggcactcgaatcaatctgtcttcagaggagaaactgctgtcgttatcgttgcaaatcacgactaaaaggagatcacgacgaagggatatcagaaagaggaattaggaagagaagaagctattgaaaaattgactgaagaaactcactaggctgtccctttcgagccttgacctgctgaagagcgctctgcaccttagggtacaaactatcctgagtcatgataagaatgacactgtgatgatattgacaaagcaactaggtaatcagttggtgctcgaaatagccgtttgacatgtacaagttcacaacaaaaatactaacggaaggtgctcatcaatgagcgcgagaggtccgtgcttgagctctccggccaaaatctgaacaaccgcaaaagataagttcgttgggtcagcactactacacctgtagatcatagatgttagacaaagacaagggaacatacaccctcgcaatggcagtaagcaacctctttaatcttcaacgctccctccaaacaggtcgcgaacctagtgttaattcgagatcaagattagtaaggtcagcgaagttggaatctttcttggctagcgcgggacaaggaagcaagccggaacgcgatacgtactgatatcctcggcccatgatcaacaagctcttctccttggccaaggtatccctggcgagctgctggagctccttgtcctgcttaaggacccttgagatctgagcaggaaggtcgtgaagaccatcgatgatggactgtcgtcgttcgagcttggacaatcggtcatctgagaactggacagccatcatgaccaaagcaatgtactgagaggtatacgccttggtagaggcaacaccaatttcgggaccagcgttgatgtgaacaccacagtgagattctctggagatggtagatccgacagtgtttacgacaccaaggcagagagcacctcgctcgaggcaatatcgcatggccagaatagtatcagccgtctcgccggactgagagacaaagacacaaacatcgtccctgaagatggggcactttcggtccaaaaagtcggaagcaagctcgatgctgacaggaacctcagtcaactcctcaaagatcgttcgagtagcgacacatgagtggtaactagttccacaagcgatgaaacacattcgtctgcaccttcggatgacgttaaggtagctcttcagtcctcccaagttgactgtcctggtatcaaagttgattcgacctcgcatggtgttgaccacagactcgggctgctcgtagatttccttctgcatgaagtgatcgaactgacccttcatgatctcggcaagctcgatctcgagtgtctcgatagctcgaacggaagaaagaccgtcatctcttcggagtcgatgaatgtggagttcttcgtgatggggaaaggggttgaaagatcagtcactaggcctcgaaaacgtgtcaacacgaagagttatcagacgtacctccgtcggcgatgtgagcaatgtcatcatcttcaaggtataagaccttcttagtgtgctcgacaacggccgaagcatcggaagcgacgaagtactcgatgggctggggcataccgtcctcagacaagaacgccctggactgagttcgtcgcatcttggagttgggtccagtaggaggaggggcaaggaaggaggcgtcggtggcaggggctgagcaaaaagcgatatttgaaccaatgattagaagcctatccgagcgcgtacagtggctcacatctgtgatagatgtactcactgagctctaaggccttctcctggtcagcagccatctcaacatcgacaaagtctaccttgagcttcttgtcagtcttgacaccgatcaaaagaggagatcctcgacgagcaatcacaatctcggacgggaagtggcaggacttgaaagcaaaagcaaacgagccctcctatggtttacacaacagccattcgcgcacagtccgaattagtaaccgtgcgcatgccagtcaagtgtcatattaaactggtgaagtacgtacgagctctttgatgacagccttaataagagtggtaaaggtcaatcgcttagtgggctgggaatcatagatgtacttgcaaaggacggcgacggcttcggtatcggtttcggtctcgaagtggtatcctcgcttctccaaaaccatcttaagctccttgtctgtttgcgaatgaaagttgatcaaggtaagagatcacgctgaggatgaagcctacaaacagtcacaatatacgcacagttggtgatgataccgtctaaggaaagcagagaaaatatatcagtcctgcattcttctcgaatgtaccaagacgttgtcgataaagacaagagacgtactgtggacaacgatgaactcttgggaggcaccacttctgtgggggtggcagttcgtaggagagggagatccgtgagtagcccatcgagtgtgagatatcgaggtttgggagacgaaagtcttggtgaagtccgcagtggattggtcgatcagttttcgaagcgaggcaacctttccgacctccttgtagagcctagttgagtgttgaagagatgagtcagtgaacagatggggccgttgtgcctgaaatgcccccaggagatttcacataaagcgtgcgaacaaaactcacaagaagtcgtcgttgtctccgtcgattccaatacctgttgtaaggagaaatgagtatcgtcaatgttctgatgatgcgatcgttcggaggaccagatgcaaggcaagggagaaagaataaagtgcaacataccagcactatcgtaacctcggtattcgagccttgaaagacccttggtcaaaatatcggcgatctgctttcggtcctgtttgatatggtgatttttccgaaagagaatgctgtcagatcggtaaagggtaatgtgtgcatctatacaaggtgaatttacataccttctcaacgaggtacgagcagtaggcaaagattccactgcatcaaggcatgcaaccgggttcagtttatttttgagttccttgacttttttcttgccttgggcgatcaagcacaaggtattggtgaggagatcgagaagaaaggacgacggagcttaccacattagagcagaggggtaaagattagaggggtaatggaaagcggaaaagaacgggtaatgctgtgtctgaagaggggtgttcaaggataagagaaagagcaaaagcgatgaaagcagacgaggtgcttgaaatcaaaggtgaagaattccgagagtctgtatgagctgaaattcgtttcccgataaccaacggccaattcgaagcatatcacaacggccagggaagggagaaaacgagagtgaaaaacagcagagatgtcagaatcaagtttagatgtcgaaagcccaaagatttgtcgaggtcgagaaaagtagccgggtgagcagacagatgtgttcctggagagatctgttttgatttctgacgataactgagccaccgagtctgttctgctggtctctccttgtattctctcttggcctatgttgaagatgatgtgaagacaaagaggagaagagatagaaaaggaaacagagagggactcacgccaggaacaacaagaaagagagagtgtgtgtgtatgtgagagaaagaaaggagagaaggaagggaggatgagaaagaaagcgaagggaagggaagggaaagcaaaagaaaggcggaagggcgtgtttgttcgatgtgcacaggaatgccgcgtaaccaagatagcgccgctcagtcatctttaaggggggtgacgaactcttgactgtgcctgtgcgagagtttgttggatgccggtcttgccttgccttgactcgtatgctctcttttgctgtatctttattgattcgccttcaatcttttgagttgtgcatatctgactcatggttgttgtgctggacacccatgcgcgctcgatcgttcttatccgaaggaagtgaggaggcagcatgatccttataaacatgatgtgtatatcacgtcgtgcgtttagttttttgttgttattttcctctgctatttccttccttttcattattctgaaacctggcttcggacaaatgtttgatttgagatatctttcggcagggattggttatgcgatttggttacagccacgtggccagtgacatatcatactgctgtgtcgtccctctcgcgtcccctgacgacacacaggcagccgagttcttccatctcgacagattccattctactggtcaattctcgagtttcatcgtcatctcgtcccatccattagcctagtaaagctgaagctctgaaagtggggatcataaacctcaatatggatcccgagagtcctccctcaaacctttacttgactcctctccttccagatcttgagccatggctttcttctcctgaacagacctctcggccaaatccaccggcttccaacttgcttcacccggcttcgtctgcagcggcctttctctcaaacgcacgcgcgggtaactcgatcttcaatctgctgccaggtggaaaggtcactcctcctttgtcttcatcgccaaagaacggtccaagccaatcagaacccagtggatcaatagacggagacagagtcaagaaggtcaagtgcaaatgggtcgaagggtacagtgagttcaacgatcttgacccgtatgccgtgccagtggatcgactggtctttggtctgttctcattatgttttactctttccctttctaatccttatttgttcaagacaacaatctttacatcggtacatcggacggacaagtcctttggtatacctactcgacaaccgaaacttccatcgtaagcaacgttcaagtgtcttgagttcaaagctcagccatctgactatgtattgttcgtgtccttcaggatccttatacccttcgccataagcattctatctttcctcgccggccaatagataggatctatctcttgccgtccatatctaaggcgctcatactgtctggtatgctttaactcgcgacctctacgtacacttcagatcgaacactgatccacttgacctgtagaatcaacactacacttcgttacgcttccgagcttggaaccagtccttccagctcttattcaacccatcagaggagtcgtggccgtatccgtggatgaaggccatgagtattactcggccgatggagtggacgaggtagggctttgtgtggtcaagcggaaagtgatctcggttttgagactgggaaccaggttgttccatgtcaaagtgagcccgcatactttgatatgtctagttgtttcgtcatgagtatctctggtgctaaatggccatctgcataatggtcttgtcaggaaatacctataccagaacccgccgtcctcacccgatactattctccaacactttgtcaagccgattcaaccaactattcactcgtctctatcaatgagagtacctctcttcccatcttaccactctgccaagcatctgcagaaggtcttgcgttcaagccaaagcccaacattgcaattgtacaggaggatgaattcctcatgacgagtctcatcaactcaaataatcttggtgccacgatcggattgtttgtcaatggcaacggggatccagtgagaggcgcgattgagtgggatggaagtccgagaagcttaggtccgtattttccttctcctcgttcttagacatcatgatctatcttttcttttctatggttgagtccctcgaacgagagatgcatgactcataccaatccctactcttcttatccaataataacaatcatcagtcgtcaacccaccttatgttatttccttgcttcgtaatcgtacgattcaagtacactctttgatctctcttgaactcatccaaacgatccctttaccgcccaacatggatgcccgtgttctcaccaaatctcctcagggcttcaacgtgccatcgaccgagcgggatacacttcttcggaagatgcctattcctcttcttcaatcaggacctccgagcaatttgacgaaagcttcttccaacaaatcctcttccgatgctggtgccaacgatgacgtagaagaggatgacaaagaaacagattccaatgtgtttccgacagagatcaatcactttgatcctccttccggatcaggtctaactcctccgtcctctccccctgctcagccagccggtcgatcatctttccaacactctactcgttcatctgtttcctcgtattacaatcctggactatctagcacgcctcagctatccaacgtctttgtactgtcctctacatcgatatacgctctcacaccaacaccgccacttttagcagctctagatacgctgacttcatctgctatcgttggatctggcgatataagaaagtcaggtggagggctgacagaagcgctgacgccactgttaatggacgcttcttttagagaaggaggtcaacaagacatagaggcagtccagttcatacaccataaagtgtttctcaaaggcttgagggaagctagatttggaagagttggagagagcgatgcaaagatcaaggaggacccaactggggatgcagaggcagatgatgatcagtcacaaccagagaaccgacctaaagtggacgtcgccaaagatggagaaggagaaggggaacaagcagagatgtggctgtttggagggggagacgtccgattgatcatcaggctctttgcagatctcagaagggttttggagagagagaacattggggatgtctgggtggaggacggtctggttgaagagtgggaaaaactctgggatatcgaagaaatcagtgcgttcttctttagattttgatctcatctgccttgggccccattgctaacaacatcctttactcactatggtcactctcacacgtacttaagttcaaactcacctaaagaggatatatgaccctcacatacatccgaacgtagcaagctctccatcaactcttgagctccacaagatcctactcaaccaggctcgacatatgctgcggttaattctggaaagagaacgggaaggaaggtctcgtcgacatacagggcgtaagcagatgggagtcagggatgaggaacgtaacggcgaggatgatgcgttgaacagggtccgtgtcggtcaatcctttatgatctattccttcaggagaaaacactaatctcgcgctttccctatcttctcttcaactccttcttctcacagattgtggatacgtcgttgttgatcctactctcacgaataggctcaacatcttctatccttgatattcttgatcggcctcattcggcctcgatggatcttgttcgttcgagtttggagatgcattctcgctggtttgcacttggcagatgtagtccaacatctgttgaaagctccttagagatgttcgctgcgtacgtcatctaacctttcttcatcataatcatcccatgtatgaacgttgcactgatgaattaactggaacgtcccgggagaacctgataggttggtggaaggtacaaaggttgatgaagactgtcctcgagacccgatgaacgagatcctctcgttgctggctcaaagtgaagacattccgctagttcgaaaatggggcctgtgggttgttgctagagatcccgaacgaggtctctcggtacgtttctttttcttccctgcccttctgtttcagacttccttcctttgtcactttccatttgaatttcttgttaactatgaagtctgttctgtcctgttctgtagctattcattcattcagggttaaactttgatcactcagacttggtggacgaacttcggcaattacaaccagaagctggagacaagtatttgcagcatgtggtgatcaatcgaaacagcttggtttgttcataaccatcctttggctctaatcctgaattctgatgaccgaattgctttcttactttgcctttgacttactttttgcatatcgttcctcacctgtccggtctaacaccgtgacaggataagaatttgcatacatcactggcatcccgttatttggagcgaactcgtcaagagcttgagaatgggcaaaccaagaagttcttcgataacgcatgtgagtccttcgtccaacatattgatcgtcacgcgtcttgattttctgaccgatacaatgccatacgctctcttatgcgtagtgatcgaatatcataagttgtcagattcgaaaatatcccttattcagcatttggcctcatttcttccggaatcacctgcgaagcagcttaaattcaagacgatattattccttcaaaactcagaattatacgacctcgagacggtcagggatgttttagatggatttgaaggatactggttggagaaggccattgtgtatggaaaggtaagcatctacgtgtgcattttctcgtatttctttctaccctgttctcgatttgctcatatccctcatcctcatctcctttaccttcacaaatacccgatcagcttcgaatgcatgacgcagcgctcgacatcttggcacgcgttttgagagatacattgacagccgagatatactgtattcaaggagagaaagtcattccttgttctgtcgggttaaacctcgctcgccggttccacttggacgaatggatggatttgagtagccatgatatcggctcaattggagcatcggaagagaataggaagagggagcttctgatggctttagtcaagatctatatgagcgatggcaacgagtgcgtcttgtttttgttcattcgctcttctgtgttcccctccagtgcgtgggaattaaaaactaatgaacacatcttgttaattacacgatcagttccgaatctacagccttgaaaacagctcatcttttgaacgaccaagccatgaatcttgatatagtagacgtgggtctttttctatgatctgtttcttcatcctttccggctttttgacgagctatctagcacggatagctgttgacatctgcggcctttcctttttgtcttgggtaaactcaatagattctggagctcatacctgagccttgggagcttcagcctattacttccttcttgacacggtccatccgtcgaacgttacatgatcaagctgaaggtcaaagtacgctcttcttctctcaatacttgatcctacgttctcttccaagctgacaatcagacttccgcctataatcacaaaacaaaatacaaaaagttctgagggcgctggcgacgtcccttaatttccagacgatggacaaagcactcgaagcgtttgcttcctatccacctattgttgagacctctcttgactctccgtcttctggagatggaggggacgtagacgagaagggcgaaaagagaggatcagcttatgaagagggggcaacgattgctgaaaagatcgtcggccatgctttggatgagcgagatgccacagtgagggagaaagaaaagcgggttgaggtcgatcggaggaagagatatgtggacgtggaggaagtggaagaaggactggcctgataggttttgttagaagcattggtgtcttgtaatatacccgcatatgatatgctacttgtcaggattgtcgttcttttgttgaaaataatggatcgtaggatagatagaggtgacttgtacattgagaattacattatcatacatagttttatctcttctccttctcctgtgacgcaggactatgctaccctgcctagcccgatcgaagagaacatcaacgactctccgatatccgatctttaagacgtttgtccatcggttcaagtaagagttgtcgaacccagccattcgggggaaagtctttttgccattggttgtgaaggtgaaggacaaagacacctttgtctttggaccaatcgagatgtttctgttttagttccccagattaaacgtggcaagcaagaaggtcagctctgaagtcgaagacgaggacgaggacgaccaaaagaaagacttaccttgagtttttccttcccacctttgttccacatgagtccggcgtaccaaccaggatcctttttgaacggatctggcaccctcttgtcttctctacaatttcttgggtctgcaaaacaccaaggcaagacctgaaaaggaacgatcccttgactgagtaacctccgatgggctttcaggtatagatgagatccccagtcggttgacttgggtcttggtggaggagatcgagccatgatgtgaaataatgagcagaggaagggagactgtcgatggaaatggaggagggcgccgttaagggacctatatggtttatctatgtatatggtttttttttttggttcaaatcgaatgatgaatgatcagaacagagcgatacgacggtgagaataggcttgcgcgctcaaagaagagaatggactgactatagcaatcccattgagtgacccattcgtcttccgtcaacacatgtagatctctcaaaaagatcatatccatgtctgcccagacacctccgtgtgtccacaagaccaacaacctgactaaatctccatcgacccaagctctctgatcttttatggcgccaccgaggagatccattctaccttccaacatcgtacccttcgccatttgcttgatgtcaatcttcttcaccttcaaattcttcccgtacagtttcgccaactgtgctaccctcggattgagttctactaggtcgacattcgaccaaaggatgaacgtgcttcgatctagcggctgggttgccaggaaagatttgattgtccattcctgtcgctccccaaatggtaggagatcccctctccaataggtatgatacgtcagatgtttcctctttgccagtagagaaggttgaatgagtgaagcgtaatcgaaacaatcatctggatgagtcagtgccaaggtcgactgaagttgaatgaccgagggggtatgcgagtagatggaggaataattccaagtagagggttggacggtcggtcttagattcgcttgggcatctaacgccgagggtgagaaacaggtctctgccagatctgccgtcggcgggttctcgagagagaggatctcagattcgatccatggtttgttgtacatcgaaaactcgacttgtatttcccatctgtatcgaaagacgtaccaaacggccatcccaagcaagaccgtcaaccggagggcggtcaatcggttaggaccccaaccagcaaacagggcggacctccagcttcctcgacttttctttgatttccgactgagtgtccctcggtaaggatgaagcgtaggcgagaccgatcttgagccaggaatcgctgctagccttctgaagaaggaattgggagggacagaacttgaggcggtcgatgacccgtgagggtctctgatgtcgtactcgtcatggtcgtgatcgtgatcgtaaatgcggtcgtggccgtaaccggaagaagatgattcggtggacgagaaggacgggaagtaagaacccagtcgactaagcatggatccaagaagagccctgccttgatgtatgatcgaacgactctgtcaaatgaagtgaaaaggctgctggaccagggaatgtgagccaatctgttttcaccaggacgagagaaaaacaaaagaccgaaagaaatcaaaagtggatggaggaaaatcaatacaagggaaaacgaggaagatgacgcggttccgatgtgaccagctgggcacagaattctttgtctttgaaccattcgggttcgtaccccaagtccaagttgatcccaaatgaacatccatcataagactcaacaataagcataagataaagatacgagttttctaagcaccgttcgtaccagagaacaaagacgcgactagacaacggtgagaaagcgtggtcgacagaggcatagaagggagagcacacggatgggatataaaagaacaaagacaagtccgctcagaggacaagcaagaggaacgtgttgagtcatcaaacgtagtttgacagatgagatgggagaggaggatccagaaaaggagcgtcaaagaatagccgtaaacaacagatgaagcggctcatgtgttatcgtcaggacatgagaagcaataaatgattccaagagtacatttcggtacaagaaagcataaaagagggatccatagaggaaaaagaggaagtgggtgcaagacacaagaaaagggagggcagaagaaaaccagagaatgggaactagtatgacaatgattctgagagtaaatattcaaaggtcaatcaatatccatattcctcggctagaatcccgcacaatcaaagataaaccactcgatcagttcaacgacggaagcgacacaagagagagagggcatgtgcagaaagactcactgtagatttcggcgatatgacctagtcgcttgtgcgctctcttagggttcattaaattcgacgagatctgttgagggaagagacacaagaaaaccgcccgttgaatgagaggtcaagatgtgcgatcaatcataacgatagcagatacgtacatttcggacgacactattcagagatgacggtccacaagctttgtgaatcaaacaaatcacggttccacagtcagatgtcagtcaaacgaaatcaagacacgggatcacagaagagaaagagaggaaaggagaagaagcggagtagactgacaagcaatgacgacggtgccttctgcgcaatcaacctcctcctgaatgatcttttccaactttggtcttcccggtctagccatctctgctacgacgttcagatcgtcttcatcaccttcatccaaaaattgatctttatcctctccttccttctcgacccggacgaagctctgcctttgttcatcccatgtgccaccgacaagccgtcgggtactttccgacccagatccagcaccgatgtaggaaacatcggtgaacgtctctgctccaggagttcgagctccttccgaccgaaagacatcatctgtggtgttgatacttgcgaacgactctcgtttgttccggtacggtttggatccagtccctaccccggtatcctggtcgaggaccaacgactgttggtgatcctgctgatggtgctgagggaagggcagatatgattgagccggcagagtcactacaggatcggccatcggagcatgttgttgttggtagtgatgatgattatactctgagagaccagagcctatgcttccagctgacggtccaacaggcaagggcggcggagcggcgagcccagacccaagtccaaatcctgacggtttacccgacttggcacgtttcctggaccgggcccttcgaatcctaccttccttcttaacacgaagagagaggtgtcgttccgccgcagtccgttcgttgtcttcctcgtcttggctttcgtcataatttgtcaactccaacactgagtctggtcgatggtctcccgacataccaggcgagaaatctgataggccgcttccccctctgcctgcagctgctgatgagccagagaggtaaccgagatcagcgttcgagtcaatacttagagcggacgcgatcgagtcttgcgagttggaccggctacgaatgcctttagcaaacatcggccgaggaggtgccagctcagcgtcgacgtgggcgtcgccatcgttggggaacaagatggatttttcggaaaccggtccatagtttgtgacgaagatgtcgatcgtcagttcgggtgctggtacgaggtcgatcgattttcggatcaagttcgacacccagagaatctcggcttcaaatgtgtatcatgaagcagttcagttggcgtggtgacttgagaaagattttaaagaaaagaggcgatagacacaactcaccaaactcccggacgatccaaacgaaacgaacgcgccgagtgatgaaacccttgcctcccttgcccttttcaccatgcttcttcctaccagctatacattcacacacgtacgccaagatggctactccaaagctgacacctgaaccaccacacacgatcaacacggtcgaatgttggccccatctaactctagctgacgaaccgtacggcccgtcgacgagtgctctgaagaacaccggttttgaggtcgaaagctttgtagctgccgatgtaaaataatacgagcttcgcttttcgtacgtcgctagtccctctccgctagtcgactcggttgatctgccggaagccatgcgacttttggtctccctccagagatccatcgtgaacccttttctggctttgacgagtaggacgatctcttgttcttcgtccgcgtcgtacacactcacgatggagaacgggtgagattgccagatagagatctctctgatctgaagtaggacgttctggccgggataccatttgaacggacgaggcagccggagtgtcagccgaatcatccgggagggtaaaacctgggcgagggcgtaaccggcaggaatgggcgctcggatcggtcgactatctggcggaggcgcgttgaatgaaaaggaagattctgcccgaattggaccgtgacgattagtgggcggtgaatgaagttggggtgggtacgagtacgagttatcaaagtttgacgagggggcagaatggggcgatagagaagagtgagagggagacttctgcagagactcatgttcggatcgatcacccgacaaaaatccatccgatccgtcgttcatcacgttcgaaagcaaaccctgggtataactcaatcgatgagggtaattcttactcgactggtttgacgacatgatcattgaactataacgattagggttatccgatggatgcgtgagctgctgaacatcgtacccgaccgagtcaatcgtgtcaaatgacctatcctgggacggagacgttggtgaagtgagttcatagtgggtgaggatcccatcctgggccactcccaagccagcggaagtgtcgactccgagtcgggtcatctcataatcttcatctttcttcccaaaggtgtgattgctcgacctcttatcggggtaggccaagccattcccgttgtcctggtcttctgcggggagaagagttgaacctagtttcgatcgttttgatcgtttgacctggttatttcccaagccaccccaccagccattgacccagccgtaccggatgaaccgccagagtctctctgccatccagagaccaccagcggcgagaggccaccaatagagttttggaaagtgtagtgcggacgtgatgagtgtcaacggtacgagcgttacgtgtgcaaaatagaaggcctggagagccacggaaagcgggggagcagcagagaaagatagaaaaggaagaatgatgaagaatggtaaggacactagtgaaagcggcgacacgaacagagtcaaaaagcaccagacaagaatattcatcaagactgacctcatagaacctcttccggacgggctgtagactgaatacggtcaacaaagaaagcaagatgaagctgacagcgccccagatgaatttgtcgtatatccagacgacctgggcaacttttcggtcagacccgtcgtttctgtcatctctggcaagttgaacgctccaaagggcgacgtgtaaggcggtgacgagccagacgagccgccctgaccatttatgcaatagggtgagcgtatcgtagaacatgtgggtcagcagcttgagggaaaatatagcgaacgggggtgactttagagcgaaaagtacagagagagggaaaagtgagaacgcgatcgacccagttcgggcgcctgaggtccagaaggccttatcgatcgtataactcggggtaaggttgacggtgggcgtggtggctcgtttaacaaatgaggtccggtaatcaaacaagtgggcgttcggaaagatatagtctgcgccgatgaagcaaaagatgagcgtaaaggcaaagagaaagaaaatagagacgatctgtccgttagaggggaaggagaacggttgttttcgtctgggtcgctcgcctgtgacagtcgaggttttggagagagtggttcgtttgatgatgatccgtcggacagaaaacttgcgccagattgcgcctggcgtgcctctgcccgtaccgaatctatgtccgagggagagcaggacaaggacaagagcgaagataaaatataatgtgtacgcgtatcggatcgatggagagctatgcgggaataggcgagaagaaggagaagaattttaggaagattggacgtgaaacgaatagagcgaacaatcgaatgatgaccaatgacgatgaactcaaagaggtcagcccgaaggaaagatggaaggatatgaaaaaaggcaaaaacacagtgaaagagagatgaaaagacaagaaagacaagaagaaaaaaaaaacaaagaggaagaggaagagaaaagaaaccccaaacgagaacacacctgagttgatgaatggagagataggccgtcacatagtcgtgatcgtctgctctaggaggaacggtcgggctggcgggacccgtagctgttgcagctgcccagtaggtgtctgttgaggtttttctggtggtggttcccgctgtcgtcttgagaacggtcgagacgatcgcggtacctgcgctggcgacaactgacgctgtggttgctaaaggaggcgtgtagcctttgtgacgattgtaaagagaaagggcggttagtttgccaagcatactgagaaagcgagaaggaggacaaacctccagtgacgatagtggcgatagtggcggcattagaggtggtagccatgaggaagtgatgtctacctagctatggcctgggaagaagaggccttctttgaaagaaggtcaaaaagacccgataggagtgggaacaaaaagacggagctagcgagcagacgttacatgaaagaacggctggtcgagtgagtattgatatacaccaagaggagcatcgaagatagataacacatacccagttggactatgagctctgtgtgtgagcagagtacgagtgattaagtgtactgggtgagtgagtgagcgagcgtgtagttgactgagcgaacgagaggatgaggaaaacagagcgatcgaaaaagagccggtgggaagatgcacgaacggatacaaggccaagagaaggcgggggggcacggccggttagtcacgaaggagaaacattgccggcgggcacgtggcaagtagggtcacgtgagtgaagcccaaatatacccccattggtcccaaacagtcctacgagcaccccaagcgcaacccccgaaagacaaactcgaaactcgatccggtccggaaggggtatcatcgactttttccttcttgaccttccctaacttcggtctgtctaacgattagtatgccttttcagggtggagggccgaacaggatcggggcaacaaagggcaggggcaagcggtgagaggcgggcgatcaagggcgaagaagagcatgctcacagggtttacaaatgctccctgaagttgaggtcagcctggatagtgaggcgtgtttgtgtgcgtggaaatgccctgggcgaaccccactgtgaactgtattctatcatgctaactaggcaatctctgccctggccctagccttgccctgatctcggctctgaccctcttgtgcctgccgccgccgctgctgcccttcttagtctagctcttcacgcttgatctcctttaattgcactcactcttctcgtctgtttatcccggaagtcaggttccttttttccctttcttttaccttttctctcctactccttcttctatcccttctatctcccttctctctttctcttctccatcaacgccactggtatcgaacactcttcataaacagattgctttctgctatggtcattcctacacaacctcatccggatgtcgaccagaacgttgtcttgtttcagtcagttgcccttgttgctgtaatctttcttcccctctctcttattctcgctctactccactcgtaacttattcacctacattgacatttctcatcgacatcgacattccatatcaacatcctcttgtcatatccacatccagactgggtacgttcctaagttgattcgtcgctctcctgaccacagctaacg

SEQ ID NO: 283 - DNA, 18179 bp, Xanthophyllomyces dendrorhous
  misc_feature (5275)..(5284): n is a, c, g, or t
ctcccagtctactgcagtaccgccaggatcacaaactttcctcagaaagaacttgtcaacattctagaaacctgccggagggccaactcctcgttcgatctgcccatcaccggcttgctcatgtacagggacggacaattcgttcagttcctcgaaggtcgcaagcaggacgtcctcgacttggttagttctctttcttcttctttcaatgcctctcattcgttcttcgccgaagctaacctatccgagcagtacgagagaatctctggtgatcccaggcactacaacgtcaccaccctcttccaaagagacaccaaaggcagagactttggaaactggtccatgtctttccggtccgtatagaatcacctcagaatcttatcccaagtacgacctcctgcctgacaagtgctctttgtgtgatttgtcttctcttttctttctcaaatttcttcagtgacctcgagaggttgaacaggggactgtaagcccttactcttctttctatcctctgcgcccatccatgagtaacaagtggctgattcgcctctacccgcctgattattgatttggttgtatttaccatcatcgcacccctcactcgtcatgctctccctatcactctctatcattgctccgttaaaaggcctgataacccagagaacttgcccttctcgactcaggaaaagtatgagagcgatgctttcaacgacattatgcttcaatcccatgcagagcaagtttccatttcttgcgctcctttttctcacctgaccgggtctacagtttcagactaacttttcgtcttttcggggttttttctcacagttctccccagttcctggacaccatggacgataccattaggaacctcatcaccctatatcacaaactcttcatgcgactctagaccagaccacagacatgatcacagccttctcttctctcctcttcctcttctctccccaccctgatctccaccatatacacgcatacacctattcactgaatagccgtagacggatttttcaacttttacttctatcattcttatcgcttttatctacattataccacttttcggttcccttaatctcatctttcatcatctactcctgctcttactcttttaaacgatcctctttttcgctgcatcttctatattgtataagatagtctttttggattcatcggaatacatgttaagtcgttgtggcaatccatagcaacatctcctcgagcgcaaggaaattgtgctgattacgtaacgcgttcatagtccaaggtcaaatccttgtccgcatcagcccatcactttttcatctctttcctccctcccttatctccttctagccgagcgatctgggacaacatctgaacgagagccgagagggtagaacaaaagtactacatatagtaacgagatgtcgacaagcaggaacaacaaagcgttcaacaaccggcgtagtcatcctactcctcctgttaccgccttgcgcaggaacgacagtgggaacgggttttctgtgccaccactggcaacagtagcagtcggaagcgagccgaagggaagctcgttgctggtaaggaatctaccgggggatgtgacgcttaacgatgtggatgtatgtctgttattcccctctgtttctccgtattctttggatccatatctgacccttgctcccttttttctctcctgttccatctatctactcactatgatggatgacaatatatgcaaacacaggaacttttcaggatgacgatcggaccactgatctcttgtagattggttcacgattcgaaaggctcattcgaaggaattgctttggtagaatttgtctcccctttggatgtacgctttatctgtttttttagtcttatcatgtttcgatttgtcgagagtcctcgtccgtgtactgatctcgtctttcggggatggtcggtgtgagtctgataggctgtcaaggcgtgggagatgtacaacgggaaaaaaatcgaccaaagtacgtttccttccttccttgtttgtttgtttgtttgtctgttgtttcctcttttcctccatctcttttcccttcttttgttcttgccgatttacatgcatcggagatgaggagaaagtgcacaagcttactgaatctaagacacataaaatattggaaacgcctacagaaacaccgctcgaactccacctcgtttatccatcgcctccgaccgctctcgttccctcccttcctgcgcccctgatacccactgttcccagaccgacacctacgcccaaagcaacgcccacaggcccatccagtctctcgactcggattccaccgctcaagcccaagtccaagattggaaagtcccggccaggtccgggccaagcaccgttatccgctcggttaggcccgtcggtcatcccgcttgaaagccgattaggtccccctcctcacgcgacttcgtctttgtcgctatctcttgccccattcggttcaaagccgtcatcagcagagcccaaagtaggcctgggcggaaagaagaagaaaagcggaccgatcaagaagcctatcatcaagaaaaagaacggaccgaagaaagtacagaacgggatggacggagtgcagaggatctgaggatcatttcttccttgttttggtcactgttctcttctcttgccttgattgaattttgtttcgagaggaaagaatctcgaagaaagagaaaaagaaatggtttccaataaggaaaagaagaaaaaaggaagaaaaaaaaacgcttgatcatgacagatagaaatcaaaacggcaacagatatctctatgatatcgaaagatcaggtttggggttctcagtcttctagcacgatgtgaattgtctcttctgcgcttttcacgcccactttcccctctttcaccgccgctgcagcagccccctctacagccaaccccacagccacgggcaccgatttagaagaccaagaaactagccgttcagacacataatcaaacttcctctggtcaaccgcccacgtcttcgggatctcgccctggagtgcctgggcacggagggcggtgtaaatcttgtaggcgcagaaagcatcgttcgaggcgtctggttgggttttcatcgagcgtagcaaacaacatacgtgagataaatatgtttagagagaagaaagtggcccaaaaccgaaagggagaagaaagaagaagaagagataaaggcggctcacattcaacttgacgttcgttaaggatagcagactcccagtttgacatggtgactttcttgtgtttgaccaactggcgtttaaggactgttcctactagaacggccagtcctctgacctaaacatacacacacgcacacaagaaatccagtacgagtcgatgagcgcaagggataaaggacgtttcctaagactggagagactcactttctgaccagagatcggagggcagatttcgttgaggtccaccaagcctttcgtctggacgcccagatcgttgttgatcttgcttgcgtcggctaatttttttcggttttgataaaatcgatgtatttatcgtgcagatcccagaatgagtttcatgaggtcgcttataaagaaaagtgtggaagaagaaagacaaacatcgaatcccgacgccaagtttgattgtctctgggtcctccagtagctttttcaactggaaagggagcgggttcatgctcctgaactggatctattcacaattccccatgaaaccagaggagaaaaaagaagaaggaggacgacgactcagaatgccaacataacaatccgaatgatgagaaggagaagcacacagaaagcagataaagactaacgagaacaatcgtcttgctatcagccagttgcatcaatgccgtcggattttctttaccgcctttaatgaagtttggtttccactcgatatctagtcctatcggtctattcgatccgaaaccgttcccaagaataaatatcgagtcaaccatgaaaccaaacccgattctctcaggcattgtgaatttagtaggtcgaccagcgctagacgaaccctttgagtagactgacagcctcgttggcggattttgtatctcccacaatcaacaccatcggtccttccgttccgtcagctgatggttcttgatgtctgaacggaggatatgacgcgaaggatgctttgagttcagacattgatgattgcagttgtggcggttcgattctaatttgtaaattagtttttgtcggttattcgttatccccaaaatcacaagtcggagagaatgagatgaaatataagattccgaagatgagatgaagccgaatgacacgcaaacgaatggaagaatagcatggaaggacagacgaacctggtacttgaaggaacaggagcagttctaacttcagtccctacgacacttgatagttgtctcactccctgcgccgatcccgctggttttatacttttggtctgtcgatattttttagtttcattctggcttgggccctgtgtctgaccctccggttgaggttgagccaaagtgtggacatgagcgtgggtgtgagttcgggattgggttgggtgctgatgataatttcgaggcatcgttttggaaatagcgtttattgaccgacgagtgtgtatccaagtttgacggacgactatcatctggattgacaagatggatcagagagtaccctggccggagagagaggcaggaaagaggtgagaaaggagagaaagcaagggagataagttggttcggagggttgatggaaagtagataggtttgttggatgttttgtctcgtttatattttcggtgatttcctaatttgttacctcccactttttatcgttatccctagtttctcatacaaatgtccttctttctatctttcgtttcttcctgatttttgtttcaatctaaaaaccgagatgagaatgatcatgcaagggaagaactgtataacgactacaaaatacaatcgaggagaggaaagcacacagaatataaggtagcgaacgagatatgtaatccgacaagagagatagaaaataaagtaaacccaagggagcgccagaaagaaacgctctctccactccacttcttcgtgtttttactttgaatattaagacggcgagatctatacagatctgggctcagataggttcagaacgagcccaaacctagactggagtcaagaggaagatggatgaaagactgaaagaatggaaagaaaaagaaagaaagaaagaaagaaagaaagnnnnnnnnnnaaagaaagaaagaaagaaagaaagaaagaaaaacacaaatgcaaacaaggaacagcacaatataagaaaggaaacccctcgaggatcctattccgtcacatcctcgaaccgatgtcttttcgacccatccggtccgtctggcgcgtcctcctctagatgcctcttcagcccagattcgcctccaccctgcacttgaggtccgccaagaccaggagaagcctgaggatttccttggccgagaagagcttcgatggagaatgatcctctccgagactcggagaataaggtcgagttcaacccatcacctacagattcactcgaaattaaattctgaatcatcgccctgtatgtttgtttatttgttgttttgtgaagagagagggaaaagagcaacaacgttcagcagatggacgaaagaaaagagacaagaagagatggataagaccccgtacatgtattgatcatccctgaggcccatcccaatcaatgggtttttcatctcctctccctctgcaatctctccattttgcaaagcctgagcgcccgtcaagagcgcatcatcgacagaaggatcagatagcggtggtcccgtaccgttgggcggtcgagggaccagttgaagttgttgaacagacgtcaagtgaatcaagtgtttctatatcatcatcaatcgccagatgtcaaatttcgatggtcagtcaatgggcgaaagcatgaggagaatgagaaacgaccgacctcaagtaaaccgaggagactctccttattgaatggtttcggcctacaaacaacgatgtaagcaaatgaattatacacacgaaaagagagcgcaccgcggatgcaaaaggtagggtgaagacatacagatgacccgtcattcctgaactcatgtacgacaacacatcctctggattgttattactcgtcatagaaatgattggcgctacatcaaaccaaatccatacacaataccacggtcagtctctccattcgagaagcaggaggataagacaagcaaacatactcatcgagtcaaactgtctgataagagacgtcgcggagacaccgtcaaggttcggcatcacgatatccactagagcgcgcaggacaaacagagtgaacaagcgagcgaacaaacacttcaagtcaactcggccgtccaggacaagaacgtgaaaaagggcgaacaaacttactgagaaccaaatcatatttttccaaattcattttattgaccgctccgattccatcggtggcgatatcgaaactgcaaccaaacacctccaacagtttactcgacatttttctgtagaccgcgtcgtcttccacaatcaacactctcggtggaacagaccagccagggacataagtggatcgcctcactcgaagcttgccagatctcttggaagatgaatgatgacggtgttggtgatggccatgcgtcgagttggttgatgcggacatttgagcattcactgaggatgaagaagaaacaacactgccgctgttgctgcttgcgttgccgttgggattgacaacagtgacagccccattagaggtaccattcacaggagtagctggattcgacccatcactaccacctgaacttggcggatgattccttccgttcagtccaaatcctccgaacgaactgtttctgcttcctcctgcttgaatatatgcttgctcatgagttccgtccgtcttccctcgtccatcttctatcgctcgaccttcgaccttggtggtcgatccgtgctcgtgggtttgacctgagcgcgaaagatggtcgtcccaatcaaaagattctccatcgactatctttccgttcccacttccaccaattccaccgccgtcatccgactcgatggattctctgaatctgagttgtccgacagttagaactttcaacccattcggcccaacggtctcgctcaagatggctgaacctcttcgacccatcatgtcgggtaacaggcttaggttcaaatctccgttcatctgagggttgtgtttgtagaagggagagaacgggttggccgtctcgaattggacagaagatatgccggcagcggcgacagctgctgtcgtagggtcgtcttgttccgattgttgttgttgttgttgttgttgttgctgttgttgaagagggtctccagatcgagtagccgtcatctgttgagactgactctggccctgggcttgcgcttgatcctgactggacggtctatcccaattctcttcccattctcttccaccgccagcgcttcctgtgtttcctcccgctcccccttctcctcctccaccggcagatcctccaattctaccaggctggtgttctctttcttttccttttctagatgttttcggaagatgataagctggatactgctgtcgggtctgactctgtgagctttgagctgagaacgggcttgactcgttcgaagtcgattgctgctgtgtaggttgtgtaggctcataggccggctggacgttccctctctgaaacacgtaatccccttgtggaccagccagattcgggttcggatttgagttcgtgtttgtattcgcgttcgagtttgtgtttgtgttcgtgttcgttctcgggcttgtgttcgtattcgaggtggtgttttgattcgagttggagttgggattgatgagcgcttggtagctcgagccaagggtgaaatgaggtgtctcttggttggatcgttgatctgatgatgtttgcggcccgtttcttttgggtgagtacagtcttctgtgtgtatatgtgtgcgagagagaatgagagcaggaagagaaagaaggctgaccgtagttttccaacttgaccaggtaaccaaccatatcactgacgagtgcctctgttccacctgttgctctctgtaacctggtcagatcgttcaacacctcctgatatcgttcctgcaacgtttgaacgtgtctgaagatcgtcgtatgactctgttgaagggccgcgacttgagcttggagtgcacagaacgcttgtggatcgatcgggcccagagtttggttcaggccttgattttgaccttgattttgttgttggtattgatggctactagggccaacgactgtggaaggagatgaattcgaggtcgaatggacgttcgaaattgagggaagaggagagatcggtcgacttcccggtacatctgatgatgtggctaggtttggattggaagatacccgtgatagattgacgggcctgcccaaggggtttgttgtggtcgattgagtctgaccggccttgttttttggtgcagggactttgcgctgttgtggtagatgttaattgtcgaacacatatcggtcgtgagcgagaggaaagacaagagaatgtagttggagaagagtcaaaggtaaggggggaaggaggggcaaaccttgatgttctcgagactttctccgctggtagtgttgaactctggatgtttaaactcccaagactggtgggagacgagcgatggatgaaatagtttgataagatcagaagtgtaacctttctgtttggcaaaagacaggaagagaagggatgggaagggaaactcacagtttctgctccttggccatcctcatttttcacctgatcgatggtttcccccccaaagcatacagacgcgacacgcgcatcaatgattcatcctgatcggaagcatctgaaacggcgaggaggcctgatgagaacatatgattgtataatgagaacgaaccttgtggaaatcatatttgttcaactgtctgacgaacgaggcaaagtttgaatgtctgaaagtttgagggctgggaagagggtggaaaagtcaagtggagatgaaggatacggcctggttagaaatcgattttatccgatgggacatgatagaagagcacgaggaaactgctggacaaacaggattcgagtggtgaactcattcatgttctgagcacacattgatatgaaggtaaggtcagggctcgatacactttagcagctctctccacgatagagaagacaaacaaggactgaccttgacgagaaagctgtcgcccttggggctccaagcgacaacatcgtcaaacgcgtcgtcctccagcattctgtaagacatgtaggcccggttgagaggtagaaagcagaaaagaaagaaaaaagagagcaaaatattagacagaacatttgattgatggtctagggcgcgagcgagatgtctccgaaatcaaacgaataggcaatgacgacaagaaggaagaaaagaaagacagggtactgacttgaagagctttttgacaaactcactcgggccttgagcgacctgtttgatgttgttgggagcagttccttgactagaagtcgagcgtgagcccatcgcactggacattgaacggagagcactggcgggtcggttagagtccaagttgagaaagctctctctttcgtgtaatggtgtggaccccatgggacgggacatgtcggccggttggaggataggtggtaacgtcggcttgtggtcaccatcggcgtgatcccatccgaaagaatgaccggagggttcaggatggacattcgatgtttgcggaccgcctgggctggtggagtacacggcgtggtgagggtagccgctggctgggtgattggtgtactggctgattgggtgaccagagaactggctcgaatggatgtgggatggatgttgttggacgtggccgtggccgtgggggtgcgatagatgggttgcttgctgttgttgctgctgttgttgctgctgctgctgttgttgctgatggtgaagcggatgaggaggaggaggagggccgctggcgtaaggaaggccatgtatagtcataggggacggatgggatgtatgatgcccgccggcgtcgttaccaaagagcctatctgatggatgatgcatcccagacgatggattaggcggcggcagagcgtatggatgagaagcgttggacgaagaatgcggcggtggtggtggtggggttgctgtctgccactgatgatgatgctgaacgtgatgaggatgaccggagggatgtatcccggacaaataagagcctgggggagaggaagccgaagacgaagacgaagaatgtgagaggtgcggcctggcttgcctatgagcattttccatgacctggacacctggattggctgctatctgggtgaacgatctggagagagctaatggcgagagaacaatgtccaaggatctatctgacaagcgaagggggaacgaacggagggaatcaaaagagttgatggatggaaaggatgaggggaaaaaaggtgctatatttttgcgaataggatctgtagtgtttggtgtgaattttgtagtgtttggtctgtagtttgtagtgtctctctatgatttgtagtgttttgtatcaatttcgtagtgttttgagtttaatttggcagtgtttcgtattcatttagagtctttccctattcatttatattccttcctatttaatttgtagtctctttcccctcgtttgtcacactagactcttctgatggcgtcttttacctgtgcccgcttagatgcatacatacacacacacatacacacacacacacacacatacacacactcacaaacatgctccctccctctctatccctctctatccctctcttatatgctctctacatcaccattccaccttcagagttcgtccacacctctccgtagatgtgtacgtccgtcaatcagaccaccacggcttcaggtccggtcggcaaacacagtcgatcagcacggtaaccctaaccgagtccgactgttaatccgataaagaccgtcttctttggcattccagtcaagttcttccagtctctttgtcggtatcttctctggcttctcttctgtcgctgtgcagtgattgggtagtggctctcgagcatcgtctgttgttcacagctctatcgaccaacacactctctgttatacaagacgattccttctttcggtccatagcttgtttgctctctgacacatcatcctaccgagctgtcttatgcctgtcatcgtctagggtcgcctgtctgatgaagatagcccagtggacacttgaggttcattcgttcggtcgagttctgccctgaattcgccgtgacggtaaattgtcattgctcgctgtgaaaagctgtgaaccccggttcttgtccggtcctgtcagccccctcgttcctagtccctgattcagctttgcgcccgagaccttccttgcacgaggctgccctggaccggtccttgctctttctctctctccttccttccttccttccctctcttctcatcttgtatcgaattctctttacctttccctgctttagtcgatcgcagtcgttaccgtcagtcctggtcgaacaatcagtcaaaagaggacctaatctcagagaacacatctttgcgcttgagttcaacgtgacatctacgtacaagagagtcaatctgctcaagagtacataagaaaggcaacaaggtatctgtccgtctacgttgagtttgaacatcgtgccgacgcgctttcctatgcgacataacgacccaaactctggttcttgggactcgatccgccgggtttgccataacgtagctctcacaaaggatactctcggatcattctcagtcgagcgatccaagtctgacgattatatctcggatctgaaccaacgctccaaaccccagtcaggaaacaggcataaacgatcaacttctcccagacgacagaaattgtggctgtgctcttccgaccgactcacccgcctgggctgtttcctctgctgcatgcaagttctccatggaaatccagagggaaacctacccttgtgaacggaagctgaatgagtataagtgtcgatatttaggatcgtttcttctttctctttttcttctttcgaacaaatatccaagtggtaagcggcccccataggttgagcatgaactgagcttaattttggatatgtgtactgacaatgtttccttcttgctttgtgttttcctttttttttttctcttcgcatccccttcttccagaacacaaaagttctgtctttgcctcacaattgcatagtcagcgttcccgttcccgagagcaacttttgtctattccttctctttctctgaagcttttgtccgtaaaactgtctgtttgagtatccttccaacccaaacctggctttctctgggcgtgaccgtagggacgtcctcacccttcattgggtttgacgggcaatgaccgggttgtgtttcgggccggtcaggggaagtttatgaggatggctaggccgaaagtaacggaggaggctcgcttttatgggaggtggacggacaactctttcctgtactattcgttgtatttgtgtataccatgtgtgtgcaccatcgtcatgatccggtttaaaacaagacagagaaaagacgattaacaccagagagtcaagaaagcagcacacccacagacgcaaaaaattgtcacagctgttgtgacggatgaaccagctaacagagtatcacatcacttccagatcgatcaacacctcaaccgatcctttttgcttcttcttttcttgtcttttctccccaagggaaacagcaagagactgggtgacaccagtgaatctttcttctccattcagacagcaggctagttgttcaaaagcaaagaaggacaggattacgttgctcttcattcgggcagagaaaaacagggaatccaacttcttgtattcttgcttcgtctccgacttcatccggtcctggatttcttcgttgtagtcttcttttcttcctttttctctcttcctctctcacacacacacacacaaaaacacatctcttcttctcttctcttctcctgcgtgctccccgatctatctcctgtcgtcttgttcttgtatgcctctcggtcggtcgatcgatcgagatagatgcctgtaccttccatcgatttaattcatccagctggaccgagccatctctcaaatctccatcggcaaccgcagttacagcaccagcttttgacctcaaccaccaccccgtcctcctcagataacatcagcccttctccgctgtcctcttctgttgctaagcctatccggccttcgcaaacagacatgtcgaccaccgtccgtccgaattttcgagctcggcaaggggcaggcagtgcgcctccgggagaggtcgacagggcaaacatgcttggttcgttcttggagtcgacgggcaaagctgaagatacatcagaagagttcagccatgtgagtcgtcacccgtttccttcttctttccgtctctctactttcttctattctctatcttttctgccgctctctctctctctctctctctcgctttttcttcctttctttcttgtttctcgctcgctctccttgttcatccatttccttgcaggacgtgctgtactggttctcagtcaagtccaaatgctgactgcctctgcccaatccgaccatcttttcccctcttttcaccagccacggcttcatcatcaaccgcgttcggaacctcacattcaacccaccctatcgtcctcatcatctccgccgtttaaaccgtcgtttctcgatatcgacaagctcattcagatcgcgacatcccagcccccgccttcgcctcttccgttccatctcactcccaacagccacaacaccagccatagttcaccttcaccaggagcaggatcagcgcatggaaatttgtcaaggcccctgtcaagtgtaggacatcccaacggacaacccaggtcgacaactccttcgtacaacagtcacaacctctcagcttcatcttctgccatcggccaaagttcaaccgacacgagagtctgcctgtttgtcgggaacgtaagtcgcatgatccgtcttcctatccatgttccattccttctggttctccatcttttccatcttttctttgtttttgtttttctcgatcttgtcttggtcggcagtcgatcgagggtgtacgtaagccctttgactgacgatgcacttctgctctcttaactatctctctctcgaatctcttctggatcctgcttttgctttcccatttacctagctgccattcagagtccgatggcaagacgttaaagatctgttcaggagagctggaacggtgttgcgcgccgatgtcagcctgggagcggataaccggtccaagggtcatggtctcgtccttctgggcagtcgggaggacgctatccgtgcgattggtttgtccctttatttttcttttatcgtcgtcatcatcatcgtctcctcatctcacttatcgcaaaattcttttcatcagaaatgttcaacggatacaactggcaaacccggatccttgaggtcagaccggaacgactccctccagagtttgaacaacatgctcctcctcttcttcatcagaatccatcattttccagcacaccagcttcgaattctttccccaaccatgccaatcagaatagcaacaatccaaacatgaaccctgtcgttccgtcctcttcgccgatgtacccatcacattcaaacctctatcacccgatccctggtcttggcactccatcggcggcctcgatgcttttcaatcacccctcccaacagcagcaacattctttcgggtcagaaggcctcactcggtcgaacgatagtccgtttggctctcggttgggatcatcgccagccgttccgacgatttcttcagcatcgacaaggacgaccgcctcttcaccagcgatctcgactgcttccagaacatcagcttctctaagttatatgcatactcaatctcctcaaatcggatcaccgtcgctatcatcagcagcagcttcggtcgacggtcggtccttcacaccaaagcctgcgatagaccagtcggttgcattggaagaagccatgctaaaatcccttagactagggggaccaggtgggccgaccgagcaaggaatcaaacaatccaaagtcggaatcagtgggtcgaatgcggcctccaggctagggtttgatccggctttgggtttgtcatcgtctacatctgcggcaggggcgagattcggtaaggacggactgcagggcgtcagtgttgggtctggagacgtcggtgttgggaaagtgttgttcgtcgggaacgttagtgctcctttctcttacttcttctcattttcattcaacttgagcatgagaagctggacaacggctgatctatcaatcgttggaacctgattgcatagctcccgtttcatatccaatggcaagatctcaaggtaagctccccttctgcctatatctcaagtcgacgttagatcaatgagttattcctaactttttctttgttcccgtttgctttcacattcgctcttcaggacctcttccgaacggccggtaatatcaccagggcagacgtggcgcaaggattggatggacggagcaaagggtttggaagcgtcgtgtttgggacggaggctgatgctttgaatgctatcggattgtttgatgggtaaatatttccccttttctcatgtgtctcactttcctcttgtctttctgacctgatgtgcctgtgtttttcttaccgcaccatatcgatcagttacgagataaacggtcggaaacttcaagtcttccccgaacaaacgaactccattcaacattcgacccaacctcagctccaacccaacttgattcccaatctttcccatttctatccccctggcggttcacatcagcatgcacatcaacatcaacaccaacttcagcaccagatccctagccgtctaggcagttctctggcctcgttcgattccttccagaggtatgatctttcggcgtctccactctacggatcatccggtcaagctgttgcgggtaatgctatctctgcatctgctcccagtcttggcggaaatggacatcagctggcttcgtacggtagccatggggtaggtatacctcactcttcacagcatggggcctctgcaaatctttatggcgctcttcaagctcagtctgggggtcagacccagactgtcccacagctcagtcttcagcagcagcagcagcagcagcagcagcagcagcagcagcagcaacaacaacaacaacaacagcaacaacagcagatgtcatctcagcaacatagatggtctcagcctcagtcctctcttatttctagaacagatgataaaattcagagcggacaggctcaatcggaattgtcagctggggcgtctgatgtggccgagatgaagaatggcgatagcaagaccactgctctacagaagcagccaacacagcaaccacaacagcagcagaggtcgtaccaccgagcgaacgcacctcatccgggacggatcgacctcccgcaaccttactttgcaggccatccgttctcgaccatgagtcctttacaaaatggaggaaggggaatgcccttgttgacgcctagcatgcctagcttccagttcaacgccttcactgtatgtcatctctgtcctttcttgtccatttttacctttcttcttcccttgcgacatcacctaattgggagaattttatcatttgttatcatttcaagacccctccggtgttcccacagttcttgtcaccgggtctaggtccaatgtctccctcgcttcagtctccgccgatctgtcatccattcttgaaccctgcgccaggcgcacctttgatgttcccctcaaacgtcactccaggacctgggccaggacccccagctcttcattctcatgctcaacaaacgacgtcaacgaatggttatcatcatgccgtagacctcactcagcatcttggacacaacccgatattcccaccgatgacaccttcaggtttcactcctatccactccaggatggaaactccgggaagtatctactttgggggtggcataggtatgggggatgggtcttcgagggccggttttggaggaaatgacgtagggtccgttggtgccattgggttcaaatcaaccatgcaccctatcgaagaacgttcggctgtgggagcaggcgtgagtgcaggacggtcagctgccgggagttcaggagggggggtattgaactctacagagtctcctcagatctcgggtggatatccattccccgtcctttcggatgaagacgtcgatcgtgctcaacgaggggagatgaatagtcaggagaagagcgagctgaagaatgagtctgactctggcttggagatcggctcggcggtttcggagagtggacagcaagggccggaggagtcgaacggctcttcgaatgtgttggagaggcggaacagcgaaggattgccttgaacgatatctctctcatctttttctttcttttctttatcattttttagtctgtgttctttttcttctctttcttctttcggttacttttggggaagacggggaggagggaaagggttttcttggtgtttcgtttacatcttgtggtttatagggggtttctttttctttgtcaatctgggtttctcttcacaagtcttctaatcacagcaaatcacaaactcattcgagctatcataaaccaaactcgtattataatccttttgcttttctttctattgcttctcaacctggttaggtcaataggttctttcttgttcctctctcttggtctacagatctctgtttgtctttgtcttcatctttatcttgttcacccctctttctcttctctctctcgcgctctttctctttctctcgcggtactcatcgcctcgagtctatctggaaagaaagaaagaagatagatgtgtatatgtgtgtgtgtgtaggtcgcgtgcgcaagatccgttgttatcgcctgacgcgttaagatgcaagaa

SEQ ID NO: 284 - DNA, 86359 bp, Xanthophyllomyces dendrorhous
cttttcttcatcccgccctcttcacttgttttgatccctggtttctttcagaggatacacaacactgacaagaccatagcaggagagatacagctcatatatatacccagggggtttctcgctcaacgggaaatataagtatacctcagtcgtttcgatcgccggaacacactatacccggatagacttgtttgttcgctgttctccgaggaaagtttataacgcggtatgtgtcctgtcttccactgtttgtgtttgagggacgtttggtagtcgtctgagtgctcgaaagtgtcgtccaaagcaagtctcgaacgatgagaatgaagacttgtcaggctcacgtcttgaagcatcgaccaaacttaccttgatctcaagaaagttgactgatccttgttcttcctggggtttcgattttcggttcgttcagtcagacagagagagagagaaatgtctgccggacgacatgccgcaggtcccttgaacccttcgactcctatacggaaaccaacacgtccttcgtccaacttagatactaccactgcctcatcatcatcgttaacaggctcgagaacaggtcagagttctgacgacactccatcgaaaaaagcaccgagtagagggaccgtcaggctgaaaagacaaccaggcgcaaaaggagtggtacagtatcagtctttggaacagcttctcgctcaagccggtacgtctgcttttgctctccctcttttcttcttctctggaggagaattccagatgttgatcctaacggatgatgatttattgttcttcatatgtgtgtgtatatgtttatgcgttgatgctatcaggctatacagagacaagagtgatcaccccggagagcatacggatcaaagaacgtgctgcttggattcgggcccaagaagaagaggagcaacaagaggcgactcacgcacgtgaaacaaaagaagtttcagagatcgaacgattcttatttgaagatcatttctcgtcgtcgacgaccgactcgacttctcaacttgactcgaactctgatacagatacggacacggtcgagtcaataccaaaatcggagccggggtcggggtcgaccagccttggtcgaaatgtcgatgagcagagtgaacgggagactgggaaggcgaagaaaccctggagcgcttttaggcctgtggtagacaatcgtcagcatagccgtcaacatcgtcatcaacaactgcaccatcgtttgtcaaaagagtgggattcatcgtcgaacgcgattgtatatcattatcctgccgacgccttttctttggtcgatcatccgactacaggtaggatgcctagggctgtaccctccttccaggacatccaaaatggtcataacaacaacataaacaactgtcacagcgaagaagaatgtggctcgctatcttcctcactctcgactttctccgcggcggatacgatcattctgtcccctcctgatctaaacgttcaggcgttcgagaatcaaagcgcgagtgaagatgacgcagatgacgaccaatcttacgcgacgtggtccatcccgtttaacgagtcggttgaagatcttcgaatgtcgcaagcttcttcaagacctatccgaccattcaatcgatctatccatcatggtcaaacaccactgccattaccgaacgctggacctgcacaacaggcgttagagttttcggaatcagatgttagagaagacaagagcttatttgctagttcggaggccgctcggtcgttacgtcggatatcttccctcgctcaactttcttccccaaactcctctgcgtccacatcggtcaaaccgaaattcttcaacgcgtttacgttcttttcatcttcctccttttctcctgcttcggatgaagctatactcaagagaccagctctctctacacagccaaaactaccggaccaagctcacgacacgcttttgaagagaacactccgccacacagcgtcgacacctgttctcgcccgacgtacggggtcttcaaactcttcgtcagaggccgtccctcctcttcctacgggttggttggagacaataaaaaacacactccaatcgaccatctcgtcaacgccatcgtcgataataccgtccacgtccactctgatgcctaaagatgcccctccgatacttaggcaatcttcttctcctgctgttctttctttccctctatcctcctcttctgcttcttgttccgagaacgtggcgaatgaaaagcccgtctcggttcatctcagatcagccccactcattcctaaattaacgccttccaccgtcgtttgcggctcggaagaaggagaggatcttccaccattttcttccctcagttttttcaatcaatcctctggttcaaaatcaggatcaacatcgacatcctctccggtaactccccatggatctgtctcagaaaccatcccatcacctgtgctcacaccaaagatctccttcggcgaaggtgaaggttggtcgcggacgacctgtcccggttgggtatggacggaaggaactgacgacagagaagaagacggttggtatgccacgccgatgtgttcgtttgaagattctcctctggataactcttcccctcctcgatttcgggctgctaccgtctcttcttcgtcttcttcatttactacatctccagcctctactgcatcagccacctcggcggcgactggaggatctcggttcgggatcctacgcgctcagagatctatcaaatctcttcgagagactctagcagctgactctactgctcaagcagtcgcactcgctaaggccaaagctcaagccgaaatcaaagccgctgctgctgctgccgtcgccgctgccaccgcagctaaccacgctttcagattcaagacccccaatcgacgacagaataaagcttcatcccctttgtcgatcaagcatcgaagcggccctgtccctatattctgtatctcgagtccagacacgttagagttaggtctgccgccgcgagaattagatgtagaggaggaagagagaagagcgtccgctttggtagctttggctttatcatcttcaagaaaagaagcagaggacgaaggttggggtggaggaaggaggaaagcggtgagaaaagagagaaaagtaaggagagaggtaggaaggaagaagtgagctgagctcttggaaacctatccctaccctcctcctgcaacccttccgccttgcctctttcctactgtacttgcgtttttttttgtttccttgttcgtgttgtttctttcttcttgcaaattgcgtctatctgtccctcctttttccttcttttcaaagatcttcacactgtcattcaaaccaccggtctacaaaaacattctccaattcattgattatgctatccttgctcaagctcctgtttcatatcctcacgtttctcttctttttctcaagtgtttcttaattgcatttataccctctcttctttgcctcctaatttttcattgaattctcccacattcatccattcttcccgtccttcagcttcttcgttccatgtttctctcgccaaacctgctcttcatactttcatctctttttcacgatccttcagtctgttctctgacagagctgtcgaaatatcacgatgacatgtcctctttgccctctttactcatcttatatctgcagaaaagaaggaaggacgaaagaagaatcgtacactcgtgagtagatgataaatctttaggacaaggataaaggagaacagagacccaaaagaacagagaaaggaaacaaaaagacaacacatagagattgtacggatcaaaatggataagggaattgatagataagtataatgaataaggacagtataagccgaaagttcactaccggaagtcaatagagagaaaagagagggaaactcgatgaacgaaaaggaattagagagtaaatgagtgtgtaatgaaagacaagacggaaaaacatagtacacatatttcaaatcatatcacaaaaaggaccgacagatataccacagacaaacgaacgacagatgtggccagattgatggaaaagagatggacggagacggcagtggctcagagtaagagttagaggagaacgtcgtcctggttcttcttaattttcatcatccaaaccctgtggaatcccagagaggatctagtgagttacaattcttgatgacatcgggctacaaggacagaagacataaagggacatcacaacttactccatacttccgcaggacctgcctgccgattccgccgttccattcctcgactcttcgtcgcgccaaaatactcactgttttgtcaaggtaaaggcaggcgataagaacctcctcaacaaaagaagatacatagtagaaagtagaacatactggtgctaccagaggtaccaacaaagccggtaccgagggagagagcaatcgaatcgatcagagttggatacctatatttaaaaagagaattgtacgcgaaaacaaccttttggttagtatcccagtgcttaaacacaacggaagataaggatggcaacgcaccaaagcccattcttctcaatagtcaattctttatcatggtttagcatgatccatcccagatctctaacctccttcaagaagctctcgtcatgctcatccgtcgtggccaatacatgagcggtcttgatgcccttttcttcgagaagaagtttctgaacctcggccactctatcggcgtatttttggataggagcatagcaattcttgtcggtcgttcctgcgagttcttctgacgacagatccttgcagatatcaccgatgtcacttcttctgatgtgaacagagatgaactgtgaagagttatatgagacttaactagagaaagatcttgaagaactgaagacgatgaggcgtgactcaccggaggtattcgtgcacctttcttatccttgactccaaacgccctcctgaggtatcccttggtcatctcctcgatctctggctcccacctcatgtactttccaacggtctcccaagctccaaccttcccaagcttgcctcggccagtccaatcgtatctggagtcaccttcagcttctccaagattgtacaggaaatcgatgtagagcacgtggtcgtcgggtgcgagttttggctgctctctgtgtcgctcggtaaagtaagacgggacttgagtcaaatagaactgggtgaaggggttgggcagaggtttgaagagggaggcgagggcggcaaagtggacagatgtccagtcaatgaccggtcggaaagtgacgggaacgggtgtgaagtatggctctgaaaagcatgaaggcattgcattggtaagtgtgtgcgttcatcgcctgagcgggacgagacttactgatcttgtaggtatccaactgataacacctccttccgtcctcgatctccttattctgttcttcctcctgatccgaggtctttggcttgtgccactccgggttggtcaccatccagatactccaccctccaatttcttcttctacgggctgaatggtgtcctcctcctgcccgactaaaagcttaccaggaactctagccttaagctcggagattcgaacaagaggaatcccaatagtatgtgacaatcgaggaagatcaaacacggtttcgaaaggaagggaaggcgggatgtgcgctgcatcgtcaatgtatcgaagatgtcgcgcaggagggaaaggaaaaaggataggcgttcggttggtcaagagaccaaggtggatcactgaatttagagtaacgaagaaaaagggtgagtggatagttgctcattgttatcagctagagaaagaagtgtagacgtacaattagctcccatcatcacatcgtttgctaattggaccgacgcatgaaaagcaacgaggttaagcaacatggctaaagacagaagtatgagacactggactcactccatccagaatggaaaccagacatgatgtaattcatatccggacgaaggttttctgttgcacaagatgacaaacaagcgaggcttagtatctgcttgtagagcggaactggtcccggtgcaggaagtcgattatatgcgcgtttcttcaacgaaggctttccgcgcgaagcctgatcgaaagggacaacgtccgggaagcagaaggaagaacgggcagaaacaagaacaggagaaaggtacaacttacctcggaagttgtctttcttgccataactcctgagtgcgccatcacttgcattcttcccagtccagggtgtagcgcttccccattggaccagactagaaactgagctcgctccgtcgatgactgaatcatgggctgtctcattgacgaacggaagaaggacgagaatgaatgtaaaaaggattccacagataatgatctgaggaaaaagagcgatagagaataacgatgagacgaaagaacgggagaggaaaggtgaattgactattcggagtaacatttgaattcagttgaaacatctccgaacgaaccagcttgtttagaggaacgaaacgtttgggaacccaggaagacactctagatcctaaaggttggtaggcgactgccatggtgctgggatccgaatgggctacgaaaaaacaacgagggacaaaaacgaaaagactgtgtgtcggtggtgtgtggacaagaagatggaggaagtgagaagccaagcagcccggatggtttagactggaaaggacaagattgtacttggtggaggcgcagcagaggtaaagcttatttgaaaagtctgcttacctaagacacgcgtcgcgtcgggtcgtttgtcttggcgtcgcgttcaaattccgttgctcatctaacgatctctgttaacatcttcaagaagcactcggcactcggcggttgatctttggctgttgtaaagacgaagaacaaatcgtcatagatagagctcatggcgtctaatatactccccatagacaagccgtcagtacatagaatcacttcgggacaagtcgtcaccgatcttcaaacggctatcaaggaactcgtcgagaacgcgcttgacgcaggctccacatcggtcgaggtacgcttcaaggattttggcctcgaagtcatcgaagttgtcgacaatggttcaggtatcaataaagtggattatccgtcgataggtctgtttgctgtcttttctttctctgaaagttaagaggctgtatcgactgacgatgcgatctattctcttcgaccatatagctcttaaacatcacacttccaaattgacatcgttcgctgatctgtcttcagtcagctcgtttggctttcgtggagaagctttgtcttcattgtgtgctttgagcgaatcggtcgaggttgtcaccgcaacgcaacaagaggcgcctttgggaacgatcatcacattcaataggttgggtcaagtggtagattcgaccaaaacggttgctagaatggcgagtctacatctcatcgaatcaccttccgcccgttggctcacaaacctccttccagatatactgaaactttttttaaagaaaaaactctctccggcgtaaaactgctacagagaggaactaccgtaacaataaaaaagatctttcaaccggttcctgttcgaagatacgaatttaataagaacgccaaaagggagtttgccaaagcattacatcttctgactgcctacgcgctggtaagctgcttgactggagccgacgttagaatctcagtagtcggaaccggcaaaggcaaagggtcgttagtattcttccctgtttccttggctccttctcatacatcaccatcccgagactaacgatctttccaaattcatccttcaaggaaacgtacagtccaccttcaaacaacctcctcgacttctcttagaactacgatctctgcactgtggggtccgaaagcaccagtcgagatgcaacctatttcccttgaacttgaactgatagacaaagaagactcgtgagggttttctctccactacccaattccatatcgcacaacctttcagttcatctgatgatctatgtttgcatcctccgttggaacaggacaacgcggacttatagacttgaaggcatgatctctctagatggtcacggtcgatcatctcctgaccgtcaattctattccatcaagtatgtaatccccctaagacgttgttgtgatattccgagatctcacgtatttcatctactgttgtttctgtctgggatgaagtggaagaccttgtaattcctcaaaggtaattctaaatacatatgccatctcacaaaaacaagttttgaaactgcataaatcgaaacgtaacagaatcattctctctgagctctaatgcacttcgcgcttatcacagctggccaagatgattaacgaggtctatcggtcgacaaaccccaatcagtcgcctgtagtgattctagatcttcagcttcccaaaagtctgttcttatgtagtttgacacctcctttgattatgtttccggaaacttcttcctgaacttacccgacttctctcgcttctgaaatactcttatatggtatatcttcctcttttgaaacaaaaaagctgcgtgcgatgtaaacgtgacggcagataaaaggacgatcttcttgcatgacgaaacagacatcgtcgatgggttcagagtatgtagatttatccttgttcctttactagtctctgactttctagctgcccactgcaatcatactctttaattttcctcgagaagctgattcggatttaatactcttgattcaattctggaccacttcgtgactttagtcgaagctcttagtcttcttctctcactcgtcctccaactctttccccctccctctttcttcggttcaaacacaatcacagaatgagacccaacaggactctgaccgtgaggagatgtctcctccaagtacccaacagagttcaataagagattcgcgtccgtacgggcgctcggacggaggaagacagacaagtattctgtcggtgtttggtaaacgtctgccagagaagaaggaggaacttggcgatagcgcgaacgagatcgaggatcaccatgctggtcatgacgtaaaagagtcggaagctgagcagatgaatgaagagcaatcggaaggtgaagaacagatatatgctgatgatagttcgaaatcgattgaacccgattcgacagatcaacctcaaattcaaagggagattctcatccatcgccgggcttcactatcttctgagcaagatgaagaagaaggagaatcagagaacggacgtagaaagcggaaaatcatcgattcagaagacggtgaagatgatgatggcgatggagtaggcggctgctcagagtttgatcatgatgatcctcaaccattgtttgttcaacaagaacgggagggagaagacagatgtactacttcccaaccccgcttcccgacccaggttcttccttctccccctcctctcccatcttactcccaaaccgatcctagaaggcctgatcggctgtctcgaacgactctgcgctactctctctcttccattcaatcacactatcgatgtctaccttccttgcaaaccacctccgacgatactggttcgaaaccaagagatcccgagggtcaggaaatgtcagaaggcgatctcgaaatatcggatatcagatcttccgcagcggaagagacattggatcggattgtgctgaaatcggatttcaaacagatgaatgtgttgggccagttcaacttgggtttcattatcactagcaagcgagggaaagaaggcagagaggacttgttcatcgtcgatcagcatgcagcgtatgtttcttttggtcaacactattcgtcattgaatcaggctcgtgcatcttgaactaatttaccttggtcggaacacttgtctcgttcttgggacgcaaactgattcagagatgaaaaagtgaactttgaactcttacaaaaggagaccaagattcaatcccaaaaactcatacggtcagcgatcttgccgctcatcttatatttctctcacgatggtgtgactgattctctttcgaggacctttgtgaatgcgctcaatactctttattcttcttagacctcggccattggaactctcagctgtcgacaccgtcctcgtacaagacaacctttccatcctccgaaagaatgggtttgacgtcgaattctcttctgctgttgatggtaaccatgatgatgaggagaccgagccgaatttggacgacggaatggaaggggagagttggtatcctggtagagtctcactctgtgctcagcctgttagcaaagaaacagtatttgattttcaaggttcgtcgtctttcattctcatggcctcatctcagaaggatgaaagtagaacacccgattgaatttctgttcttctgcttcaaccctagatctcgaagaacttcttcacttgatacgagagtcgccttcgggcgagatggtccgttgttcaaaagcccgacgaatgtttgcttcgagggcttgtagaaagagtatcatggttgggaaaccattgtcgaagcgacagatgcttaaagtaagtctattttgctgctgtctcatttgctatatattgggttctgactaacgtgactcctcgtctcttgtgaattctaggtattggagaacatgggacgtatcgatcagccatgggtaagccttcctttcgttctcagattcacagaatcccatcttctcgatgccaattaatcttttcctctctcgttgtctagaattgtccacacggaagaccgacaatgcgccatcttattcatcttggtccacccaagaagactcctaagcgaaggttagactgggagactttctctcagaccgatgacatctgaaaggtataactatttgtcaagctcttctaacgacggtcattgagagcgcaacttgatttgggcgcgcatggccactgggtttgatgttgtatgtgaattcgcaacaaacgatgaagcatccatgtaatatatatgtatagaacaagaggacgtcagaaaaggaattaacaaatacaaaacagtctcccctgtcatatcgcttctaaacgcaaaaagcatcctttcagactgcgctgtagtccatcttggtttcgtgcttcttggcgtcttggagcttacgaacagctttcataaagtcctcttggacacagtaatctctctctgtttcgcgagttcaagacgaagccgttgagtaaagagaagaaacaaagactggaagtggaaaacattgatacggaccttctcggatggcaaacataccagcctcggtgcaaacatttcggagatcagctccgttaaatccatccgacagctttcgaaagcgataaaagtatagatccggaagttagacgactggagagacactaaattagcaatactgaaccaaagtacgacatagcttaccttgaccatcgcctcgtagtcgatttcaccttgtttgtttactggtcgagcatgaatctgtggaacaatccaggtcaaaataaacgcggagaatgttgaaaagatttcatcagatgaacaatcaagtatttcgatcttccgttgactaggttctaatcacgaaccttgagaacttccatacgaccttgctcgttaggtaacgggatctcaatcttcctatccagtcgaccgggtcgaagaagagccgggtcaagcgtatccggtcggttggttgccataattaactttgttcggccgagtgaatcgaatccgtccatttggttaaggagctgttcgtattgggatcgtcaaccggaaataagccatcagaaggatttaatcgtgagatgatctgatctaaacagattcaaatgtatcaaaatcaaacgaacctccatcaatgtcctttgaatctctcgatccgcgcttgttccttcagagaatcgtctaccaccaattgcatcaatctcatccatgaagatgatgcacggctcatgttccttggcgtatgcgaacatttctctgatcaatcgggccgattctccaatatacttgtcaacgatctgtatttagtggcgcaaaccgaacaacgaaaaactctaaatcagaccgtctaggttgaagatgatcgatgatcaatgatcaataccaaaagacgaaccgctgaagaaacaactttcaaaaagttggtgttcatcgttgctgccactgctctggctaacaaggtctttcccgttcctggaggtccgtaaagtagtacacctttgggagctttgatgccaactcgctatgttatggaatgaaatcaatgacagtcaagtcgcgtcagaacagatgagtctcatattccctatccgtgcacatatacgtacagtaaacagttctgggttcatcagtggcagctcgatcacctctcttaattctctgacttgatcacccaaccctccgattcctgcgaaagacactcctccagggtcctcaagggacatagagtacacaagtgggtcgacctctcgaggaagaattcgcattatcgttaacgtcgtcatgtctagcgagactcggacacctgcaatcagctgataaaaataacccgatacagacgaattggcgaacagtaagatcagccatgtgcacaagagcggattgaaagatgaaagagatgaaccttatcgacaggaagctgaggtcgatatgacacaacataacgcgggccagaggaggccttcacgatgactgcataattcatttgaggttaggcagagagaagagcgaagtcaggaaccagctactttgagtatacgcgtctatataccagtggtggaatgtctctcaaacagcattttgcttcctttcaggcggaacattcatgataacttcgatggaaaagtggaagcccacagagacatcgaacaagggaaccgagcacaaactactcacatcgttcgtcatctaactttttcagtacctctccgatgatttgtcccacactctggagagccttgatgtcgtcttcgctcttgaggaacgcagcgtccaaatctttgattgagaatcggactatacagacagaaacccgagcgaatgaagtttgtgagctctagctctcaagggaagacaaaatataggatgagatatagaaacatgatggactgaaaagcacgaacgattcttgacattttctgaagtagcgttatgatctttaagtttctactcgtgccgatcaacccagaacgccagaaggtaacaagatacgattttgtccagatcagaaaaccagtcaaacaggagacaaagtcaaaggtcagttattgatgcccactcatatgctattcttgcattcaccgtccgatcaacaaggaaggtcagtaatttcaaaggcttacctgtctgtagagtctcaaggcgacagccttctcgtccgaaacggctcttgcaggtgcagaaggagccaaagaagaggtatcggtcggggcggaatccacttgcataatgtgctcaagctgattctataagttctattgattaagggtaagtgcaagagcgtgctaatgaagagggaaagagtggaaggtataggagatgggatgatctcaaggccacagttcatctggacaggtggagattctttccttctgctggttacgcgtagcccgatcggttacggttactaaccactgtatatttgttgcctatactttctattcagaacaaaaacgtccagagaacttaagagtcaatcttgacaaatgcaacgtagtttgacccgaacctgttcatcgagttgaacaaaagcaagtctacaagatcttgaatctgatcttgatcgtttctatccaaggaaaaaagaaagtcgaccgattggatcaggtccttgctggctctaagtttgcaatattcatagatctaggcttcaaccaaaccagaccaacctcctaactcaatattggtaaaatgaacaccctcgctctgactactgctaagaagatggtctttggacctcgaaactacatacatcaatctatcttcacccaattgatccactcatctcttcctgtgaccgccaggagcttcgcccgaggggcgagagacttaagagcttcttcactcagaactaatgcgagtctacaacatgcattggcagacgaaccgatactcgaagatagcgtaaccatcccatcaatatcagcatcagcattctcatcaagcacatcaactcctctgaagagcacggctctcttggatactgatactaatggctctagccgtgtggatcaaacccttttcgtatgttccacactctcgctcatatctctcttttactcactgctcgaactgatggcatcgaatattctgttctgatgtgcttgaacaatgaaaccaaaggtggcaggcatcccgaatgttgcccgcgaacaacacttgactgagtactttgaggacttgggaataattgtgcgagatgtattcgtaccttcggctttcaatcagaatgggcagaagagaaagcacaatcgagggttcggatttgtcgaagtcggtaccgtgaaggaacaccaacagcttataagaatggtaggtcatcatgaactgttcatacaatccattcgtcatggatgggacctgtggtttcagatctaaaatgcctatgtatatcttgaaagtccaaaaacaagaaaatcgaatttgatctgaaggtttgttcttcaattccatggaatcctacctgcgcaccgctcatctgactattgtgttctttcttctcgctctctatggataactacttctttcgaaagcctgctaagtgggatatcgaacgagcccggtcctacggcacaccgtcaccctccatcgcgcccaaaattgaaagcaaaccgaaggattcgaaggcaaggcctgatgataaagcgcgctcaagatcagcaattgagccgcaaggaacggaaaagaaaaaggcgagaagaaggataccatccttctctcgacgttagagtttgtgtcgtaaagatataatgtatgcatgttcttcgtcatataaaacataggacgtgttggaattgaattaaggagaacgcaaggctcgtgtttcgattgaacggaaatatcggctacaaataattgatacaatggctatgaccactcctttcatacaaatcagtgatctcccacctctttaccgaccatcccgtgatcaacgatcccatcaacgcttccaaccttttgatctggcttctgttcctttccaaagtttcctttggcataatcgtctgcgatattgtgatcggtgggctacgttcgataacggtggagccaagatcaggatcataatggatttctagaggttgggggtgaatgctcaagggactgacttgtttattggcagaggggacaactttcttcgtctctgctggctgcctgaagggtgttgtagcggatgatacagacaagaacaacatatgacctgatggtcagtctgtttgttctctctactcaagttagtggcacaaagttacgcactcgactgaagaattggtgaccggcttggtagcaggcgcatcagcggtaaggttggacatggtttctcgatggacagtgtatgagaagagtcagatgttcttaagggagcctaatgacagagatgggaaacgaaagatgagatgatcacagagaatagtcatgttttatatgtagcgcgagtcctggctttcatgcctcgatgatggaatgatgaatatgtgatgatcatgatcattctcatgatgatgatgatgatgatgcgagccaaagtagtccgatcgagaggagccacagtaagtgtagccaaagttgacgggaagagagtacacgtgaccagcggttaaacccaaaatcagtcgggattatgtgccgttcagtcagtctgaaagagaaacatcgtatgcctcccacaatgggatcgtagtccgaagcacgcctctcggttaaggtgataggaaagggaaggcatgaagagaaaaaagcaaagagttcacaaagtccggaactatctgcgtggcttgcttctacagaaccttttcaaactgctcatccgatcaacctatcggccgtataacgagttgaatgtgcaaagcttcgtgccgggagctctcatagactgagaatcttccggtatgtttacccaacgtctcaacttgtagtcaagatttagctgggctcggatattttgatgatggcatggtgtgagtcaggagttgactgtgaaactgcgggtatgatcctgaaacgttcgagccaaacgaggagaagataaatgtaaacagaaaaaggccagtgaaagccaaaacgaaagcaaggatgggaacgaaagcgccatgacatccgaaaaactcaatctgaggcaaaggaattggacagtagaagaagaaggaatcgaagtgttcactagattgtccaggccttgagcgctcaagccactcggtcaacgatacattagactgggtgtttttccgtagaaccccaaaaaacattgccaaataaaaaaagttccacaggcaggtgaatcacatcttacctgcctctttctctcattctctatccatccgttttggttcacttcgttctctcgcactcacatcctgtccattgctctctttgttcttgcttgttcctctgttgactttcaccgtcctttcctaccagtctctctttttctcttttcactttgacttttagcttctgaaaggccttaaaagtaggagttatgtcaacccatcggacgaacaattcgattgataccactgccccctacggctccagtaataacaatctacacgtgagtcctcattaacttgatgtccatggttgttgtcttcctaaaagattgagtgctcaagaatgcctgccctgttcggtgacttgacctctcacacaggaagaggcctacggcggttacgatatgcaacagatggctgagaagaacgctagccgaactagattgactacggccgaaggtgtgtcttagcttctcttctttgctatctttgatcagatgagtaggcccgctcagcggagcgaacgctatcggaaaagacttcgtagactgaaggacagacgatttcagccttggaggagaacaactaatgaccgtgaagacatcggtgactaacgcatatcttcgtgttctcacacgaccgctatcagagactggcgcccctgtcgccaggcatttccagccctcctcgattgacgattcccgatctagtacgcccataggagccgatagtactggtaaatcttctggccgggccaagtttggatcgattccaaactgggatgtctttatgaacaatcccgagttcaacgagtttgacgtccggaacggcggggtcaagaacttggagttcgcagagggcgacgtgggctctaacaagtttacaaagttttactactatgttataaccaagagtatcttctttagatgggcgacgtacatcattccagttctgattgtaagcgcatacttcattctttccttgagtggtcggtatgcgaagtatcctgaagctaaacgagttcactttctgtaccgctctcatccggtggtcagctcctttggatccctggaatcatttggctcaccgctcctaccggctcatccttagaaaatagcgcctacggtttgtattgatcttcattcctgagaagtctgcttatacatacttaatttttaccgaacgtattattgactactatttctttccattttgtgcagtgtggggtgtcaatttgctgtggtggtcaatttggctaactgtggtctgggtaagtccattatatatacacgcggactaccgcatgtctcgtgcgtttccattctcctagtatacttcgtattaattggctttactttctaattgtcgctgcgtcgcatgaccatgctcgggattgcctataggttggatggtgggctgttagcgcgtgtttcatgatccttcctcggatcctgcgagtgactgtcgctgccatcgtggtcagtcttgatcgcctctcaaatggcttacttctcagaagtcgtttcgctcatgtctttctcggttactttgtcttttgcctccacacagggaggtgataagtcctgggtggagatggttcgtgctgtgagacggcctttatccacagtcttttggacgctccttctgtggatcacgttccagcctttgatctcgactcgtcagaaagacggaacctcatcttctagcgcttccgcgttgactttggtgagcataaggtctactctcgtctctatcacactgacgagctattcggtctcatcgcactctttccttcttcttcgaatgttgattgaatcgctcgtaaaaagatctccaaaatcctattcgggatgttcctatgtacttgtgttttggcgggtgaaaaagtcatcgttcagttcattgcttgtatgtgacttcaggtcgaatgcttgtttgcctcgatcctgtgtgaaaacatcctaataaccgtattaactcttccttcagataccttccaccagcaaacctacaaagatcgaacagagtaagctcaggcaacctttcttggtgtctacataaaaacgttattaatcataacacttgtcgaacatttctagccaccaagatttccagatcaaagctttgactatcctctacaagaactcttcggatgtgagtttgggttcggtttttctcttttcgccttgttggtaaactaatcattccaaacatgttggatgttgaacgcgcgtgttaaatagatgggccgatctgatacactcaagaactacgccccgtccaccaagagcaacccagtgttggctcctcagatcgccgttcgaaaggccctcaaaggactccgaaatgccgctgccactacgaccaacgccttgggaaatgtggcgacagagatggttggttcttcggtcttgcaaccaaactctcctcaggctatggtcaccgcctctttgggctccgccaacaagacccgagctgtgagtccagaagaaaccattatttcttccttttctttcaatcgcttcaacagatctggtagctcatgtccttctttgtggttgtcatactacaaaaaagctcgctcgaaggatctattactcgttccgaatgggcaagaccgaggtcactctggctgacatcgctcgacattttccggatcttgacactgccactcgagctttcgagatccttgatgctgacttgaacgggtaagtccgttgtccgcatcaatccgatgggaaatcttcgatcgaagttgccgccgctaacacttatttgaacgttcattttatatagtggagcctctcgggacgagattgagatgagtctcggagagattcacagagagcgactttctttggcatctagcatgcgagatgtcgatggtgctgttcgacgactcgatacgatccttgtctcaatcgtcttcttgatctgtgtgcttatcctcaccgctacaatcgtacgttgatcactttactgccaatcttcttcccatcgaggtgtgcacgccggatgctgagtttatttgtttttctcaatcgcgcaacaaagacgactgcactcacctcgctcgttacctcggctggaactttccttttgggtctttcttggcttattggagctactgcccaagaagtgcttagttcttgcatcttcctcttcatcaagcaccctttcgagtaagtgacatttttgattgctttagtaatttttaaattcagactcctcaatgttgacttattgtcgtgtatctattctcaagtgtgggagacagagtcgatatcgattccatctcttatgttgtttcggagatgaaccttctctcgaccacgttccagcgagtcgatggaaaatgcgtctttttgcccaacaatgtattgaaccaaaaattgatcggtaggtcttttgattcatccctttgtttcataaaatgctgaagatctatcagagagactgatcggatgatatgtttttatagagaacgttcgacgatccggccctacttctgaaacttttgcgtacgtatggatctcctatggccattcaacctcacgttggcgctaactcgtatgactatgacctcggtgatattgtatctctatacagatttgacgtcgctttcaatacgtcgttcgagcatatccaggccctccgagagaaaatgctcaagtttttgaagggagagaaggtaggcacttcagtccactacctgacaggtctgaagcgtattctcatttgtctgatcatctatgacacttgaatttggggttttacgaagagagactttatcccgagcttcgacgtaacaatcgtcgatttccctgatcaggcaaagctccagctcaaggttagtttgtttccgttctgtctcgtcaataaatttaatcatcctgatctatttcgtcgggtttcttgattttgcttcccaggcaaacatctgctacaagtcgaactggcaggtaggttctctttctatatcaaacaaatgtacggagggggatttgatctgatatcggatctctatactttcttattcgatctttatagcaagggcttctcaaagtacaacgacacaataaatgggtatgcgctttgaaagaagcgctcaaggaattgaagatttacggatccgccggagatcccactccggatccagtggtgcctatcgagtagtaagtctcctcgacttcattcagaattcttccacgatgaaaccgcaactcacatattctcccatctgtggtgacaacgcgaatagcactcttgttccttatgaaccaaagcccaccacatctgcctctacctcggataccgcttcaactgtgcctcacagtgcccagtccgaccgaacagccgtcagcccatcgtccaacttacctcatggacagctttacgacccaggatacacgatcgaaccgatcagccaaagatctggcagttctgctcctacgtattcttttgttgaccaaagaaacgtgatcgctgatccggagtcggacgtgtttggagaggtttgtgtcatcctttctttttgactgattatctgatttcgcgcttggaaacgttcggaatcggactgactcctgattctctctattttcgtccttgaaacgtgaacaaacctgtaggagacggcaaatggcgcgggacctgagaccgaaccccccactcgagtcaacacccctgctggtatccgacctgttcggagacgaacaggtgacgtcgaaggacaaatccaagacgaagtcatcgagatgaatcagaatcctaacaaagctcctcggctttgagtaagatctttgtctgcgtttttgtcgttccatctttgctcgactcttgtcattgcatcattagatcttcttcgtcctggactctttttcagtttctttctatctttttcacgtcccgtttgtctactaaagctgttatatcccgtcattcactcttacgaacctctctttactcaactgtcacgccttctttgattcgcttagacgtcccttacgcctttgcgcctctgccattcatctgttgtcatttttggagctttccgccctacctatcattttctctgccttcatctgatgtcccacgagaaaagtcatgccgtctctcgtacctcggctcttcgtcttcttcccccctttatttcttctatataaagatctctttacaaaatgcctctccttttgctctctattttctgcttgtttatcgtcttcaattgcttgctaatcaatgctatccatttcccgatgattgagatctgtcaatgaggagatgggatcgttgttgagaaggctgacaaagttggctggacgcaggatatacattcaaacaatggatgaacaagtctgtctcgaaggagcctctcagtatgcctcatgatatagcgtagaagatcaagtctttatctcaagcccatagaccctacgagcggtctcgcccatgatctctcctgcgctgactggatccaacttcaacttggcaaatacttttagcacaatttcatgccaattcttttcagactcagggacgagcactttcgatctcaacgtcgaggtcggagtcgtctggtcgagtgatgtagtttgaggtgtcagagcgggaaatggatcagagctggcaagaggggaaggagaggaaccaaagatgatgcggtgagagccgaaggagtcgagtgcagggacgaggtatgcagacagaacgcttttaaaccgagccaaatttcgggtcagtatcgttcctcgcaacgaggacaagtggacgatgaggttcagagttgagattcaaacatctcgaaattattgaatacgtccacacgaggacaagaacgtaccttgctacactatcttcatcctcccaccaaggtctcttgccactcgaagattgatattcttccagaatgatggaaggaggcaagaatttaagcaccaagcctgggatcaaagcgagcgcagtgatttgccgggtgtactcttgatagaacggttgatgaacaagcatcgagggtgagatcttggctggtagaggtggggggagtagatttgctgtatgtatccatgtagagaatcatttgaatcagttgagacggttgatcagatacagaattgtaaaggcaagtcattgagccgggatacatacaaagtacgaccgtcgtgcttcctgacgaagacttgacaccgtcgacatcctttgcttcctcctgaccagacgactcgcttttgaaggagagttctctagaaacaaggacgacattgtctagtaccttatcaatttcctcccaaatcgattcagtcaactcggatgcagtgatctcgaactctaagggagaagaggaaacatcaacggagctggttgaagagtaagggatagagtggatggggactgttcggagctgaggagatgaagagactattgttgtaggctgttctcgagattcatttctgttgaactcaagagtaagtaagttcatgatcagtacatttctttgttctttctcatacataacatggtcactaaaaccgaaggatcaaaaacaaacatgctcgacatgtattctcaagatcagaccaagctcctgataactaacctagtgattccaatgaaacctccaaactttcgtcctccaaatgaactgggagcctgacgttgagactgtctatcgagatcaacatgtccatcaatagtgagtttgcttcccttcggctgttgctcttgagcagaagccgatgtagaggtcgaagaggatgagaacatcgacaaggaaagtttgggaggtcttgatcggggtggcatttgtatactttgggctatagagatggagtaatgagatgggggtgttatgagatggttcagcggaacaaccaaatgtcatcattgatgcaacgggtttagatatcgttctcagcctctgaagggttgaatcatcatgctgcttgtgtatataaatatcttgcacgtatgggatctctaggctctggatacccattggaagtctctttctctttcaccgttgtaaaaataggcaagttctgaagacaagtcatcatcatctcattaggtctttctcaaactttatacgagacagccgtgaaccgggggaaagtaacgacaatgaagatgtttgcgatggtggtgttggctgagttggagatgagcgtatcgaatgagacctgggcttatatataatcacgatctgtatcatcaagcgagcatgagagtttcgagatgtcgttagagaccataaccactcggcggtacgacaacagtagagaaggagaataacttacaacgacggcaaagatcatgagtagcagaaacaggatacatttccgcctacccgtttgggactggtatcgtgtagcaatcttcaattcttcgacggcaccctcagtctctctagctacgacttcgatgttgtactcgatactgtccatcatagtaccctgctcgagcaccatatcgcccaaatctcggaacaaatttgcaagctcagtgattgactgggcgattttgcttatttcagcctcccgtcgacgaatcgtcttgtccaatggaggtccggccgtttgagccagaagttgagattgagactaatcacgatcagaaagccggacaaaggaagattctagtggtcagcagagggtgcttaactgtattcaagcaaatggaaacgagtcgtttactgacagcttgtaggtcgtcttctaactcctctattcctcctgctcctgctttactatccccatccaacatgacccctgatgctctcatcagacttgcgttcttcgcggcatgcccttgaagtctctccatgtatgctctctgctttcttctaaatttggcgcttagatcctgcaccttggcagccaaacctctctggacattggatgcagatactagatcagcttttgatgcttcacccgagggctggatttgctttatctgagcttgagcttgtcggaagtcctaagcgagccaaacaaacccagttgagaaacgatgccctgtttgatgaacgctcgggcaaacaagaaatagaaaagagaataatccgacgcactctagtgatggattgagtgaggttctcgatgtcgcgctcctccgaagacctatctgtgaatccaggcaagcagtgcttcgcgtgcatcttgtccagcgttgaagctgtagatcatgtgcaagaatacgtgacagagacgagcagcatatcaacgggatgctacatagaagcatccataaacagaaactaactcttctgtgtgatccgatctaatatggcattgactgaatccgaagtatcaaccctggtcaaacggacacacgacagtcagccttaacgtctgcctgttgatctcagcacatcacagtgatcgatgtctgaacggcctgcaattgagtgtaccggggaaggacgaaccacaccggtgggagccccttttctctttgttttcctttgtagttcgagttcttgttcgtaagaagcccggtctcttcgtccgatccctggtcatcttggtcgtcttgttctatcgggcgaattgatcgctggggcccgtcttgatgatatccgaaagaagaacgtatagagagaaagaagagagttcttgaccgagatatcggtcttcaacagacagacaagcaggcaggctggttagtctctgaccaatttcattacaacacacgcgtacataggagaaacgaacactgaggacgggagtgcggatgatgatgatgatgaagctcctatcacacctccggcgaaggttgcaacggaaggtgcagtgggagatccgaaccgatccatccgagagttccagctgagacgatgcttgtttctctctctgttctgagagcagcggacagaacagatccaaagaacgatgagcgatggtatgtgtatgtgatcgtcactgaacacttactcactcactcacttacttgcttgcttgctgatgatgctgatgtctcatccaaccgccagcttacttaagcacgatgccgagagataacatacacgatcttttctttctctttacccacgaaccatcatgactcctcttgggggactgacgatgacaaggatagattctgttaggaagttctgatccaagaggagccaacttgttggaagcataggcagccgttgggccgaatgtttcaagtctcatgaagttcacccctttcttcttattctatcaattctatccctttgatcaccttgaggattcttttgtctgcctctgtctctttgttccctcgtttctcatcctgatcctttgcagttgggtctgttgaactgaagactgatcaatgagtcctcatcatgtatcttgctgaccatttcttctcccaaaccaccattactgatcactttgctcacacagccatctctcgtccggacgactatgtggactccaaactacacacgtccaactatcagtcctcgtttctcagcgcatagaacgaatacagaggacataccgttcgatcgctcttatgagtataaccacctagatatgcagcccgtggatccgaatgaaaatcccttgaacactcatcttgaaaaatcgcccgcgcatgggacacacgcttcagtcggagaccatcttccaccttacctgaatcctcctgcgctgttggcgctcaatatgctctcgcctcccgtactggggataatcattgctcttgtcacgctcctagttttcaagactcagaaccacagcatggtcacgaacgccaagaaggagatcatggcaggctgtcttgcagcagagaaagcgctgggcacactcgaggccatacccagcttgctcgaggaaaagagtctgaaagcgacagcgaaagcggttcaagccagcgtcagaggggttggcaaagggctcgtcatgatgtgagccagtctttttctgtactgtttcgtatgatcatcagtctctgttctcgatctgatagattggtcgtcacttttgatttagtataacagtattggaagctgtgatcactttcctgatagacacgttcaggtctacctatctgtgctgtttagagctcgtcgtgttcggaggtctagccttgatcatgtttgccgtctcggaggtcagtagactttgcatatcagatcctcagcagctcgagcagatacttaatacctataccctacaaccaatagatatccgacgctgtgaaatctgccttgaatactattcggctcttgatacaatcccaagtaaccgcgttcaacactgtgactcaagcagctgtaaaaagcatcaattttgtcaccaaacttgttgtacgtggtcatttgttaacttttttttttcaagcatttaaatgactaacgttgagttctactcatgttgttttatatctggcaggatgtgaccctaaacgtaaccgaaatttctataccggcgctatcccagttggagaatgtcacaattggaaccactctagaggccgaactctataaactcaatagctctttgccaactttggacgacataagaactaaattggatgcgttgttagtttcctttgttctttgacctgagcgaaattcttctccgactcgtgagcacttagatttctcgagtcttctctgatactctagtatcgaccagccgtttgacacaatgatcctcaagatcaatacgaccacgtctaattatacgtttattccgtcttcccggacggctaacgtgacgtctcttgctgtctcgtccgcgaattcttctgccgatctctgtaccggattggatctgacattcatcgacgatctcggacaggacctggataaaattactcaatggggtgtgggtattttggctgctcttgggtaacaaacgctttgtcattttctcgatctttgcgtgtcaagagatgctcatgttcccttctctcgtacaccccagcgtgatcttgatagctgtcctcctgtatcttgaacgtcttcggtacaagtctatgtcagaacgaattgatctcttcaaccaatctagaagtacccttgagaaagggaaactatacaccgacgaagacttgatggaactcatacaccttagtcaaaacggaatcgttactgtgtggacttacaaaggattggagaagctgagaaagctgggagagcgcaaccaaagaacaagcaagtggtttggtaagttgatcgatttgctttgtacatatagatatgtttatttcatatctcgttctataaacttactgtatcgttctgtatatctcggaaaaaaaagtggcgctcatcacccatccacttgcgttgatgccactcgcaatggggatcatcagtctcctctccattcaagctcaaatcgcagccatcgatgccattagcaggtcagccgaagagaccgcgaatgactctatagattctatggcaaattcgatgacctcaaaactgaacgctagactggcggagagaggcttaatattcgcgaatgatatcaatgaggatattgcgcaggttcagacgttcatggatgacgagctttttggaacttgggttaacaccacaacggttgtcctcaagtgagtaaattttccttgatcatcaagtagacccatatacgctaaaatcatgctgatgttgttttctctctcttgggcgtctcccatcatagcgagacacttgtagagttctatgctctcgttggcgaggctgtcaatgtcacctttggttccactatcctctccggaccgataaataattttctatattgcatcgtaggatccaaagtcgaaagtctcgagaaagcgctaacatggatcaacgagaacgcacatttctccatatccacgatagaccctgatctgtttgctatatcgaacgcgtaaaattaaacttcactccctaccttatcgtcagtcgctgtttctaatatggtgtgatcctttactttccatgacatagatcttcagatgctctagttcgtcctatcgctactgcagcgctagggtcttccgatgatccttctgatcctggagttgtccaacgcatgatttcgtcgtataaaaagtctcttgagacatctcggattcttcctttcgttttcattggcctttgggtgatcgtcttccttggtggtctgttgactatctggtggacagcacagctggaacttcgagaacaagaacgaacatatcggaccgaaaaacttccttcaactcgacatttttatagtgccaagagagcggtgaacgaatggctcggccggcgccacgacggtagagatgaggaaagagagagtttcgtattgtctgcctcacctgtacggaaaatcaaaattttacgggaagcgttccagtcttcccctgtcaaaatgagtttcacccggcgcaactcaatcaatatcgaagaagaagatggtctcaaagatggatctcttcctcgacctcttcctcaaattcctacatcccaatcgcgacagaactcgcacttcgacctagaaggaggtcagccacgagattcggcctatgcttgggtttccaggtccacagggaacgcaatcgtagatggaagagccagtgctggtccgtccaagagaaggtttcaggaaaacactaggagtcttcaaacgatagaagaatcaaaggatcctgttgaggagaatgattctcttcgcctgacgttgcatccggatcattctctgctctctcctcccgcatcttcactaccaaatgctcgcctgatggccaatgtcgtggtttctcctggagagatctacccatttcagtactcaggtttcctttcagctcctcatgctcgatatggtacggccatgacaccaacttgtgcaccagccaccaaaccgagcgcactggaatcgcggacgaacagactatcgagattgacttcgttcgtgccagttggttcgagagcaggggcgcattcgaactcgagtcgttccaataacatagaggacccattccggacacctttcgatgatctggatgagcaatcaacaccttcccgcacatttcattaccacccttaatttcctgtcttcggagtctatcaagtgattgttatagcattcgtaacctcttatatgtgattaaagatacgttcatctcgctgtgaatagtacttcttgtatcttgtatcttgtattctgtatggttaatatgaaggaaccgttctcaacatgcctccggttgcattagcactgtccaatgaacataagtctagaggaagctcaccgacgagttcgctatatatcttcgctgaggtcggcgatgagcgcgtctaagtagttgtcaggcttatgtcattgggattttgaatatttggccacataattttctttacccgactgaagacaaccaacagaccatcacacgccaaatcattctcattctcttctcttcttccagcatcgttcggtggttctttcgtgccagtcatgggtgtctttagctggttccagaaagtaggttttcgtctatgtgttgaccagatggctttcgattatatttaaagacgatttctcttctcgtttcccgttcaacgcgtgctcttttgccgctttttttttagaagccggagctcgactacgagaccttgctccagactctgtcccaatccatccaggacaaacagcagcatctgtccgagatcaagctcagagagcgtcgttcgacccttctggttaccttgtacctcattggcttctggattctctacgcgttgctctggtggatcgactatctccctcttgggttgatgggcttcaacagtcaaccggatgagtgggagtcggatgacgaacgaggtttggttgagtcgtatggcgggatcatcatccttgctcttcccgcattcatagggcctatcgtgtatgtttctttctaggtttcctcgtactgtgtgatgtattagctgaggaaagttgacaatcaaacactttgttgcaaacgctcacctgtgtcgaatatgatagtatcatattcataagacgaactgtgaaagcctggtacacccggcaggagctatctgaaggtaagggaaaccaaatacgatccatcagtctcatcagcgtgttgattgactaatcgaatgtcttcttttttttttggtacttctccgaaattcttgtagaaaagcaacttcgtgatctacgagcaagacaaagaacgacaattgaagagatcaagaagaaaacaaactattactccactcgaaaccttctcgaaagatacgacgaagctccttcgcctactgccgccaagctacaacaacaacaacagcaggccaaccttcgcaaacgaggcgcgtttcaacctcctgttgatcctcgattacaaccttcgacgcctggatctccttcacctaattctataaaacccaacacaccctcggccgatctcatcggtacacccatcaacagaatgaaccctcagacacctctttccgccattggcggacctcatatgtcgtctgctctgtttgcgtctggaggaatgcaaccagtcacccctccgacaccgcctcgaaagacattgttcgatagagcggcggattatatattgggggacgaagctggtggatcgaagggtgatatgggtaagtttgcgctagtctgcggcaagtgcttcacgtggaacggcctagttgaggaagctcggtggggtgatatgcgtacgttaggtctctttcctatcccaagtactaatgataagcgataatacatccgcataccgttttagcctgaatttataattgcttttcatcattcgtttgaacttgctttatctatattcagaatacgtctgcccgaagtgtggcttcttcaatccctctcctaattcactttctaaaaaggatagcaaccccttgaatgcttctttacccgtaccgcccatgactcgaacgaggtctacgtcacctctggccgaggagcttaaatcgggaccgacgacaccacctgggaagacgaatgcgggaaagacaagaaagggaaaaggaaagaacgagaagttggagactacgaaggatctgtagccgggcataggggtttcgttctcaccaggcagctcattctcaattcttttgaacgacaaaaacgatacaatgaaccttgactgatttatgttacggttaagggctctcgctatcccaccagagtcgaaagttgatttcaaaaagtatgagaaatttggaaataaaaagattgagatcattccatatctacatctccgttcgacacctttgccgagcgcaactcattcacctctacttcttcctctcctacgccctccaacagtctagcgagttcatcatctgccccgcctccgaagaaaagtccaccatccatctcactcaaagcaaaatccaagacaaagctctcctgcaccattcgctcggctctgtcgaaatacctctcggtatagggtaccaaacccgcaatcatctctcccagatcaagcgtgactttcggtccgaccgtcggtttcttagtcttggcaggcttcttatcatcttcatcctcgtcctcgtcattaggttggttagcagtagcagctgctagagcagtagcagtttgtgcggaagccttggagaacgattggacgatgtcgtccataggtcgaagtctaaagatcgcatgaagaaccgtttgtgcgacaggtgatgtctttgctctagcgttccaatccctaatgtgtcctaaaagcttgacgagttcgagaggagggagagttttgaggacttgatcgacagcggctgaaccagtgatactgagtgcatctgaactctgcatcgatgtgaaggaggacgaggaagaagtaagaagggaagcagtaggaggcgctgggggtcgggaggatcggacggtagagaagagcttgaagagtctaccgggttgagacatcgacaaagcgaggaggattgcattcttgtagtctttcaaagcgacataattgtggaagttctgctcgctatttgcgataattcaaaaagaaacagagcaattgattgagtgactgtctcatcgacagatccgcttcgagagcttgagtttttgctacttacttgacgatttccttctccttggcctgaatcttctcttcctcatcggcctttgtgcagtccgtccagaacgttacgaccgaatcggccgctccagaaacaattgtgctttcgtcctcactcacagcgagcgcccagaccttatcctcatggttgtcgaacgagctgacgcattcttcgtctttcacgttccacagcttgacaagaccgtctgaggaggaagaaacgagctgttgaccttgagacaagaagtcaactcggagcacagagtttgagtggccctcaaatgtctgtcggaacaatcaagaacaaataatgatagattcaacagaacgcactttagatctggaaaggaaaaggagagaaccaaagacagaccttcaaacacgtataatcgtccagactccaaattctgaccgtcttgtctccacttccagtagccagaaccctgtccgttctgctaaacctcacactccagactcctcttttgtgtcccttacatgttccgacctgatgaactccacctgtggctttagcgtctgttcccttcttgggcgcagcatattccacctggaagatcttgacagtcttgtcctgcgaaccagaagcaagcaatcgatcgttaggcgcgagatcaagtgagttgatatccttgtcgtgaatcttttgagtcaggatcgatcgaggtttgtagacctcgcccgatgattcaggtgtcgaagaggaggaaccatgaatggatgtgtcgagagcagagagatcccacatcttgatcgttcgatcttgcgaagcggtgaagaggaactttgcttttcctgacgagtcagtcgcttgatctgaaggctttcgagagaacgcgactgctccaatactttctgcatgtccttcacatacggctacgcatctccattcaccttcgtcattacctccagtggcagacgacggggaagggacccatgcccagattcgagcagttcgatctttgcttccactgaccaaccactgaccatccttggacttgtctaggcaaaggaccatgtccgagtgaccggcgagaagtcgagcgtcgaacgtcttggtggaataaactcggatgagagaagagttggtggccaacgcaaggtgggtatcccgttcagcaggattaggggaaaggaagagggaatcaatgatctcgtcattgaagccgatgagctgacgagtgattcgagaggtggagagagagtggaagagaatattttggtctgagtgaacagagatgagagcagatagagtggagttaaatctgatggccatacagaataaggcaggagaagttagattatcgtatgaagctcccgcgtaaggctcaattcgtaggagagaaataaccccaaatgtcaacttacagcacgtcaacaatgcctcgctgttctccctcttcagcctcgattgacccgtccaccaaatctactccctccgcacccttcaagactccaacttccgttcccatctgtgcatcccagagtttgacgacgcccttttcacctgcggtccagcaaatcaacttgtcgccgactggtccgttcaatcctttgacgattgtgtcctccgagatgactccgacagactctatggattccaatacggtgatagttctgaccaactgaacgtcaagtgcctttccttttcccttcttcgcagcggatcctttcataaagagacgttcccaaccgtcgtctgcgcctccccatagatcccaaacgaggacaaccttgtctcgtccaccgctaaccaaccatcgtccgtctggactaacgcccagtccacgaacaacgcttacgtggccgtctagcacggctctcggtctgcctccgttggaagaagactcactcaagtcaaacactctgacttttgtgtctccacaacctgtgataagctccattcgtctgccctttgccggcccggatcggggaatattgaaggcgagcgcagagaccggtccaccgtgggaacggaagagatgagtgacgtatcctccagtgaggtcccagaccttgacaattccgtcagcagaaccggaagcgagaagtgtcgacgttgggtccatggcggatacaagaataggagaagggtgggatcgagcggtttgtcgaagaaggggaagggagggaggaagatgaggaaggtgagcaggcggtggagtgaacggttgattcagatcgtacagccgtaaggtaagtgaacgagtaaagacggcaagtataccagttcgggagatagacattgaagtgatgtccgtggtgtcctaaggatgcaaggcaagaatcaagcaggtcagcttcctaaatatcaggaagggatcaaacagaaatacgaaaagaggcagagacgaacaccttgaactcgagcaagtttctgtccagactcgacctcggtgagaagaatgtcctctccggtcgtactgatcatccgaagtccatcggcggtgagaaggacaggaccttgagtatgcaatggggatatgagccgacttgatcgatagctagagaaggccgtggattgacgaagaccaccatggttgtttagcgtctaacattagcgctcgggcccagaaaactagagtgaatccaacaagtcatgacctcacctcgtcttgaaccctggcttggacagtggtctggtgtccatgatgctgagtgatatctagacgtgcaagtgtagctgtatcgtgtcttgttcaaaggtcaattggtatgagaggagatttttttggtaagttgcattcgaaaaacgtaagagtttatggtttagctaaggttttcgaatattataaattaagcttgcacgtgacttgaagcttacccacatatatcgcactaccggcccgatctaccgatctatctatcctgaacgggaggacgtcgaggatgccaaaagagaaagcttcctcaactaacacccagaaggttgagaagacattgcaagaacacgaacccactcatcctaaatcttacaagctaacttaaccactttgaagaggggcagaagaaagacaggagcgaactagggaaaggagcgaaagaaacgtaatcgttcgtacaatgatattctcatcttactttctcttgtcggaccggactcggaagactcctcatatattctaatgtgttgaattttgcatacccttctattttctgatgaaggtgtctatcaagccttcctaaacctaggtatctctcgtttcgtgatcacctccagttagaatcctcccaagaggttcatctacaaagacctctgatggatcatcctcccacccaagaaagtagctttcacatagctgccggccacttggacttcaacaggccgacagaccccgaaacacaggtgaactatgttcttcttgtggtcttgcttctagtcgatcgcgcttcttaagcttcttacgtgcactgactataatatacctgcttgatcaggccgagagagacaaagctaaaagagcttaccgtgcatgcacaaattgcagggtctgtcgtcatcttctctgttcaatatctcaatcgatcgccagacaagctgagtcataagtctgggtttattttcgtagactcgaaaggcgagatgtgacctgggagatgtcaactatccaaaggacccgccttgtgccagatgcaaacgtgaatctgtatgttcatcttgcttcgattattcagtgcacatgacgtttcgtacactcgttgcattcggatcgtgtcgtgcgctgaaatttgatccatcctttggttgcgattgtgctgctctaatctctcatagaaagaatgcacatttcttccatctcggcgaggcgggaatctgacaaccaaagctagggcgaagtccttcggctcacatcgaccatcacctcccatgaaccctgttgaaccatcaggattggcttcgacatctcatcttccacagatgagtctctcatccacaaccgaatccccttcagcgaaaagacagagacgtatatcgttctcctcatccgactcgatcaaccggccagaagagtccaggtctcccaccatcaaccctatacatccatccacttctatttttccagcgtactcgaaatctacatcaatctctgttcatccctccctcaatgagtacgcatatccacaactcagatctcctgcgtcatcgacaaacttcccactaggtttcgaatctcagtattctatgatgagttcacatgaatctcctaggaatcaacaccagggacgagcccacccagccatccggtcttcctcgactgagacactcaatacagttagctcaaactcgggaatgggctcagtttacggacccaacgctccaccacgtcagccttcgtatactcgggtccccaacacaggtacttcccaaacatctccttcatcatctggttactccagacctccgtcagatcggccagatatgtcgagcataccatcacctcagcctcgatatctacaatcctcacgctcgatctatgcacccgtactttccccctcgcaatcaaccttacagccacatggcggtcatgatcgaacacactcaatatcctcttcttcggccgacatgcaacccagtgctagtgttatgggtgaagctcgaacggatcaagagaatttcattaccggaggaatggccaacgaggttgatgccttgagtctgctcgctagaacagcgactggaaagcctacttcttccaaatctgaacctggaaccgcttcagaaggcaaggacagagaaggcttattgaacactaccggttcagaatccggaagaggaattgaacaagatagatcagcaaaaagggaacgagatgatcacctgggaggtcagagaggtgaggaaaacctggccgacgatgaatttgtctgtgatttagtcaagagaggatgcctcgactgggagtcgatcaaagtatacgtagatcaattcttcagcagacatcatcagatatttgtaagtcactttccaatgtgcgacgtctctcaatcgtatggtgccgatgctcagttcgaaggaaatttaacgatgctttccaatcaaaagccaatggtaccttcctcgaggattccgaaaacgagctcccaacttcgagtttttgcaaaagaagagaagcaactacttgcgaccgtggtttgtatagcgtctagatacgatacgtcacgtccagaaatccacagactcgtatgggaggttatatctgtgagtgattctcccatgtgaatgactgtttatctacgtgaacaccttgaggtagtaattgatgccttggaaaccaccataggaatacattgtcgacaccgtcatctacggccgggacgcttgtgttggattcgtcgaaagttggtctttctttccagagttttgatctgagtgtatcgcgcgccgacgttttgcgtacagaagagttcagtgttgacggatttacttcttttgaatgcgcgcttatcttaaggtatgctcctcctctcggagaatgtaccaaggccaagcatagggaaagatgaccaaggctcaaaacagtgggatgaatctagttcgtctgatgctatctctcttctttctacacgtcttttattcttttgggtttgacttgaaacatcaatatctggaaagacgtaaactgatttctttgtgatgaacaatcatcagctcaaagttggtatctagtcggacatgccgtcaggtcagcacctctcaacaagccccttccaaatcccgccacttgccctgaagtctatctaatcttgaacttccaacaatccctgcacaatagaactggatatctgttaggtttggatcaagtaagtctcatgttctcgatcatctgaagccgaggctggtagctatcttatctctaactttcatatatgtctacggttctatctaacgctagaaaacaatgaacatctcaacaaccgaggattcgactcctagcatagagagagacagactagcatggacatgtgcgtttccattttcctgttcgcgatctgtgtttataccaaacgccttttcgtcgtcttgttgacttctgatattcttcaatgtgcatgactcgatatcagattgttacattttcgataggcatatttctcttcgtataggaaaggcgttttggtctcgtgggcctggtctttgcgtatggtcctgattgttgtttcactctaagttggctctttgttccatcgaaagatgcgctgatgcgtgctattctataattttctgcagttcaccgaaaatatcgcttcgatcaactttccgtctcttcgaccaatacctagtgaacaggatgattttgcgagtgtcgttcaggccttagtggagctgacgcagacgatgacggcagcacacgacgtcctgtagtgcgtttgtcatcttgtttacagtcctttctagtgcgttcagatatactcagtgtctgatatgtttctgactggcatttatagtccgtcgcacgaccgaacgatgtcgttagtcagagctggagaatagtaagtcggtcacagtttcttttgcaggagccaagaataagtttgcctgatgatcttttttccatcctttagttacaagtacctagacgaggtgagttgagagtctcactggctctcgaatctgaagctataccttgaactaatctcgttcgaaatacagttctctcgatctataaatgcctttcatagcgtctggttgcatgttaagttcagcacttttcgtgagtctttattcctgatcagaagctttggcagcaacgctgatcttctcagtttgttttccttgctcatccgctgtacttcggaagcatgcgacgagattgtgtggtgcacgtttcattacattcggctatacatatacgtatttgcctttcaaggtgcctatttattctctgttaataagctatcggccctaagttaaccacaaaacgtctactcagcgcacgttcagagagccgtttccaagggaggagcagttcatttcggaccagacggtaacattttcccccgaggaccattggcaagccctgattcaaaattcatcatggagtctatcgatgctgctagacaactcttgatgttatgtaccgagcgcgtaagtcgtccatctgcgtatcgatgtcctgtaccgtaactttcagaggcaatcaattgatgttgagacaacgggattgcttcagcttcatccgggaggggctcttccattcttgcctgctaggttctttctgtggttcacatatgcaagcgtgttcttgctgaaggcgatatactcgaatgctgtaagtagccactgatcatcccaacatgggatacgaactttcgcgcatatcagagatacagatggtgcgtcgactgaccgctttcttaccttgacttctaacagatccttcggtcggatacgagaaacatcctcgagctcattcaaaaagttatattttgtctagcaaactcaagtcctgacaaatcacacttgggcattaggtgggtttcaatcttttcctccgaccctcgattttttgcatgactgatttgagctttcggtttatgtgttttctcaactcaggcacgctcttctactccgaacagtagcaaagaaacttcgacagtctttctctgatgaatcttgggtagctcatgtgaatttcattttctcttttgtttttctttctttctacgagtgtggggcgctggttctgacgtattcatctcctctgagccatcgcttgtatgtttgttcgcggtttagacgggcacggctacccctctcttcgccgagctacccgatcgattccgttctgctggaaggagcaaccgatctccgcccatctctacttccggggcagatggaccttcctcttttgttttcaactcatcgaatacaccatcaacttatttagctgacccttcaatgtcgaccactcaatacgctgaattctcatctgcgactcctggaatgtctgcttcaggaatggcctttgaatcgaaagcgagaggaacggcatgggatttcacgcatatgagtgaagagggaaatggaagtatatatgggtctgaagtcaactttggaatggaagagctggcatatctctcacagttgtcggatcttgagtaagcgtttgccctttcatttctcttgtgtcgtaaaaaaatctgactacaagatcttggattgttcatagtttgtcgtccgaaatgttttggacccagttggttcctatgcagcagcctgaaggaagtggaataccatttcgttgatcgtatgaccttgtccaagaacagacctttgtgggccttagatgtatgccatcgtgtaaagcagagataaccagtggtataatataatttaaaggtctgaaatacaattgacgtttgactcaaaatgggccaagcgagagaagacctattatcgcctctggtaacgaccatccgccctcctgcagacatgcccaaacagacagtcagctctcttgtcgttgacaaatcagcacaaagtcactcacgaggcttctgcttcaatccgcgcacgttttgcctgagctaaccgttcggcctcttggttttgagcggcgatctctggggagcttggaaatccgatgttcctacgaaggggtagttttgatcaaaaagaaatcagcagatgtatttacagaattagatgttgatgatcagaatcggagtcggaatgtaccaataacccggtggggtaggcggttcttcccaatcagctcgatgtctcgaattttgttgctttctcatctgtacagattcccgctttagcctctcagttctctcttctaaggattctcctctctggccaaatttgtatgtatctgaagattcccttgtctctttagagctggatgtcggagccggacttttccatcgagggccttgaggaccaggtggtagcgcgcctaccgcttcatagtactaaatcatatagtagagatcagataaagcatgaggtcttagcttagtttccatggataggaacagatacaattaaatgggaataacatacgccggaacaacattcgcaatccgtcgcatgaagttgtttacgttcgtccttcttacgaacaaccctgttgaaagctatatgcatatggatgtcatgagcaagcgtgcaggtttattgttatcgtaataatcttgaagaaaacttaagaaagagacaaaccataattgacgccttgattgttatctttgtttatctcaaactcctcattgatagttttcgatggcgtactggatgtcgagtcagaatggtaaaggtcagtcatttcttgtggctcgagggaagagaaggcagaagattagaagtgcgacttacgtagaggaatcggccaaggcatacctcccgttacctttgaagccggcgaagagagcagtcacttccttcgggttcttgtttctcaatgatttcaagaatatcctcttttcgtcgggtgtcattccagccgtaggatctaccggacgactcttatatgtcgtatcgatccagtcgctacccgaatcatcagattgtcgaaagacggaacccgagcgggagactgcttcagtaatttcaggtcccgccttcgtagaagctttgccctctgagtctgatgaatagtccactgttcgagatatatcaggattgggtacatcggcctctaatggctgataacagatctcgggcaactcatctacatctagttcatttttgaccgtgactctgtgttgttcatgctctagttgattcggtgatttccttttccggctctgatggtcccaattatcagcccggtttgaaggagtagaggtcacgatcatctgatcagttgatgataatgatctcttgacctggttggcacctctgtctagaccagtcagatgtacgggctgaacattctggtcatgaagaacaggctgaagtgtaggcttccccagccattttgtagtgcatgctgaagaaggaacacctgtatcttttgacgtgtcaacgagtggcattgatgtgcgtttggattctttcgttccgatcgaagtgatattaggcctcgagtgaatacctttctccggatgcacatcagacatatgatctccagcgctctgcctcactttgtgacgaacggtgtcaggggtgagatacggagtaatccttttccgatcatgaatggctgccgacacaaatgtcccaggatggatttgtttcgagtgaaatacatgaatttctgaaagacctgagtgctgggccgatgattctgaaggtttgttctgctgtggtgatttcctgaacgtgagtgaaggagtatctaggagctcctttttcactgctgatgttggtaaaagatttggtgtgacggttgccgatgatattaaagatgggggagagtggttgtgtgtgaaggacattggtgtattgaccttaggagcgctcgacgtctttgttgcaacgccaaatttgcttgaaaaggaatcttgactcgtgcccttggccttccttaaaaaacccgccgatgcgccgttgtctgcttgcaccttcactacttctcttcttttacctttcacgtcagcgccctctttcattgccaaacggttccttcctctagatttctccgcagcccgaaattttgtgagatcttgaatgtacctcgtcgcaaaactcgtccattcttgctttcttgatctatacttttcctgaagttgttcatgttgtgcctgaagagagcgataagaagcttgaagcgagatatactctgaagagagagtaacaggtgatgtattgtttgatgaagaggacaatagaggaacctcggcagtggagacaggtttcggaagatcagaccggccagggctggttcttttttttgggggggggatccgaaaaagaaccgagagaaaggtatgagcatgcatgcacgcaagctaatcatctggtatgaagtataaattttccgacacacatcaacaaaaaggagcggagagactcacgcctgatattctagcccacctgactgttgatctgatttactcctctctgcttcaaaggttctgccgtggtcttctatagttctaatctcactctccaaggtatcaaccctcttgaccatcgatgcttccctctctcgccattgatctttttcactgatcaattccaataaggcgtctacatgacgggtggagtccatcaacctcttctggtattttctccgaagtgcgatttcggtttcaagttgagtctgaagctgattcaacatatcgatactaggggacgatgaagtggaggtaaaagctgtagagtcgactggacggtttacactattctcgagggacaatacatgattctgcacagtctctagttgattttgaagattgtccttctgagcaatgcatctctgaagcttgtcttctttcagttttagctgtgtatgaccgaccgagacgtcaaaagggacatatgtgcattaattgacggaaaggactatatgcgcttgacaggactcgaacttacctcttgctttatgactatcacaagacgccacatcaagccagtcaccatcatttttcgaatgaaatcagaattggatcacggaacaacaagtgaacctatttgattcttcgtgatcaggttgtaaggaagttgagacataccggcatactccgattcccacgtctctatcaccccttccaatacaccgacatgatcggcagcagcttgttgtctagcctttaatagattttctatcagagacccttccatagttcatgagagatctgacaaacaagccagtagttcttttagtagttggttactagaaccatttagtgagagagataaagaaggtgggggtcgattgattgacatgtcaggaaaggacaagacagaaatcggagaggaatgcggtaaatggacggaacgcgtctttgcctgatttcttgacgcgttcaaactcgctagcccatacacccactaaccgccatcgactcgcgttgactagcttacatggcagactttacagatacacatcctcggatccctcttgactccgaacaaaactggcagaaaatacaagacacaatcacacagagtctgttacagacaatcgagtccaaattcgcctcgggcgagctcgatccaggattgaaggcatatgtaaccgagaggacgatgcaggtttgtctgttccgatcgtactacaatgacatgacaaaaagacttccagagagtctatcactgattggactgctatataacacatgcttattgaatcgatgatcgtttcttccagtggaaagaccagctggtacataatgcaattcctaacctgcgtttgaatggtatgccttatgaagagtatttggagagtccagagagtatgtcctgctttccatttgtacagctatacatccatccatccgcaatccgcctcgaatatcaaccgttgacgcagagttaattatagatacggagccctttgatgagtcgctcgacaggaagatccgatcccttgcagccgagaaggagcttatacaggttcaagtcgccgaacgacgggcaaaaacaccaaaagctattcgagcattaatggaagatttagtcagacggcagattgcaggagagtgggtccctctggaagaagaccaggcgatggatggagttgaggaaaataaaggtcagtcgtcatctactgagtcttgagtcttattttttttcttcttgaatctagtggtgaaggcgagaggctatattgactgggacatctgtttcggctccttctagatctgatcctcaacaaggaagaaatcgttcgaacatttgattctgcattacacaccctctcgtcaatcaataaggtcggtttttctagttcaatctagctgagtgtttgattgtgtttgtcagagactaatttcggttcgacatgcttactgttctgtgattccgaaactcgtagaacttacctgtatgtcccttgtataactccatactccctagcaaactcgtcatttgccaaacattgacttatttatcgtggttgtttttatccaactttagaatcaactttctcgtacagcgcaagcccaacaagtagcggaagacatggccctcctcggtccatgatcatatcatgtttctcaacagaattctttatttgtgtaatacatataccccatatatataccccgtttattttcctaagctctatgttgcatcgtgttttagtgatactcgttgttgcgctacgtcatgttgaaagactgatcgaagccccctgctaatttgtttttatgtggagtcgcctcaacatattcttcttattcgacaaacaaacagaccactcaaccagtccttctcctttccttcaaccaactttcccgagaaccgaagggctttgccttccaaccagttgacatctggctcctcacaaggcatctcctctcttcccggtacatcctctaactgtgccttcacgcgctctccttccttattaagttcatccaggaatcgctggactatgacctcgccctggttgactgaaagagagcacgttgaatatacgagcacgccatttggtttgagtagtcgaaatccgtttcgaagaaggtttaactgaaggtcgggaagggttgacgaaggagacgcggtggacagagaggctagaagagcagaggggaaggcaaacgtcggctggccattaggagaagacggagacgggggttcgattgtgatgtacttcaggatatgcgctatcgacccatcgtgtgtgcctggagaatgacgatgatatgagaagactcaaagtgaggaaactttggccgcgatctaacaagaagaaggagagacgtacattccgcgtcgaccagcaccttgtcatagggaacaaacaccgacgtgtcgatctgaccaacttcgatgcgccctcttttgaaagtttgaggaatcagatatcccttcgtcctgacttctaccttatcctcatcccaaaccggtcctctttcccatccggcccacgtctcatcctccttttcatctctgaccctctcagcatctactcctagtccaaactccttgcctctccagtaaacatttcctcgtgcgactcctatatcgaaagctctcccatccgcaaggaacaacctcgtttttgatccgtttcctagttttccaagtacgcttttggtgatccccaaacgagacgccgacacgtccacgcctgtaactgttcctcgacctagtctgactatctccgcacacaacgaaagtttcccgccaggcgcgcaacataggtctagcacgtggtcgtccggatcaagagagagcgcatggaccgcgacggccgaaccggcatcgagcgcttggacccgaccttgtttatataactcacaaggggccattctgaccgatccaggcagcctatagaactcaagctggggactgggtagccagctgataggtgtcaagtcttctggtgggatattaagcgcggttgatatttggagaggtgaaggacgggaatgggtagggtggaaagtcggatggatgaaccgtgatgggagggaaggctttgagctaggcgtcggacgattggcgagggcatatgtgaggagcgatgtataagtcgaagtgggaagtccatttgatcgtagaaaggagataaattcggctggaagtgttggaagcgacctattttgaatttggcaatgttctgagtctctcgacggtcgttgcgagaagtttaagagaacagattgagaagcacagggaagacgtacgggagagatgactttggactggctgcccgagcgctagagatcgccgatgtcatcctggtaagagttctattgagaatcaaaatggttcttgtattgcaagaaagcaaccagaacctcctactagttgattgtatgccgaggtcaactcaaaagaatataccaaattgatgtatagcgcttaatggagcggttagggttatgttgaacttgagataacatacataacatacatgatgtagataaatcatatatgtaaatattaattaaggcctgtgacgtatactcccgattatttctacaagctgaaacattatggcatgtgtgttaataaggagacaaccctgaaaacttcatagacgatcgttcacgaatctgcaaaagcgttggtcatcatggctacccgtgctctcaatacagcccagaaagttcggtcgaccataccgccacatgcttcaaccccgcctcctgttcgaccaacaacgcatatcaaccatatcgtttgctttggcctgggaaacttgacgcatccgagaacccggcattcgtctgtataatgtctatatcgtatacttgtattgaggtcgtacaactgatctgagcttcagtttttgtgctaatccttagcttaggacatgtgattgtcgactcattccttgatcgtctagggctcggaatatggaagaaatcggccaatctgaaaagtatgatagcagaaggaagtctccctttaccagatcatgtcgatgccgcttctgggcactttgactcggtcaaattgacgttggtaaaaaacagtgcgtgaatatgatcacctatctctcatcctgaccgcctgtctcctcttcgttgtgttcatccgttctgaaggaatgttgtttatcggcgccctctttctagtcccaccgatgaaccttgcaggtcaatctcttcagccgtttctcaggcaaaatcctatcaatcggtccacactctatttcttcttatatgaccatcttgatgcagaagaagggaagattcaaattagaagaggaggttcgtgtggcggacaaaaaggaatgaagagctgtttaggtgtgttgggcaagcacgataaagaaacatatcagatacgggttgggatcgggaagccctcttcagtgcgtatgaatcatgatcgttgcttgatgttttgaccgacagagacaagaggtgagctaacacgtttgattgttgattaactcagaccgacttcacagccagctacgttctctcgcgctgcactgccccccaactgtcatattttcgaccggatggtgaaggaacgatatccatctggaactccattctcgaagcggcctatccatctccaggttccgacaagatagtttctgtaggaaagaagaaagaagatatgttacaggcctcggcggccaaaaagctcaggaaggaagccaaggcgcaaaaggatgcagagagaagaaaggctagggaagccgaagccacgggcgagagttatagcggtagtgagggagagcagcttatggatcgatcgaaaagctagcgaatatagttcttttcaaaatagatgaacacacaccgagtgtctgttcgtgacagagcggagaaccaacgaaggaacttcagaggagtgatcgagcatcttgtgtgcttcaaggctcaatttggtcttatcaaattcttcatattttcaagcgcaacattccctataggatcttgagtagctcatagaaggacacatgatggaacaccagatttcatacacgacgtcagaacacaacgtccagcatcagcagagcggatacaatctacagtgaacgttcattaaatgaatacttgaattgtttcttgaccgcagcaaaagaaagttgttctgtggtccaggtgacctcacctgctctaggagttttctcacgtggagcgagtgaacaagatcattacacggcccatcaatctgcgtcgactctgctcttgataagagatatcgggaaacagcttctgatggatcactcacaggctgaccagatgaccagtgccaagactagaacacacaatcgtggatgatgtgtagatacattcactcggaatgtacattcggacggcggaatacttagggattagatggatttgtctagaccatggttctctagatgttcttcccaacatcgttgactcgggtttatcgcttccgaaatcgtccaaggtgcctgttcttgactcaatgctttgaatcacagaactataagagcacatcaattcatctgtctacagtcgtcttccatttctcgtcgtttctgtcttttttcaagtctgacaatcaggaagaagaaacacataacttgttctttaaaaacactctaatatagaatctccacacccgaaatcgaagtactcaaagacatgaacgagaagcacgacgatccgaaggcggagattaattacatcgagaatgcttctccaggtacatctccactcgatgatttcccaggaatcaatgatatcgatgagaagaaggtgtgtgctccgcgcgtcttaggctaatctatcgacctaggcagaagagactgatgtttgccatcgaatgttgttgtgaaatcatcagctcatgcgaaagatcgactgggtattgctgccctggctcagtgttctttatctggcaagtcctcggacaagtgcgacatactgcaaaaaccgtgtactgaactttcctgtactcttagctttctttccttgatcgaacagctatcgggaatgccaagacatttcatatggccacagacctcaagttgacagatcagcaatatttactttgcttgaccatctttttcagtcagttgacttatttgttattgttggcgctgactggtagcaaatgcatgaagttctcagttgatcgtcagactgagatacatttattgcggttcacgcctcacctcccgcagttccctatgctctgtttgagcctccatcaaacgtcttgttgaagaagctcagtccgagggtctggctgacaagcatcatggtcctatggtcagtgcccgcgctcagatgttgtgtcctctaattacgtgtgatctccttgtcctgacggttctgctcgaccttatctataggggaatcgccatgatcgctcaaggactggtgaagaactttcaacagttgatggttgttcgaacattgctcggaatattcgaagccggttcgtcatcttgttttccatatatttttgagaaattgggaaactgaagctatgagaactgtcgtcgtgctgcgaaaataggtctttttcctggtgttaattattacctgtcgtgctggtgagcatcatgtcagtttgaaccgccgtctgttactgaacatacgttcatcacatatccgtcttctgcaaaccaccctaggtacaagcgaaacgagtttggtcttcgagcttcgatctttttctccgctgccactgtcagtggagcgatgggaggtcagttgacttgttgagagcaatatcctcaatcggaaaagacatccaactgacatgctgcgattttctcgaccctcatcaaacaggtcttctggcggctgctatttcaaacatgaatggagttggcggaaagccagcttgggcatggagtcagtcggtcttccatatcgccaaactccacgtccgttgctgactctgggtcgacttttgattgcgcgaacttacacagtcttcattctggagggaatcctcaccgtggtagccgctctgatcagtccgtttctgattcaaaatttccctgtgagtattgaatggagaatttctactgcattcagattgaatggaaatgctcatatctgagagtattaatgccggatgaccataggataccgctacatttttgaatcctgcagaacgtgagtcgctgacaagaatcatcaagtcgtcttcatctggttgctaattccttgtctggtctcgcaattcaggcgcttttgtgatccgacgacttcaaaccggagatattgtatctgccggaggcgaaaagttccactggagttctatcatcgcttccttaaaggactggaagacatacgttggaatgatcatatatgccggagtggatggcccactttatgcgttctctctattcaccccaagtatcatcaaggagcttggctacacagccgtgaaggccaacctgatttcgtgcgtgtttatatagttctgaactcatgagaacgacaaaaccgtctcaacaaagcatgatccgacatttctgacactggaacaccttcaatgtttacaattaacagtgttccggtttacgtgtttgcttgtatactgacggttgctgtcggatttgtaagtcatcatccgcgtttcagttgcttcaaagttaatatactgaaggacccttcgtggtttcagtcggcggatcgaactaaaaagagaggagtctacaacctgatatgcttaagtgcaggcatggctggatatagtacgtagtgatccagttcttataatgaggtttatcaaagttgacacgtgtatgttctttcaaagttatcctgattgtcagcagaaagccggcgttgagctatttcgcaatctacctggtgtgtactttttgaatcttttcgatcagttttatgattttaactctttgaagaactcaatctaacgtgttggcctgttgccatgccattgacctacaggctgccgctggaatctatcccttgattcgtatgccgtcttttgttttcgttctgttatctcaacatatcgttcagctcatgtttgattcgacagaatcctaatatttggctcccttttctatttaaaccagccaataccatcgcatgggtcagtaacaacaccgagggtagttacaagcgttctttgaccatgggcttggtcattggatttggtaatctcaatgtacgctcagctcttcctttatccgagaagcgcaatcaaatagatctagcgtgattgattcgcttcacatctggtatacgtagggagccgtaacatccaatatttaccgcgccaaagatctgccatggtataagatgggacacggcatcgtgctgtgctacatcggtctcggcttcacatgtaagaccttgtatatctgatgttagccgcgttgtcaagagggtttcttagcctgagctcatatggctgccacttattactttatcttctaacagtctcagcactttacatgttcctcctttcgagggaaaacaagaaacgagatcgaggagaggttcgtttcggcttctcatctctatttccgtacatactctcgtgctgatcttctctataccgggtctatatatagcgagacgaacacattcaaggccaaactgttcctacggactcgattggatcatcctcagctgttaaaggaaaaggcaagatctatgaatcagaagaccaagctcgggcggagctgggagatgcttattctggatatcggtacatcatttgattctcttctttcctttgggccggtgcaattctcgcacatgtattctgttctctttttgtaaagatattatccttttcatatcctgtaaatttcgttatatatgcttctcttccaagggtttcttccgaactcatcgcaaacgttggttgttgtggtgtttgttcaacactcagttcgctatgcttgtcgacctgaaacatgagccgtgtgattggccttcggagaaagccgggacaatgatgagccgattatgccgctcgagaagctaaacataactgatacatctccagaggttgacgaagcccctctctactcttttacctgttcaccacctcaacgtcaacacaaccatcgccgtagaattgtgctctcgatatgattgcttcgaagtttgtcaaaaccagcttcaccaggcttgcagcttcaacccgccagtctttttctaaaccgacgagtcggcgaggacttgttgctctaactactttaacggctgtagccattccatctgtaaatatatccacttccttccttgatagtcaatgcttttactcttggagaaaagcatctgagttaatggttctcttcttttaaaagggctttgtgtactttcgtccatcgatttcgcttgactctcaagcccatcctgtgaaaatgactccagaaacgacacaccccgagacccgggtgctctctcgatccgaagtctctgatcataaatccccttctgatggtggtctctgggtgatcatcgataatgcagtatacgacgtatccaacttcctggatcaacatcctggtggatcgggaatcatcgaaagcaatgcgggtaaggatgtgacaaaattgttcaagccgattcacccgcccaacacgatcgggactcacctgggacaaggagtagaaaaagtaggggattgcgagccgatgggggaggaggaggcgaaaagtttgatgactgatgaagaaaaaagaatcagtgaggctagaagcaagctgggtcacgtcgatacagtcgtcaatctggatgacttcgaggtgcgttcttctattatgtttgaggtgataatcagtttcccacgctaacgaattcagtttgaaacgaatggggtttttttagagagtgtgtaaagacattctatcgaagaaagcgcttgcttgcaagtctcttacattatttgtgatagtcatcttccttgttcaatttttgcacaatctgatcagaatattttcatgcgctcaaatcacaacagactactcttcgggttccgacgacgaagggactattcgctcgaacgtttcgtccttctcacgaatcctcttcaagcccagagtccttcgtaaagtaaaagacgtatcgatagagactacgattttaggccatccgtcgagctccccaatctacatctcgcccgccgcgcttgctaggctgggaaatgaggatggagagatgaaccttaccaaaggagcgtgagttaagctcgattcttcgtcacatactgataggccttccaagatagatatatcgggctcggaatctttgtttacctaaaaataggttagatgctgattattctcttatcatgacttcacgggtaaatctacagtgctcaaacaggaatcattcaggtcatctcttccaatgcatcttgctctttggatgagatgtgtgatgttcgaaaggagaatcaacccttgttctggtatgtgaagaattcgatatagaactatcttctcgtttttctaattcgtgcccacgactttctgactccaaattctatctgctccaaccgtcgttactgatccatcactaacgaacccgctacaggcagtactatgtgaacgccaatcgagatcttgcctacaaggctcttcaaaacgcactggaccacaaaatgaattcgatctgggtgacggttgatgcgcctgtagggggtaaacgagaagctgatcttcgggttcaattagaggagaatccggtgagtgtgcttttctattctatacatttcaagctttgagtataattcacgagatcttgctcaacgtttaaatgtgttgccgtgtatcgatctccaatttgggtatgaattctcaacagccaacgaatgagtcttctggcaaaggtggctccacatccgagcagatgttcagctttgtagatccaaatttgtcctgggaagatctaaagtggatgaaagaacgggcgcccgatgtgagcttcgtgattaagggcatcggttcggtcgaggttcgttttgtgctatcagttttcttctacatcacaactcgacaactgatctcgagtgagcccataggacgcagttatggctattgaagctgggatgaacgggatcgtgataagcaaccacggaggtcgacaactcaacgggtaaagcaccttttttcgatccaatgttcctttgcagtctccttctgacatatctatcgaacggttctctactaaaacagtgggattcctccgatccgaattcttgagcgattgactactcaacacgccgacttacttgccaaacacaagaccgagatcttcctagacggtgggatccgacgaggtacagacgtccttaaagcactgtgtctaggggcgacagcggttggtctgggtagaactttcctatatgcgcagagcgcgtggggtacagaaggtgtcgttaaagcggttgaggtgatgaatgatgagatcaagttaggaatgaggcttttaggaggtgagtttctgttggatcaatcaagttctttccttcattccaaaggcagaggccacaagatgttgaatctagattgtgttgtttctaatatcttcttagtcacctccttgaccgaacttggaccagaatatatcgaagttctccctatgtaaagagttgttgaagggtagaggataagtcactatttatatgtatatgtatgtgtatatatattatgtgcattccgttgaagctctataatgcgtcatatcgagaggctacacattaaaacaaactcggtgtagatgtaaggagagatgccgcaaagaaactccgaaccaacttgtattctgatactatgccacatcgaaggagaaggtgaacaagacatcccggccagccttatttatcttaggctcggacacccctcttgatctgctcaaccaaccctttagcctcatcctcatttatgacaacatcatgcaccttcttcaaatgtcgtcttaggtcatatgcccttgaaaatctgaactcgcacccttcttggttcgatgttccatcctctcttggaggtggggcgtaccaacaagcaatctttcgttcgacatatgccttcccggtcaatagatctctaactgagcctgccccttgcggcgttacttcgttggtagcgttatcggaaccgacaggggcaggattggcaggattgggtatagacaaggctgtgacaagatgagaaggtagaggaaagacgccagagtcgaaagcggcttgtaatctgatgtcggcagaggcaagagcggattcatcgagtttcgtgtcaggatgtttcttggccaggtgtcttttgagtagatgtttatgaccgtaagatgcatcgcatgtgccttcggatacatgaggacagataaatggacggcgtccgagatgagcagtttggtggtgcgtcctgagagccttgggctgaattgacgtgtgatgtatgaaaacaaaggtttgttgagatcaagaggaaccaatacatgaaaggaacaataaaagggcgggagaacatacagttttaaaagatttaccacagtctggttctaagcaatgatcattctttcctacaatactaaccgtccttctcctctttctttttgtctgttcagcacctgctttccaagccagccattggtcctccataacctgggtttccctctcctgcgcttcccccagcacctctcgctgcacttcttcttcctcccgctccaaaccatcttctgattcttcttcatcctgagactcttcctcttcttgcacgctatcaataaagagagaaaccttctctgtatcaccctgcccattctctctctttctcttcaagtctcgcttcttgtactccactcctgtttctatacgtggaggttcgaccatctcatcgccgctttcgggcccaaggagccgctcatcttcctctcgctcatgatgcactttcaagtgagctttcagattcctccgggaattgaatggttttcgattcacacaagtcggataaggacatgttggagggtggaactctgcgatatgagtccgaagaagggtccatgtcgcaaaggttggtggaggagatatatgggatgcgtggcagcaggtataccgagtgtctttcaagcggatgaaagtggtcagaaagaatggtcaacgtccatgagcaatggtccgtcaagatacgagaaggttacgtgaactgaactgaagtcagcacgaagagtggactcactatcatggactttcgaatgaatcttcaatttctgcctcgttgggaaaatctttccgcaccccttctcctcgcactgaatgatccttgcagccgcctttgcctctttaatccctatactttcacagctttcttggtgtcttttcaagtgctggcccgtccaaaaccttttgtcacacccttcattggagcaggcgaatggcttggctgattccggaaggtgcatgcggatatgagcttgaagatttgtagaccgtgtgaacgagaggttgcacgggggatagtctgtgcatttgaaagggcgctgttcaatgtcggagacgaaagacagacacaatggtcaaaacacaatgtcaattatgcccagaagacgcaatgccgaagtgatccaaatgagtacaaacctcgccggtgtgcgtgcgaacatgctcttctaacctaacaggtctggtaaacgcttgattgcatcccttgacagtgcatgtgaactttttgagccgtgtaggtttcttctttggcgaatctgaagaattggcagttgagtctgtaggcagccgcgctgctcttggtgatgctgtggatgatgatgttgttgtcggtgaagatgggtttgcggattggtcggaagcaatgggacaaaccaaagaacccgacacctcgaagacttgcccgataataggttcagctctctgctttcctttttcgtaataagtgaatctaggtacgtcctcttcatcctcgtcatcctcgtcatcctcgtcatcctcgtcatcctcgtcatcctcactgtcctcataaccatcagtgctgacctcttcgttgtcaagttggtcgtgctcctccttgattacaagctcttcgtccccctctgtttcgcccaagctcatatcctcggtactgaactccggaatggatgatttccttgctgcaagcggtgtggatgacgcgtcctgatcgagagttgcacccagatttgatgctgacttcctcgacggtcgaaacaccttggctggcttttgaaaaacggacatgaaagtcctatcgtctatgtttatctatttagtcgtcagtgtatggtgagagaacagagtgtccgaagagatgttcaaaaacaattatataaggaaacattacgcacagcttttcgccacactgctttcgaagcctgacctgttacttttttggatatctccctttggccgacatcggtcagaccatacatgcctatccgtcgtcttcttacactcagtcgttgccatattttcaatagatacagcttgttattccactctacgcatcgctacctgcacatgtcgaaccctactactgccgagtccaaggcagaatttaccaaatcgcctgaggagctcaagttgaagagcacgtcttccgttcagaaccagcttttatcctcggcggttgcttctacgtccacgactaccaagaatggactcagcaaagacgaagagacatcaggagacccagataagagaccggaaggatggggaacgagagtgctgcaagacgaagaccaggtcttcaccatgaacgcttggtttgtccattggttttcgtccatcaacttatgatagcaaccggatcgttatacggctggcttgcaacagtctatcggtaacttatgcgcaatctgatttggttgtttcttgggatacggtgattggaacgaattgtatgattcggaaccgggtcttgaagggatcatgctcccccacctgaagatctggacgagcgcgccgaggccgtcaagcaagttcaaagagaacaccaggtctctgacctaatgaaaggttcgttgatcacattttgaagtaaagtcgctgaaccattcatgagactaattctcgattgagagaaatcggacctgcgcttgcttaagatgtatacaacaagaaccctgctagtttctgggacagattttacaatacccataatgagaagttagtcgtatatattgctaattttttttgtttgggcatgatgttaatctctttgcatacatgtcgaaatttctagcttcttcaaagatcgaaaatggcttcgactagaatttccggagctgctccagatgactgctgccgatgtgagtttcatcctgctcaatattgacgtgaaggatttttttgtattgcggctagctaatcgactgacaatatgtattggaacaggctggacctcgaacaatcgtcgagattggttgtgtaaatatcttttttttaattgagacctcctctattgcccttgagacttatagatacgtcaatgttcttctagggagccggcaatgcattgtttcccatcctcgagaataacaagaatcctctattgaacctgcatggattcgactactcccgttcggctgttgaggtcgtccggtctaacccgtcttacgctaagcccccaatgggaaaaatcaacgctgccgtgtgggatctttcgtctgaaagtattccggaggatgtcccggagggaacagttgatgtggcagtgatggtgtttgtgttgagtgctttgaagcctggtgacgagtgggaacgggccatgggaaacgtttggaagatgttgaagcctgggggattgattcttttcagagattacggaaggcacggtcagtgtttgcatgcttcttcctctcacggcattgtatcctcactgagatgcaaccagctgacttgcttctcatgcaaatatggattaattacttaagatctcgcacagatgaggataaagaagaaccggatgttggatgaggatttctacattcgaggtgacggaacccgggtgtttttcttctcagcaggttcgttcatcatctcctttcgttgtcataactcgcacacacttacacatggtgaatcaatccttgatctggtgtggccctggtgtatagacgacctttccaaaatcttcacgggacgttccataacatcgcctgttgatgtaaccaccaccaccaccactgctcccaacggaatagatgacggaccttctctctctccgtcacaagtaaacacacctcaaccgccatcgccaagcccaattctacctgacatgaatgcgctctcagcagcagtcgataagctagctatgtctggtgaagagtcgatcgtcgagaagactacagaaagccagcaagatcagcagcagttgacggcccaagagggaacgaacagcgtgtatttcccggaagatggaaaaagcaagtggcatggagagcatccattgttcgagtttgagcagctaggtgttgataggcgactggtatgtcatgtctcgttctgttcaaaattttttttctaggatttcatttactcaatgaaacgacaatgaccctttgtggtacagcttgtgaaccgaaagaagcagctcaagatgtaccggtaagtttcttacaatgtttcatactagtcgggtgtctacgattcagacgctaactgtcctcgattgatgatcgtctgtgaactgcgcacagcgtttggatgcaggtcaaggctaggaagcttctcaaaggtgctgagggagggaccgttcaaagtgatatcctgacggtgcaagaggagccttaccggtttcatgaatgagcttgtacaagatatgagattctgatgatgtcgaaggttctatctaaggtacttaaacgatagacgaatagtcataaattacgtaagacataatatacctggtcattcaaaaataatttggttttcgtttttgtaagtggaagtgagagagttaattcacaaacatccacaaccactcgctcgacattgccaagatgagctcgccagctccagatcaagcatcttcatcgtcaaagccgctatcaaaaaagaagtcttccaagggagacaagtcaaagagctccaagagctcgggctccaaagctatcaagaaatcgagagaggcggatgagttggtggaattggaccggttggtggaggagtatgtaagtttgcgtttcagatcattgcagatcattccagaaacattcacaaacattcacagtgtcgtgtagacacatgaaagctcggtctggttgttatattggctgtttcgagactgaatggttgcttggttctgatattggcaggatcctacgagtccagtctccgactttcaagattttcctatttctgagaagaccaagaaaggtaagacaccgaatccataattaaactcctcatgaatcatggcctgatgatagtttccaactcatattatttgacacaggtctcaagaaagcgttcttcaccgctcctacaggtattcagtctcttgccgtcccgctcgctttgaaaggacaagacatcctcggggctgcccgaacaggatctggtaagacgctagcatttctcgttccgctactcgagtcactgtaccgaaagaagtggggaccacaggatggattaggcgctttggtgatttcgcccactcgagagttggttagtacagttgcttcaagtacatttttagttaattcatgtacacattccgagtctgcgctggatgtttattgtttgcgtctcatacctttttcgataggccatccaaattttcgaagttcttcggaagattgggccgtatcattccttctcagctggacttgttattggtggaaagaatttaaaggacgaaatggacaggttgacgagaatgaacatcctaatcgccactcccggaagactgttgcagcacatggaccagaccgttggatttgagtgcgataatttgcagatgctcggtgcgtgattcaccctctcgatatctcaagattctcattcatgtgtagtaagtaatatgctcatgatcggttttttcgtcacgtgtagttttggatgaagccgatcgaattcttgacatggggttctcccggtccctcaatgccattctcgaacacctccccaaaacccgtcaaacactactcttttctgccactcagaccaagtccgtgaaagatctcgcccggctctcccttaaatcgcctgtgcccgtcagcgccgaagaaaaaaagtcgacggaggatggagaggagtcagaggagggcaaatgggttacaccaaagaatttggagcagcactttgcggttgttgatttggacaagaaactcgacgtattgtttagcttcatcaagactcatttaaagagcaaggtgattgtgttcatgtccagttgtaagcaggtacgtgattggtgttttatcattatttagttcaattttcaattttttttaacaaagttcagctcggctctactctcataaacatcacgatgatgttatagaattctccgctgattctttgctctctctgtctcccattcaggttcggttcgtatacgaaactttctgcaagcttcatcccggagtcccgttgcttgagcttcacggcaaacagaaacagaccaagcgactcgacattttccaccgattcaccaccacctcgacttgttgtctctttgcgactgatgtcgccgctcgaggtcttgatttcccctctgtagattgggtcattcagcttgactgcccggaagacgtcgatacgtacattcatcgagttggtcgaacggccagatacgagagcaaaggccaggctttgttgcttctttgccctagcgaagaggaagcaatgagcgcggcattggaggctaagggaatcgaggcaaagaagattaagatcagagagagtaaaacaatgagcatcaaaagccaaatgcagagttttgctttccaggatccagaactcaagtaccttgggcaaagggtaagcgttatcttttctttctttctgtcaccactacctttgagttcatttgttgatttttgtatgttttttctatatcgcctcaggccttcatctcttacttgaagtcgatctacatccagaaaaacaaagagatcttccaagtcggcgctttacctgttgaggcttttgcagaatcccttggtttgccaggagctcctcaaatcaagtttatctctcaggagcaggctaaaaagaagaagaacagaatcaaggtgatcgaagtgaacgagggtgaagtccaaagcgcggatgagaaggagacgatacttgtatgtcataacgtttcgctcaatttgttctttttgtcattcttgctgtgaaagttgtgattttatctaatcaagagatctcacattactcttcaattctcaatagtcggttgacaaagcaacggcaactgccactcccgccgctccagccgtccgaacgaagtacgacaagatgtttgaaaagaagaatcagaacatcctctccgagcactactcttcccttatcgatcactctgccgacgttccaacagacgatggtgatgatttccttacactcaagcgaactgatcatggattagatgagatcgaggatttggacgccgatgctgcaaaccgagagctttccaagcgaaaattgaaaatgggagcttccaagaaagcttcgttgaaggcaaagggggcgccttcgaagctgattttcgacgaagaaggtggtgctcatgagatctatgagtttgtcgatgaagaagaagagagggccaagaagaagggtgatgagaaggagaagtttgtttccgcccagagaggtgagatggagattgtcgacgttgaagacagggaggtcgcaaaggacaagaagagggagaagaagagaaagcgaaaggagagagaaagagaggttcgtgttgttctcttttccttctggtttaatgatgtcaaccaactttgttcatcccactaaaatacatcaacccttcgttccaaaaaccttgtttgtttgtttcaataggctgaaggtctcgagcgagttgattatgacgatctatccgattctgattctgatgcagaaggtggccttccagatatcgatatcaccggtctactctctgacaacgacgacgacatggatagtgcaagcgaagacgaaagacctgtcggccctccggcgaagcgacagaaagctgctgatgctgtcgcgccggcaaagacagtgatggaggacgaggaagagcttgcacttcgactactgggagcatgagttgtgtttagaatttgatgattatgttgtcattgtcatttaaaagcctatctgatggggtctttctatatgtgcacttcatatgcgcttgaggagaaaggaaaaaaaaaaggtgatggaaggataaattataatatctcgattttacaaacatagcagcaaggtccaccttagacaaacaaagcttggaaatttgcttaccggcgacgatgaaactcaacgaacggccggtaagataagaacagaacgaaagcagacaactacgtattgatacaaacaagcacaaaaaccactttcgcgcaaacatactcagaggtttcaagcgaatgaaacgttccaaccacactccctagataacttcggccaatccacccatttctcacctccttcatttctgtcccagatctcttccagtagagagaatgcagtttgaatattcccgattcgacagcttgattattacgtttcaaaagcatgagagggtcaatctcctatgatactagtatataaggaaggataaaaatacaagaatagtaagcaaaatcgaagactaacttggtgtctatcatatcgaagcgggctttgatttctcttcgatcggcatcggtcgtagcgtcgaccccggtcacaaacaaggggaacaataagctgctctccgccggagtgccgaccaattgagcaatggtcgccaaaagctggtttacgagcagttgagttaccaaactgaaagcattacaatgactgacaacctgacggaggtaaagcctcgcggtaagcacatgtgctcggaaagcgatgagatgatatgatatggcaggtgatgacggatccgccgttgatgggaattcaggatagaccgcatcgagccgggtctttagtcgagcttctcgggcagctagaacgcgtagagactcaatccgagccgctcggtcctcaaaatgtatgcattgagccgcttggacggatagtctagaaatctcagcaatgagctaagtcggatacatatatcagcttgagtccctctgtggataatgggcgactatgaggaagagacaaacttggaagaccatcatgcttggacccatgaaagtattcatccctccactcaagataactccatactcttctggctccaacgatggtccatccaatgatgttgtactcgactgtgataatccgacattgaaatcccggttttaaagcaccgtcaacgtccatatcgataaatgttcatactcctgatgatagacaggaggaaaacaagattagaagaaggaagtgagagaacgcaccagaagctcatgataggcccagttctgcatcaaccatttggccacccagctcttctgtctcttttcggccgtcatccgttggacgacttttcgagcctgtagaagaggatgaaaccatttctctgttgatcctcgacatatctatagaacccagtcatgtaagcagagatcgcgtataggtaggagagaaagggcagcgtgagagctaaaggagagtaggaatggttagacgcttacctcaatttcactgaagaccactagaccagccaagatctcttctggggtaatgaccggcgaagattgttttcctgtctcgttttctctctctatttcgctttcaccagtcacatcttcctttgtgttgttgctcccgaccttcgaccctttagccggatcaacactcagaccctgactcgatcccggatctgcgcccacgccagaaggcgggacagagatggattcttcccaagctttgaatgaaccttgaacacgaccgaaaagttcagctctcataacctctgcaatctccctccatggttcgccaagatcagaaagatgcatagcggaccagcaaagcacgctcagaagctagttgccatcagaataaagatgtaaagtcaatcattttacaaaagcaaaaaggaacagaacaaaactgatgaatggatagaggggagaaggtacatacgagcaattctgagctgaaagccatcggtaaaaacacagtacagacatcgatacccccaggtgggtccgggacgtcccatggatttgatccagacccggtcatcaattgttctccagagatgttcagattaagggtcgcagagttcggggcaaggacagagacaagaggcgcgagttttcggatgaaatagtctatcaggagtggggcttgttgtaccacaagctaccgatcaaattctcaatcagctgacgtctcgaaatacagaggacagggaacatgcaaacgacagataagaaaggagaacgcacaggaggtagatcaggtaatcggaaggccaacgaactaccgacactcaagattgtgctccctgttgagtctctcctgagagatattgattgattcctacccctccctccggcaccgcctccgcctgacgcgctcccacgtctactatcgggcaaagcattaaatctccttttttttcgcggtctcgctccacccgaccgctcctgttcctcttccctatggttgtccccttcggttcgatcgtcttcttcaatttcatcatcactggcgctttgatcatcaagctcagatcttctatccttctcgtttctcaagccgtcattgttcatgttaacaaaaccgccaattgctctatcatcgtcatctaccacatcttctaatccgacctcgaggaagccaccttctgatgggatgtagaagaagtcttcagggtcagatgtactggtttcccaacttggtggaaggacggctggttgatggtttgcgtgtttgccctgatgcccgatcgtcgaagaaggatcgtgtagacgagcaaaagacctgacaggggatgagccatgaaccagactactttcccttcggagggaaagttgaccattcggtttttggccggctatcggtcgggagaatgactgttgacgggcgttggaggtctggggttgtggattatatggttgatgaagagaaagtggaggcgcaagaataggggacaggttagggaaaaggagtgttggagtgaggtgattgttgtgcggatggtgaagaggattagtatatgaagaagtcgaagaaggcggaacgattggagggataggtacagatgaatggttaactactgatgacatgaaatcaaagtttccattaccgttaccgctactgttactgctgccattggtatggccgtggccgttcgaaagtgactctcttcgtgcaggcaggatccaactcaaagaagggctgggcgcaacctcccctcccgcgatcccttctcctggactgatgccaaaacctctcagaatatcagacaactcgccgttcgagtttggaccggtaaatccgctcatccactcgacaaacccgggtgatgcagcagcgataatggggtttgaagggtaggctgaagaaggattattatgttggctggccgtatgcagagaaaactgtttttgaaagtgagatagcatctggttctgaagatccgagctgttggcatcaggtggaaggagcgcttgaagatgtgggagaggttgatgcgggttaggacgagtttgggagttgggaaagttgaggtgatcagatgatccatgagtgttaggtgatagattggagagcatgttcggaagatttgtatgttgttggtgatctttccctgcagatacgccattccgtctggcgatcgcttttgcctcatcgtctggtccagtgatggctcgttcggcgagaagaagttccatcaggtccttgtactgatttgaaggcgctggtgtggattgaatggctgacgggtcgggtggaccggcattgagatggtgatgtcgagtctctactgtggatggtggtggttgatgatcttgatggacgggaacatacaattcctcggtcgagctcgagcttgaactcctcaaggacgaaggccgtccagtttgtggatcagtccacgaagacgggtctgaacttgcttgtggatggggatggggttgagcgggtgaataagaatgaggtaggttgattccgtttgggcggtcttttcctgaagcagatccttgggctttctttgccttcttcagtttgccaccaatttcagttgtggctgaagacgtatatggggtcttgtcggttccatgtgtagcttcaacgctggttgagtctggctcaattggattgtcttccgagacacctttcttgcgcttgttgggttgtttgacggtgatgagtctgccttgagcgtcttgaatttgttgaggaaattgacatttgaagtccaagcgagcgctttgataaggaagtgtacaaaggccatggaatcagcatggtagataagttgtataaggagttctcaagacaagcaagccgaggctacagataggaagattgactgatctcttagcgaagtcaggcaacaagtagatgttacttaccatgaaccacatatcggtctgatcaagtcacacttcttcctgtaaagacgagcaaaacagacgagcaagacaaacaagatagaggagacagaccgaacatatgaagaagatgaacaaaatgaggcatggacgggatcagtaacggcttacacggaccggctcggtacggccgacgacaaaaacgatcaagagagatgaatcaaaaaagacatgaagcagacgatcacagaagcagtcagggaaaggcagcaagaggaggttctgaaggcacgaactttctggttcgacaggtaaagcagccgtctctagttcgtttgagttttgactgggcttcccttctctcttctaaatcctctggagagagttgatgagaaccgtaatcggtcaagccaaacaaagccggaggaggaggtaatgggacggctggtcggaggttatcgatatccgttccagacaccaaccgaggtggaggttgaggtgaccgggaggacatgatctatgtacagtctcctgtgagaaaacaacctgggacgtacaagcgtgctgggtatggatgtatgcgtcctgtttgaggacgtgagcgtgggtatgagtatcgatatgagtcttcttgggtggctgtctggatgtgatcgacaagggaaggtgaaaaacgtcagtctttgaaggtcacacgcctaaggtgaattgattaggctaattcctaatagatatcattacggtcactatgactattttgtagtcttttgcgatgccaatctatcaataaggattcgggtgatattgactacaaatgttgtagtcctggttcgtagtcaactcgcgataatcaatcattagaaattttgtcctatcatctgcaatgttgactacactattttgtaatacagctaaatcgtcttcaacaaggctttctctttccctcttcctcccaccagagcagtcttgagtctttccttctgatcggtcggtgttgcctcagtcacatcgtcacttcaaggtcaccgtccgatagaaagtcttcattagcttaaatcaatcccagaccggtttgcctgtgaaaccctttcgagggcagaacagatggtgaactcggtgtctactctataagggctttgcctcgagagttttggtggagtgcaccagagcagtatatgtagacaacatcacattttatcccttcttcaactctcttttgtgtcatctccttctgtcttcctttttgtgcatttgttttattcaatgctgcctttgcactgtatagatgttgttggtatgctgtgataaagttgtctctggaatacaaaaggtggctctcacgatgaccaagaagttttcttcctagcaaattcgatctacatttcaatctattctactctttgatggtttcctgccaggcccaactctgctcgacaaactgctaaccagagctttcgtgctcgaaaccatactcaccacactggcacctagtcttcccactaggctcgtcctaagccattccgatacgccacacttcacactatccaaccggttcctaaccccagtggtgaacttctctcttgatctgtcgatcatgcccatcaacgaactttgagcacgggtagccaaaccggccaatccttcttgtcgaatgatcatccagcccgagacacctcctcgccatatctgtctcgtcactgacccaatcgatccagcaatcttcccaatcatctgtatctttgacttcttcatcatttgctgtctggtactgaagacctgaggagcgagagagccctttccgtccgtcagcacaccggccagacgccattgctcgtccgtcacatccacagcaggaacagaacggatgtagattcttcggatgattcgctcaatcaacctttccaaaactcgcaacaaacggacgtcctttggagtgtgaagctgagtggtcaaaatcgacaaatttactggtaggctggcgcgagtatttgggacggcggtcgtataggcactcgcagttataggaggaggtcgaattaatgaagtaagaagtgtatcggtcaatagtctatctccgatgacgactaaacccagccctggcgatcctggcgtttctgacgatggtggtatcaccaaggtcgtcggcgccgtgaccgctgttgaagacacgtctggttcgggaaacacgttctgcgataagagctcctgccgtctgtagaagtatgtccagacttcattataacaccctggttttttccagccgtgcaacaagactggcgcttgagtcgctcggtagagtgcctccgcctttctcgtcccgtcccaatcagaattgttcaagacccaaattcagcccttcttcttcttctcgatccgaaaactttatccagactaaacactgaacgcgagaaactcacaccgagatgaccaggatcgtttcttgttccagacgaattgctgaccataagaacgttcccaagaccgaacgctcgaatcgaactcgctagcgaatctttcagatgaggctcgaccgtatccacataaggttttgtctgaagagcagttgagatgtcagattaaacagttttcttcccggagacaggattcgttttgtgcagaaaggttttataagaagtgaaacaaaaaagataggtcaaacgcacaagacaattgtctttgtcaaacaccacgcctttataacccagatcacgtaaggactgaaagttgatttgtctgatgtctgtttggccgttccattacaacccagaagaagagaaaaagatgttggcttagttcatccgagagagagacggtagagttgaaggcttcgacgaaccctctactttgagatgactataaaaaacgatggccagaaccaaaaatcagtaacgtctcattcttttcgacatcactgtcttattgatagtctcctctttcatctctctttctcaagagatgaaggagaagcaaagaagagcaaaactcaaaagacaggtaagacgaacgggaggaatgattttggccgaccgagcaaaccaaagagccgggctatcactggtacttggaccattagttcaatgcacttttgagagcaaaacccggttcgatagcttgaaatttagagcaacaaggtcaggagaacagaacaagagattttgtaggttcccgcttgttgttcttttgagagatgttggctgctcgcttgcctaccggagagaaaaggaactgagaacaagatggttgaagtcgcacaggtcgtatttcgcttaacaccgtaatcggatttgaaagtaagccgccaaaacaccaacttcattctcaccagcttcatcatcatcatcatcatcatctgacgactcgtacatcgctagttcaatggaatctgaaatcaacaaagaatcctgctttctcggcacgttcatccacactccaactctcggctcgctcgagatactagaagatcatcttctcctggccgactctcaaggctatatttccttcttcggtcctcagtcgtccaaagccgctatcgacattctcaaccgtcattttccagccggaaacaaacatgtgcttcctccgagttctttcttccttccttcattctctgatctgcatatacatgcccctcagtacctctacgcgggcacagggcttgatcttcctctcatggaatggctcgaacggtatgcgttcagagccgaacagcgcattgatggagacaaggaattggccgagagagtgtacgaacgattaggaaggcggatgattgaggtcggaacaggagcagcgctggtatttggaacaatcaacaccgaatccaagtatgaaaccccaaccaattcttttgttctttcttagtagaaagtcttgaatactcaaactccttggcctttttctcttactctgattatgtctagcttaattttggcaaggacgttcctcaagcttgggataagaggctatattggaaagcttagcatggatcaaaatagtccagcaacgtacacagagaccacagcatccaacgccctctctgctgcgtctaccttcattgattctatccgatcactaaatgagcccaacaatgccttatcagttcatccagtgatcacacctcgatttgtcccaacttgctcggatgaattactacaagggcttggtaagcttagagaggaaaaaggtgtgagggtcatgagtcatatgtgtgaggccagagatcaagtcgattgggtcaaagcaactcgggacgatgtagaagacgttgagattttcaagcacgtacgttcttcgtcattcatccggttcttcataaaatacataaaaagtcttccattatcccatttttttcttcttgcacttctgtagcagaatactgatttttaagctttgctttttgcttctaaatagactgggttgttggaatcatccgtacaagcgcactgcacctttctgacaccagagaacatcgagcttatttcccacacaaacacagcggtcgctcactgcccgctatcgaacgcgtacttctcttccaaaacatttcctctccgagagttggttcttgtgtttttttgtctctctatccgcgattcttctgagctaacaaacgttctcattctcgttgataacagatgcctcgataaaaatatccatgttggtctgggttcggacatcgccggtggttatcagcttgatctacaaacccagatgcgtcaagccgttgtcgcttcccgtcttcgagactctcaactcaaagagaatgcacttggtcatccccgtggacaagaaaatgaaccgaaattaaaggatctgagatcaagctggaaggaaagtctctatatggccactaggggtggagcgttggcgctcgcggacccaaacgtcggaggcaggttcaaggtcggagaggcttttgacgctcagtcaagtacgacccatccaaatatctatctcacacccatggtgtcaacatactgatccgcgtgtgacgtccatcagttgagcttctggatccacagacaaacgaagggacaggcgccctagacttcttcgatgtggacgctgtcaagggcagcgtcagcctaggttgggaggagatgatcgagagatggtggtgtgtaggagatggtgcgctccctttctcttgtctcatcctgtacttttctctgaatttgaccacaaacgcaagctgatatccgttgttataaactatgtcaacatcaccagtcaggaacagaaaaggactttgggtacaaggtagacagcttttgtagatattcaatcgttcgatttgtttcatgtagtcacagttagacatcgtctttcgttgtataggaaaatatttttcaaagaaaggcatctaattaaacaacagacccgacaaggatatatctaatttcgatgattcacaattgggcagatcgagatttcatctactgctctcttgatcaactctaatcaaagcgagacatgtttcctcctccccctccttctctatttcctcctccccggccacctccaggaccgcctcgacttccacctcgaccgcctcgctgtcctcccctgttggaccctcctccacctctgttgtggctaggtgctccgccgttgtacttgcttgaaccagaatttgagtctccatggggcttagagtcctgtctgtttctttgtccctctatataattgtgaaagcaattttaacgttcgcacattgtgaaagaagataggaacagtcaataaatgtgttcgaaatatacgatctcggacgacgtgagatttctcttactagggggttctttgaacaggttgagtctctccatacccttcaaacccatctgaaaaaggaaagggttgaacgagacgtcaggcaaatatgctttcaaatgtcgtgcgtgaacaaaagtgatttgatacggactttgctggccatcatggtcgagattggtggggaagtgaaaggaccgggaggtccaatgtacctctaacaaatagacaagcaggaaaacaggagagatattagctaacaagctatataaatctgagaaatgcaaaacaaaaaaaaggtacgtaccaaggtattggcagcgtagttgttggcctgatcaattaaatcctgtttcgaccatttgaagttcttcaaagacgagtttctgtaacccatccaagcttttacgcggaagcaatatggatcagcgaaatacttcatgacaagtgctatatcaaatagagcgagaactgatgatagtaccttgatacgtcttggccttgatttcgctagaaatctcgttatcgagcacatggtcaactttcgtcttgaagcttcccagagtcttggcaaacgagttgttagcctggccttccatgggttgaattccgagctgaacaacgtcgcctttcctcaagaaaaacgcttcctcctcggccaacaagagcgttccacgaccctccgcacctgtagaaaagaacaagaccgtagaaagcttaacctctagatacaaggacaaacgattgacaagaccggaatcgtaccagctcgagcggttcgacctaatcgatggacgtattgttcagtagacataggcagtccagcttggatgacatgggtgacctgtatgtgatatttgtgataatcagtatcgaatgcacgtgtgagagaaagcatcaaccgaaactgactccagtgaaatcgattcctcgagccgttacatccgatgtgaacaagacaccgcaagcagcgttcctaaactcctcggtgactttagttcggtgaccctgactctttcgactgtgttaaagcacaagatgattatactctttagcgattggtagtacaaatcatgagcaagacggggacgaacgagtgaatctcaaaagtggatccgatatcaagtttgctgaaaacttcgaaagccatggcggtctcgttcgcagtgggaaggaaaaccatgatcttgtaagaccctcggttaccagagatctcgttggtgattatcttgagcgtggccgcatacaaattgtccctatgaacgatcgcgaaccgttgatcgacgtgagcatgcgtatcctctgcgcaaaggatgaaaacaatagaaatataaccagtgttagcaaagaaaattacagacttgtgaacgaaacagagtgtgattgagatgtatagcaagagtaagatatagacatacgatcttcttctttgagggtagagatgaattgatgattgggcaacaaagcgatcttgacgacctgttatgtttcataagcaaggatgggtagaaacagaattgagaacacaaagatatgagagcgcaacgcagaaagtttgaaacgacgaacgtcatgaacttctttgggaatagtggcactgaacaaaagagtctgtctaggatgactcgatcggttaggcaaggctgtatattacaataagaagcaaaaagatcatcaatttatcagtgtatagttgttagttcatgcacaagaacaaacgtacctgcaaggatttccaagatgcttgacctgaaaccctgagaattttcaacacgatcaacagggagagagacgagtttagccctgaagtcgacaaattgatggaaaccattgcaagcgcacctgttccagtagctgatcagcttcatcgaagacaagccatcgaacaccttcaagcgttgacttgataccgtaatttgaaatcaagtcacagagtcgaccaggggtggcgatcacgatatcgtttggctccttcctcttaaagcaagtgttcacttttgttccgccaatatgtgtttggacgccgagctttccaggcaagtggctaacgatagcgcgcgcagcagtagcgatttgttgtgctatgagagaagcgagatacaacatgagaaagggtcgatcagcgacatcaagctgatctcaagttgaagagagagaacgcgtaccgagctctcgggtaggtgaaatgaccaagatggaagtctgacttccaacaggcggcaccggaagcgaaagaagtgactgtatggaaggcacaaggaatgcgagagtctttccggtaccggtctttgcctgagcgagtctgaagaaagaggaggcacgatagggcattgacataagtctaacgaaagtgacaataacaacaaaatgcaagtaagaggtacgaacacatcacggccttccaagatagagggcattgtctatcgaatttattgttcggcataagaaaggagagtcatcaagacatgagtgttttctccactttgggacatgcttcaaaggatgttgaagataaatcatgatgtgaggaacgcacgacagcctgaacttcagtacaacgttcgaatgagattccggccaacaagtcagacctgattttaaaatcggaaaatctcttgtcggaaagatgcttcgttgcagtagaaggtctgacgggctcctcgtcgacgtccatagcggtttcaacaacctttgtcggttgggaggcggagggctgttgtttttgcctgggcgcgaaggacgatcctcctcttcctctgccaccaccaccgccaccaccacggcctcgtctaggagtagaagactgatcttgaggcatattgtcaaagctagggagagttagaaaaagaggaatggaaagtgatgtgtgggagtctggattggatttcttttgatcagctttggtcaacaaaacaaatctcaaaagtttcagattcttatcaaggcggtgatttatctaagtcacgtgatagatatcgctcatatcagggattttgcgaggcagattaactcatgtcaatttcaagcctatcgcacttggagccgtcatatttgttcttgaatttagctggtttcatcttttcaatcccttattgatacgaaagcataagctgaactgttttctagtcgtgccaatcaaagagaagtattatcattcatttcttctcaaatactgtccagagccaataaatgacgatcagtagagttgtcagggaaaggatggcccggaaactgtcaagaaaaaagaacgacgtattgagcaagataaatgaaaactgaatgtgagcaagtgcatatgcctgaaaaattcggactgaatggtatgaaaaataactaacatgatggcacagataagtgctttccgaacagatgagtagaacgctgataaagccgctcctgaccagtttgttctagataaaatcgagacattggacagatatcaggtgagccatttgcaccgatcgtagagaatctaagcgtatatggacgaaacaacaaacctcttattggtttgtccggctggtcgatctaagctatcctcccatgctcggacaatcgttctgtacctcctaccgaacacccagacaaagaaaccaacgtctaagaaagaaaatcggggtaggaccgcgctgttcacacccagaataaatttcaaatctttaagtactacaaatcctgagcattctgaaatggtgagtatacctacctcaatccaggattgagtcctctgactctgctattcagctgcttctcatttctcttattcacaggatagctttctggccggatatcttggcgttcgattccgctctttggatcttcgaacgaggaaatgacagtaaacggtaatggtaaagttttgagagtgggtgaaaatgctggcgaatcgggcggggtaagagaacttgacggaattaagaatgataagaattctctatttcattcattcattcgacatttacgtattttagcagatgtatggtcgcaagaaatgtcaaaaaccgaaatgtacgaacagcgtcattcctagggttaatccccaaagcctaagcccggtttctctttcacccctagctttcttcttcccgactccgaaccagtgctcgaacgttccgacagtctgagtccagtcttctccacccgcctccacttcgggagaaacatcatcgcgaacccaaccttctgctgtagccgaaggtttgtcgggaagcgcgatagcaccgtatctggtaagtgggtaaagaagacgctatgtcagacatcataccaaaataactttatgtaaaaaggttgagagaaaacgtactgcatggacccaacaaagagatggatgaatcttctgacgagcatatttcgaggtgacaatctaggtgagagggagatgctgatgacggcccattgtgaagggggtagtactgcacaaatatgattataaagaaatgcagacattagtctttagccaacgcacggctggatatcaaaggaacaaacatgtttcaagtggaatccagtgcagggtagaaacttcagacggatctaattctgggataggagacattttggttgtctgaagaaagactgcatcggaccatacatcgagaaagcattcagcttgatacacgaatatgtatcgttttgaaagcacatgactcaccgaacggggacaggatcatcaatagtcttttcccgagagaagttgtgatctccctgtcatctgaggtaaagcagaaaggtctcaatcaaattttgcccacaaatgacattcttgctgtggcacggaacgagccataaactcaccaagttgcccaacatgtagccagtccggcgtggctgctagatcaattccgacttcttcccaggtctctcgaagagctgtatactttgcgctttcgtcttcgggattctataaaacagaaaacgttgaatcaaaacgcgatcgaccgatcagccaaaatcggtgaacatacttttctgcctcctgggaacgccagttgagaagaccatctttgattgaaacagagaggctcgcattaatatttcttgaccatttgtcaacccaagtctcgacctaggatattgcatacctatctcctttgctttttgctcggcgaataaagagtagctcagccttgactcccttctcgttcacccaaggtctcttgaagaagtcatccagagaggtagctggagcatcatcatcatcatcgccctgaccattatagattgatgttgggggaggcactagtctgatacaaattgccacggatgcccttccttgttgcgatggaggtgaagagatttgtctaggagctagtcacatcaattccattccggttcggcccgacccggttgaaagagtgtgaggttaaaacttcgatgaggacagaaagagaacactgagaagggacacacgagttgattgaagagacaataaaccacgtcgaagatttgagatgacctcgccgtcttcgaaatcaatgccgcttgatgagagttgctttccaagtttgacggatgttggtagggttgtagcagctttgtcaatcagaaacgatcgaattttgacattgaaagcgaaaacgtgaaaaagaatgagtttgcgattcgagatattcgtgtagacgataatccatttcttaaaatttcatactaaccagagttcttcttccggagagtgtcttgagaggaatccatgttgtcgagtgtgctgaagcttgagcaggacaaaggtgaagttgaaaaagaacgagatgaactcttcgccaggaacgcaactgaccgaccaaccagggaacccgccgttgggggcccccaacagatttcccgtccacgcgtctggaaagttgtgcctgacacgcgtcgacgcgtcggtttttcattttaatacactctacgctttctctcacttacacacaaacaactgtttgctccaagatgaactcttcgtccaatccttacctcgagaaacaaaccattctgttgtccagattggtaaagacattggacagatgcaacgaagctgttgttgatctcaacggccatatccaagtatgatgttttccaactttgcctactgaacgtagtctggtcgtatctcatacgttatttttaacatacaggatgttgtgtcaaatcccgattccgaaacggtcattatcaccgcgaagctgttcgaaaagtatgagcggaacgtcgcctacaatcttcctcatttaatatctgacgaaagtcgagcaggatccggagaaggcactggatcaagactggcaggggagccgtaaatagagtgatttgagcatatattgagcatgggaatggggagagagcttcagctaagtcatgggattgtcattcgaggatcctatgacacggccatctttcaactctcgtcatcatacttcacttgtgcaggcgtaagtgttatcttctgatgtcatctaccttcacatcgatcatccgtttttttctttctttcgataattcatctaattctcatggttgaaattgagaaaagtgcagatgacttgttatctgccctggctaggcttctggccatctccatgtgaggagattggtgatacagttatagatacaatttcgaacgtaggtcctgaaaccatcctctatatgtatctgtcaaatgctcatactctatgcatttgtgtgtgaacttccagtcgctctcaaattactgcggtggccaaccacgctgccgaattgatagttgacgtcgtatatcatttgtttcaagatacccgttgcgactgctggaacgtcctctttaccatgccagatagcagctcgaagcttcttttgagattacaactcattgtgacgttcataagattagtatggtgaataacgaaagatagttataccagtaggaggctctcagaggaaagacaaatgagattgacatggttaaaacctatatgttgtcgcacttttcgtccggtctgttgtgcttgacttcgtgaaatcgcatgtgtcgcaacaatagttccttgatgaaccaatgaagctagaatcttggtattcattgtacttcatcttactcgaatgcattcgggtaacaaacatggtcggtcttgtgagtcgataagccatatactattataacctttcgactttatgttcttatagctgttcatacgaaggctctcatggaagtcaaacttatgcagaaatgtatcctgaagaatctgagcatcaatcctaatcgcggtcgattttaagcatattatatcgaaactccgagtcaggctggacggaaaaaggttttctatgcgaaagaaaggaacaatttcttgtacaacatacagcgtcaatcaccaaacaattttgatctgtgcatgagcgaagtttctcgcataaaaataaatcaaactcgaagagagcagacgaacatccattgtcgaacggaaatgaaataaaagaggaagaagataccgagataaggcgagagtctgggattacccggatgttcggaccgatcaccgaccgcatgttttttctgccgttcatgtcgtcagtatataagcgacttttcttcatatcctccctttattcatcttcctcttctcttcatattcacaaatcctttcctgagcttttatatctactttacaaacaaaattaaaccttaaagcatgactactttcactgctactgtccttgtgagcttcaatatcgatctgcttatcaagagaagaatggaagtgatgggttcttctgcgttcaaaagcttatccggttctttcctttgtactatagcacggcgctcgagaccttaaactggtttgtcctatttagaagctcatatttagttgtatattctaaatgccgatcgacattggtgcactttaataccacaggaaaccagaactctcgaagcaccgacagatggcaaggcgttcgtactagattctgcgatatctatcccttccgtatgatctcaacgctaacttagttcacttggacatgttctagtcaaatccgaatcatcgcgactggtttgtgcggatctgatggtgagctttgttgaaattagtttgtctgaatggtgttctactaaagcgcagactactaacctatgattcccctcttacagttcactactacacacataacgccaacggagccttcaaagtacaaaagccacttgtattgggtcacgaagccggaggagtgatcacttccttaccagaatcatacaagggtgacttgaaggttggcgataaggtggccatcgaggccggagtctcctgctcccgatgtggagattgcaagggcggaagatacaacctctgtaacgtaaggacattctctttcattcaaaataccgacgttcatcagataattctaatcaaaaccgcgtttggttgtatgcggtatgtgtctgagcaggaaatgtccttctgttcgtcggcaaaaaccttccctcaccgagacggaaccctccaggagtacatgatccacgatatcgattacttatacaagtcagttctcttatcttatctaccctcattggtttgaacataccactgacaaattcattaatcctacaggatgcccgctgatctttccttcgagcttgcctcgatagctgagcctttgagcgtgatcctccaggcgactcgccgatcagcatcccctcagcctggttcttccattctcatcttgggttgcggagctgtcggtcttttggcagccgccgttgcgcgatcaatgggagccacaagaatagcggcagtcgacatcgacgagaaaaagctggaattcgccaaagagcaagggtgggtggacgaaattcttgttttgcccagggggccgagattgagcggaaaggagagtttggaggctgcaaagacattggcgggcaccatgcaagagacttttggaagcgctgggttcgatgccgtgtttgaatgctctggggttgaggtttgtcttgttcaaatttcatgccttgcgtagtgttgctcatgagaagactaaaatcgcgtttgtattgtatctcacgaaaacagtcgtgtatgcaggtggctatctttgtgagtatatcttatctccaaaaaaagattcgtttcagtactccagcgagaaagacgctcagacttgttcgtctgtttctgtgtatcagttggcccgaactggtggcaaagtagtcttcattggaatgggaaccccggaagccaccctgcccactagcaatgccttcactcgagaggtcgaccttatcggtttgtccatcatccgtttcttgattttcactgaaccctatatcctcgatatgtgggatgaacaacctgttgagattttaaccctctttcatacatcttattcatacaggtgtattccgatactcgaacacttatccgactgcgctctctctccttgcttccggtcgacttggaccaggaatcgagaagatggtcacccagcgatacccgctcgaaaaggcagcgcttgctttcgaggcggttgcaaagggacgagatgagaacggaaacggagtgatcaaaacgatggttcgtccccttctatcgtatctcggttctttgtaaaagacaactcaactaacttgacctgttcgtttctctttgatttcccatattggcaggttgggcctgactactagttttctcacagttttttgttctttccattcctatcttcattctggttatattctctggtttatctttacttgtatgtttgacacatgtaaaaaattaccctgattcttgatgcaatatttgggaaaatacatattggaaacatgagatcacgacagaaacagtcaaatatctcctcaacttcttctgttttattttgggcccagacattttggttggatttcgtgttatccctatcgtcgtgttataacaaaacaaaacaaaacaaaaaagccataaaagcgagcgaatcttgactcgaaggacctcttgttgagagctatccccgacctttgtctatttgcagggtcaactacttctaccagccaggggcagatccccaagggttgttatctgctcctccgtaagcgccttgtgtcggtccagtttgcgcactggtgtcccagttaggttcagctaactctgttgggggcacagaagaaaggagagggtttggaccggcggacgatgaggtggtagggaacatttcttcaaggttgatcacgatggatgctaatttgatgttaagcgcgtccaatccctgttcgaggttgcgtcaggtaatgtccatccgagatacacgtgtctgacaaatgatacgtggcttagatcgttttgaaataacgtaaaaagtacctactcgatcaaccacctcggccacgtccacactacctgaaccttctgcctcaaagtagaatcgttccggctccttcaagaaatcaaacggttcatcctccaacggagggttctcaaaaggtgcatttgccgttggcggccattcagacttggctgctcgtgtgaaacgttttgatttacagcatgaattttctgatcgggatgacgaacttgcatagagaaagatgaaaatacgaaccatcactctcgtaccaataggatgtgtgtctcagcgcgttatgaggatcgtattcaaacgaaacagcggatagaggggaccattttgagtgagtttttgcgataccctattgtcaatagccaattggaaccattaccaaagagttgttagcaattatttgatcaggaaacatacagattgcatgacagtgtaaactcgccttgaaagctttgcagaccaaatccaactcctgtcctttagccaatttgacaagatagataggtttgctatccgggacacctggttgtgacatgtaaattcagagaatgagatggttgatgaattcgacagtagtgctccgatcaaacatagaacctcatgtcaaagagatagcaacacgtacccttcccaactggttctccaaatccctcacctcgggcggccctttcttgttcactaagcggtgcttcactcgagtttgtgttgtccatataaggatttgcactcacacctatcgacgagagaagagggaaacaagttacttgtcagaagttcagctgtcatattcacattcgtagtcaaaaaacccaatcgtgcatcacacaatcgtataataaggcggcacacagaaacgaagaacaagcactgaccggtctcgacaatttctaatgcttcagaagttacagtgacctctcggtcggtagccttggctcttaaacgtaaggtgatacaacaatgggagcatccttcgatacagtcacaatcctgaggaaatttaaagagatacataatccatcagaatatgcatccacacttgtcaatccgtgcagagcaaaggcatcatgcgaagcaaataaacgacatccgttctgtaacaaatacaagggtcgagaagagaagacacgaaccatgtgccacttcaagccttcttcacatccaccgcttctcaacgggattaaaccaagccgatgagccaggaattcatcagccaagacagacgtgttggccgagatagaaacttggtcgatcgctgttggagaccaattatgatacacgtcgataatcaaggcaatgagacgctcttaagttgttgttgatctcgtctaaaggaaaaggaatggacggatgaactgaccaactgtcggcacgtcggccatcatcactcgtctcagtgagttggcgaacctgagagaagtgacatttgcattcacaaaacaccacggaatatatcgaccgaaatcagcaagatacccttgcaccaaataccgagtggatggagatacgaaagacaggaactcttcacgaca

SEQ ID NO: 285 - DNA, 25086 bp, Xanthophyllomyces dendrorhous
aaaaaatggagatatgaagaaaatgtatatatagagctatagagaacaccgaggggtatgagttgagagcaaaaagacgacaatcttttatagaagaaccgatgggagtcagcagtagaagaaaagaagaagaagccttgcttgaatcgaagttgagggtttcaagcagtcagaaatcaatatcctttggaatcaacgaggataagcccgaccagaaaagatgtcagcctacttgggtttctccgtagcaagagaggttcgaaattaaatcttgaagtatcatctctactcctatatatattcgatcaatcacgtaaatcacgtataccgtttcgttggccgtgccagtagagtgaacgaacaaagccaaaacaccacattgatcagagcgagtcgagagcgaaattatgaaagatatacaggggactgactcagcaaagtagcactctcttggagagattctatgcgttctgtttatgtatgttttgacacgtttcttgattcggaggtggagcggactaaaaggttacaaacgaacccagaccaaaagaatacaattcgagtgtaagtcaagtatgcatgtcagttgattggctcacttcaattcctttggggttgtttcctccaaagccgatccagtaggtacaaggatcaaagcagaagggtaaaaaaatgagtagaaaacttgaacaattgaacatactggcgatcctctgttctgtatctctacctgagcattcctcatagcgaccacagcagcctcgaaggggtccatcatcgatggacgtagctggcctggattcgtcgcttccctcacggtgtcattttgtctctccggctgagaaggatcaggacaaaatcggacgaaacgaaagaaaagatgcaagaggatgtaagatataagaacgtagctcatgaattgatctggaggatgtattcaacctatttaaacaaagaccatgtgaacaaaatggttgatctcaagacgtacagacaaagcaagctcatgggtttcttgaggacatggcttataatccttgtcgttcccggaccataatgttccatcgactctcctcccttcacagggtattccaagtgttttcgatgctcgcaattcttcttttttctgtagttccgaagagtcgacagtgaccatggctgagaatggttgtctgttagatcggaagcaaaacggagattacacgttgaaagatgagataagaggtcggtgatatagggttcgacgagcgaccgcaaaggattagaagaagaacgatatggatgagagcgacagtgcgatttcgccttggataccagggaaggctgattcacaagagttcacaccctagagggcgaccaacaagttcaagcgttggacggttacagccggagtctttgcttatgatcctctcagccccgatcttgcttcccaaaagtcgattgaaccatcgtgccagacctaaacgagcaaccgaagtacccacctctgatgacaagaacacgttgacctttgtaatgtgtggagacgaccttccatagaagccaacgaaacgaaagaagaactgaagtacggataaaaggagcgccggatggaaggcgcaaatatggcccgatagatatatcaaaccatacttgcggaggatcgccagcacacgctgcgcagccgatctaccaaggcacaagttatcgagcccagatgtgtcgatcaccgtcaccctggcccctggttcctcgcctctcgtccctcgccccttcgccacctcgtttaatcctatagatcgcagaggaatgaatcttttcatgttcggggaaactgactatcaggacaaagatcatcgctctgtatgtgtgttctgatattacggataccgtttccgtctgatttaagaacagttagtccattcggctggacgccacatacaccggcgactgatcggacagatgagacaaacgccacccacacgacacaagcgatacagacacgtattggccatggtcacaatcctacgaattaggtcatcatcaaatcagccctgactcgttcgtttcttttgcctaacccaacctcttcggaatacaggcttctacgaacgaggaggaggataccgcacgatcaagagaggaagagagacagataaatgaaaataagaataaatgccacgtggaactctgaaaaaggcctcgcactgttcatcactcgtagatgccctcaggccgcatgtcacggcgtatgacagacaggatgagagggaaaaacagtgagagtggcgagagagtttgttcatgtggaaaaaaatagaaagggaaaaatagggctacagacgagatgcaggtcatatgcatggccgaatgtagcacacaatctccaaatccttatccgctgacgaacttcagtcgaatccctctacgagcggcagcagcgacctcagctgagcgaattcaagagagattaggttaatgtgcttgtacatttcggacgagatatacttcgacgatctacgttcagaaagaaaacatgcaacacgaacctctcttttcagagtcttcctgacgcttgtcatggttcagaacgagagccttcatctgttgctgctcgagcttgtcaagcatctgattggatctagtattgatggctaaagcagaatcggctggtatgtccatcaatcgcgtctagtaggagatcgtttttatcaaaggttgaatacgtcgttcttcagtatgggtcgaaagattgaaaaagttgaaaggcgataactcacctgaggcttatttcctttcttcgttagaagcatgaacttcatgtttccccctgaatcctctgatgcgggccggatcaagtcatcctctcccgccttggttcccttgtgagctcgcctcatcagtgggaccgcactatcgaatacagggattgtagcttttctgtcaccctttttatcggcctgctcgatgagcaatcgtgagaattccttggtgaattcatcctcttcctctcgagtcattccgtctgcttttgtgagcccacggactaccaggtcgtcctctatgtcttcctctgtagcacttccctcatcagacagatggggctacatcgaacaaactcgcacagggttacttcgactgcaaccgccgttcgtgagagcaacggaatccagaaactcacctcctcgagatcctccttctcttcggtttcttctctcaaatcaatgacttcctctcgatcttcatctccactttcgcttccggaatcaacccgttcctcttcatcatcggcgactgatcatgaccatatcaagcaagcggtgagtcaacatgccgggaatcaataagtggtcgcagaagagaaagacgcaccggttgactgaagagcttgagaagccaacaactcgtcaatagcaagtccgacctcctccatatttttgaatgggacaagatccggccggatcaactgtcataatccaagacgcgaactaatcagctcaatgttcatcaatagtcgacacaaaaggtagccgaatggctcacatcgaatgtatctgagaccatgaaatcaacgtccatcggcggatctcgtttacacatcacatatgcctgtatcgccaaaacagtgatcatcctgatgagtacagaaattcgcacatgagaactataagtgatcatctggtaaaatgacactcacctggaagacaatcagaaactgatcgagtcttttctgttggacccctttatcaaaacacatcccgcatgtttccaataatgtgcagattaatcggactcgaaagtaatcatcggcagcgtcgacaagggacgaccttccagggacaggtagtggctcagctgttcaaaacaagagaaagacgaagaaaggacccaaaaaaaaagggtttatatgagacgtctgttagataattcaacagtctagtaagagaggacgacattggtagaaaagctcacaatgtccaaaagtgatcaaagaccaaagcgtatcgaagatgattgtggaattgacttggcggtagaaactgatatcgagacaaaggtgtacttagtgcagtcattaacgttgaacatatataaacaaaaagacagcagaagtacgcactgtagttctccgagatactttattgttgcaatcctacgttggttgtgcttgaagatattggtctccaagccagcccggatgttctccaaaacttgatctaccactccagttgtgaaatctgaatgaaatttcgccaaatcataaaccacgattgctaacgctccaatatttgagaacttgagtttccaaactttcgtgaacgctttatgtaaaatatgtacgatcttgtcgcgcagtagtggagtttgtgtgactgtgtcagttatatagaagcatctatcaagatcacggcaacataaaacgatgaagaaccaacctggggatcttcccaatgaagctttctaatgagcttcaaaactttttcaacggtcttcttcataagcacgtcatgaaccagatgccgaataaagaggtccataggagttcgctctttctgctggacggctggtcggtcaggtgggttgcactgatacatagaagagagatcatcaacgatgagttgatgagtaacaggaaggactgttggcgtatagaaaatacttggaaagaaagacaaacctggtaatacgcattctcgagtaaaagtgcgagtctcggatccatgtgttgagcactttgcttccttctcagaagctccaactgaacaaccaattcgccagcaataagaaatcaaatgtcaacttccatagaagatagggttcatgaagaggcttctacagaccatgatcttcatcctctctcctgtctcttcactcctcaacaagaaccttccacaattttctaacaacaaagcggcgcattcgatgttggctcctgccaggtcgtctactagcaccttgaagacatgaaggattgtgtgtggtcgagcgactttaaacttggccaactctgaataataacggatgttctgttggccgttaccatcaatggtcagccaatgaaagtaacccccgatacatcagtatgaagctcgtatgtgatatggttgatttaaaatatcactgtacctttgatcggacctcagccagctccttgacaagtctttttcgttggagataccgaaactcttcgtccaactgttagtttcgccagagccaggggcgaaaagaccacatcagaagggaagcttgaaaccaggaaaaagcaagtttaacgaagcatcttccaaggactaacaatggcaattaaatctttcccgacgtccggcatatagggatccaaagcagcaacgaaccgggcgtagagaggtaagaggtcggatcgatttttaggaaccgagctcaggaactgagacacagcggaaatttataccagttagaggggaaagaatcagagaggttttctgtctgtgtcaaacgtgaagaacaaaagaactcagcacaaaccttgacgactttctttctgcttggtttcgagttcatgattgcaaaatccactgccaactgatcgaccactgatttcgaaactgcttccggcaaggccgtaaagatggcgttcaatctggcaagtggacctgcggggagggcaggatcatctgctgaaggagtgaggattgcggtggaggggtcaagatttgagagtgacctgtatatatcagttgaggtgagcgcagacacgcccagaaaatacgcatttagcgaaagttgatcaatatgaagggaaaactgataggaactcacgaaacgaccgactctggaatctcccccgtcgctgttgtctcttctccatcctcttcaggtctaatagcttcaacttcctcgatccccgctttttcgtcccctagctctctgtccagtattactatctgatcttggatctcttccgcttcttttccgtctttttctttttccttctctctctccttatctttcttcaacttgacacccaagaaacctcccggaacaaaatcagcaaggtcgataatgtcttcgtaaaatttacgctgctcctcgtcttcccacatcccaccaacaggaatgtcatccagtgaacgagcataagggttagccgaggtcgaactatcaaggacaaggacggatcctgagcctttcggaggaggtagcgcaggaaaggatggggctggcagatgtaatagatcggctaggctgttacggttagagagttgaaagacaaagaatgagtttttattgtaagacatgtgaagtataaaaggttgacaatctagacgtacgaggttaatccagccattaatctctctacctctttcgtcatcttctcgtacgcctgttgtctatcttcaaagatttctcccgacttgatatacgcctcgtgattcttcagatcctgttcttgcaatctctgtaaaagccaaatagcgcccgatcccatgaaacacgcaaagcctgctggtcagagaatgaaatggaagcatgataacgggaatcaaagaacgtactactcttcccttctgaacgtttttagctaacgattcatagtaggagttgaatgcagttctcagccgactttgaacggcgcttggaaccagctcatcgtcctcgcctgttccgacctcattagtattcttaacttcttcagttagcgattgagttcttgtttccgagccaagatagagtcttccgaaagttttcaggaaggacgcaaagagcggaagagaggtgaatattggatcggatgtcaactacaattggacatgaagcattcatgttcgtggtacaagaaaaggtcaaaggctgtttctttctccagtaccacacaatgaaggcaagtcttatgagtgaacaagacaaagagagggacgtacaagcgctttgagcgcctcttcaaccaaccctccgtcctttttctcctccgagcttcccgtcccagttccagctgtctttgacctttttcctgccgcaacgttcaacgctgcgacccctccttgtatcttcagaccgcatacctctgcctcggatagaactctcaacacgcctcgctgtctagacacccgttctttttcttctcgatccctttgctcggcaggaagagctttaagagctgagggagtcggtggggcgaggagagcgtacaattgagtgaggagaggaagaagaaagacggagtggtccaaccgaatcgacaggcgggtgaggatctgtcaagatgaccaagtaggagagaggcaatgattaattcaaccgatcaagagagtatgtttgttgcgattaacgaggatcaatacagtgctgaaggtcgaagtttgaaagctaaacctcctccacactgtacgagcaactcttcgaaccgaaagagacatcgtctccctcgagataaaagaaagagagcaagtagtttgcgttcaagagaaagaagaaccttacctccacgacacttaacacgtctccttttcctcccagccctgtgattccttcaacgcaagcatccacgatctcttccgcgtactttcccagactcagactatcgatctcctttagcacactctcctttgattctaaggaaaactgtttgcgaagcttgttgaggagagaggtgtgtcgttttagagaagagtcataagtcttcttggaagcgacagacgggttggtgtttagttgaagaagaggtagtcgtttggatcgtttgagaggatctggatgaagaggtagttcggttgacatccttgttgttcctctgtaaatcggggccaggtaagaggtaagagcgttcagatgaggttttcacagacaaatgttgttcacagctcaacaaaagagagactgaagaggtgaaagtgggtatctccttctgatcgagtcggaagtagaagatgggagttgttgaaagcagggtcgttctaattatcacaaacgaaggaccacctccgccgaccgacatacttttctctgctttcaactctatccaactacttcccttctccgtctctcttgatcttcgcgttgccagtacgttgtctgcattcttaacatcttccttgttctaaagaacatcgagaagatcgaaacataccaaaggtagactaaggattctactgctgtaccgagtagacgcgtatcctgtgttcagatctacccactgatgtgaacctgaattgtcgaaggcacttcctggtctttgaacttgataggcgatatgcaagagcataacagaacattacatagatctacaactgtattcagacaactttgactaccctcgtacacctgatccttctctgatctgtcctatccagattctgagctaccctctttctcgtatccgtgtccctcgatcagcccaacactgacggctaagcctaatttgagggcctgagcgatttctttttgactcttgccttctttctccaagttcttcgcgtattgagcgtggatcgcttctgatctggcatgctgtgggtccatgacaaagggaagtcagctaacaggttcaagggaaaacaggagaggaaaaggaagtatgatgtccgcggatgttttagtgaagggattcgtgggcagaattttggtagtgtctgacgatcaatgccatggacgtttgtaatcctcaaagcttcagaggtgggatctagctgatctcgatgtccttgatctactagttacgactgggcataaggatagcaattcacatggatgacttttctcccactctgattacgctccatatgcacagaacccatcgaaactggcagatgttgtctggagatatcaagagacacgtacctccttcttgttgtgcaagcactcttgataatcctctctgaagagagtacaatccttggggttgtcggttccagcgtagcactgttgagaatcaaacgagaggtaggcgatcaacacggtgaatccgagtggaataaaccgatgggacagacccttgtaaagtcttgccagaatacgaagcaaggtgtcaaacctagaaggcaaaaagaagagaagaaaagaacgagtagaacagtgataaattggtccgatctcaaaacagaagacaaagtacaaagaacgcaagggtagactaacctcctttcaagctttgtccggactataagaaaaagttcaacatgatcctaagccacaaggaccaaaacaacaacggatgaacacgttgatggacataccgccattgtatttgtcaaagttgaagttgaagctgagttgttgagatggtctatggatgagatcggatgaaccaggaaggcggggaagattgactacgagatggagaaccccttaggtaacttagataacaagccatgatctgcgcacgcctcgagatacactcggccgagagatggtgaaagatggaacgtcgtcttcttctaaccttatacatcatcaacgaccttcttcgtatcttacaacatgtctctttggtcgaaagtacaaactggtcagtgtggtattttgtttctgaagaaaccatctctggttgccttggaagcatcgtttcagtattgctcattggatcacgatccggcttgttccttgaattcgctctacatctcggccactgtcctcaggagccaaaaaggcagctggacaaacaaccaatttcttgcaggtatctgctgtgttcacataatctaatatcggatcaacccaaatcacgcctttggaccgttatagacctgatctcacgatttctttcgctgctctaatctgccatcttgtctgaatcaataggaaagctccactcttgctgtatcgcaagcgagcggggttaagcaaaacttcagcttggccgctgaaactcagaaagcggctgaaatcctaactgtgtttcttggtcagtaaatctgttgcaaagacctctttgtcctattctgcgcctcgacttactcgatgtacttcctctgtcacagccgacccgaaccaacctcgatctgctctgaatgctatccccaaggcagtgctccttaatgccaaaggtcttgccatttttaccgttgtcaaagccgggttcatcttctctggccgaggaggaactggactggtcatctctaggctaccgtatgttctactgtctcagtcgtcttcatcggcttcaacttgacttgtctaatcaatgtgcgtcttcacttgtgtcataagagacggatcttggtcagctccttcgttgattggcacaggagggttaggttggggcctggtcagttcattgttttgtttaaacactgttgcataaagagcaacaagctcaacagcatatcacttcattctatcggactctatagcaagccggagcgtaagttgtcatatcttgtagatttaggtgtcatcagctagtatgtttctaacccgctgctccgtataccactgctggacgacccttttgtatagtgatatcaccggttcgtttgctgttctttaaagaactcaatgatcgtaaagagcttattcctgttgagattttcagatttcgtggtagttctcaactccgacgaggccgtgcgatctttctcgatgggaggaaacgtcacgattggaggtgagtactttctaactcgcgcgtcatccgtgctcttattgattgatcttccaattgttctcgtggtcatataggcaatatctcggctgccgctggcccaattggaacgggcggatccgttcagacggctttggcgagtccagcagccatgttcagctatagcaaatccaaaggattgttcgctggactctccttagaagtacgttcatacctgaaaaataactagcaagagccccttcgccgatgaacttttcgggcatttcaagcttacgcaaacaataaattaatggacagggcactgtgttgattgagcgaaaagaagcaaacaaacgtgagttttagtcttggtctccttgcttttatcgagataggtcatccctgagtgtcggctttctttttttgcctctggttagaattctacggttcggctgttccctccagggacattctttctggcaaagtgccagctccagagattgcctctcgtaagggtatcagtttcagaagatgaccgttgcctatgtgctaaaatggctgtttctctcaatcatacaggaatgtacgaggtcatcgaagctgctgaaggaatcgatgaatcgtctattcctcaggaggcgtatgttcctacggccatgggagggcacgtacctgtgaatgagtcttcgctcagggcgggcgcgcccggagctggttcaggaccaacgtctacaggattgggaaatgaaaaggggagcaagtcgaacgtggtgtttgactctggggagaccgggaagtaggccttgatgtttttgtgttttctttcgtactcttatttcttctcttttttattgttattcttgatcaccttgtttatgttttcccatcattggacttttctatcatcacatgatatctctcgtgcttctatctctttcgtaactttgtgctctcgatagttctgtcgacaatggtcagaagtgaatttttagtgggcgagtggaacctcttctgctctaattcaataaatctcatgtattactggccctatcccatctcgattcggattgattcctgatgtattacaaaaactggtagtttcaaagaagtcggatagtgtttttctttgtcaacgatcctaagtcttgctctattccccacagatgtgtcttagcgctgtatgcacaacagatgagcatcagtaatggtcgtgattgaataaggtgagaggaagaagagaaggaagaacccatttgaactcactcgaggaattctaagcgaagaccgtcctaaaatagaagggcagatggggaagaaagagcccttaagtcagtacatgtctcacggatatcaacaatggttatcttcccagaatctattagtatagtttggatccaacacacgcgaaagccccactatcccttcataagacggagaaaagaccaacaacagagaatgtgaaggtaaggaaagagaaagacctacaaagacttttttaaattctgctcggagttttgacaagtcagctttactcgaactgtcttgcttgacactttctatactccgctcgacatcttgtatcctttttacatgatctgccatctgagtgggttgaacagttggtcgagcgtaaagttttgaggagcgtcgagatggcagattaagggaaaggattgtcgacaccagcccaaccccatagataacaaagagaagacacaaaaacaaaactcagatgtcagcacctcgctcaaagggcaacaaagaaagaaaagcatgcagaaccaaaagacgaaccaaagcaaccgacacgttcaactctctaactgattcctgcaacaagctggtgacttgcttgtattcttcaaaaatcttccaagacgcgaagccggatgcaatagaggtggcaagtagaaatccaaatgcagctcctctgaaagcgcctatcggttttttaagctgtaggtttgaaatgcacgatgttcaatcataattgcttctgatatttaagaggagagggacatgacaaacttggatagatccgacggtcggaggtgacgggaccggggtagccaaaggaaccgaaggttgggaccgagcagcagctgaggtactgaatgctcggccagattgagcagacgaacgaaggagcgagtatactggacgcgatgagagattcatgatagcagatggtttttaccggtaagaaagaggagagaacatcagagggaggtccggggacgtagaggagctggccgaaggtaaatgatttacgggaaaatcagatattacctatctcgagcacagcaacctcttatccacgtgacccaacttagccgattcgaatttagccgatgacatcgtcgaaacctatccgcctgatccgccggtccctctgccttcttgggtgttgagcgctatttgatcgcactcgaaattctgattaagcgatacgttcgacgctcaaaagcggaacctcatcgcacatcccttcatcttttctctctactttcctactcttcttccgtgtacctcaaacaggcatgctcctttctagatcatcaatcaagacttcatcttcctttgttcgagccatgacttcctctgctccccgatatctctccctgctcaagccatctacctctctatctagcttgcctgggtcgttttctcaggatactcttgcctccaagctcaagctcgcccaaccggatttactccgatacaccaactttgttgatggaagctgggtcactccatccagagaagatgaaggtgtcaacttcgaaattcgagatccagctagcaatgatgttgttcgttcagtttccttcgcgtgagatctcagagcagatactgataaagatttctttggattaatccggtatgtctagattgcctatgccccggatctgaatgccgaggaagtcaacgaagtcatcaaagtggcagacagcgtgcgcaaagagtgggcccagaccactgctaaggtgtgtagtacaatcagttccaaactcaagtttgcatataaatatcgaacgtcgattgactcctcgtggtgtacatgggtctctctagcatcgctccgacttgctgaggaaactaaatgatctgatgatcttgcatcaggaggatttggcaaagatcatcactatcgttcgttcgaatgtatttcatccggtagttcagcgagatggtccgataaacttatgacccaatatatgcctctttcaatcccttatcaacctatctctacaggaaaacggaaagcctctcgccgatgctagaggagaaattgcctacggagcctcctttgtggactggttggtttcttttccagcttatgtttgacccttgaacttggaatgaatcctataggcttatgtatcaaatatctccatgaaaacaggttttctgccgaagccgtccgaagctacggagataccatcccttccgccactcctggacttcgaaacattgtcattaaacagccggtcggagtgtgctcgatccttgcttgctggaactttgtaaggtcttgttatcttcgcctgcgggatatctacacagaaatgcttgtgatcttatcgctgattctgcctctcttttattctcgtgtgttcgtctgtatttttctttaacgatagcccaatgccatgattgtgagcttcatgtctgtttacattatattgtgtgtcaagtacatggccggaactgaactttattctcgatgaattaacagaccaggaagattgctcctgcgttagcagccggatgccctgtggttgtgaaagctcctcctgagacccctctctctgctctggctatggctcgattggtcgagctggccggattccccaagggtgttgttaacgtttgttcctgtttttcttgttgtgctttcacaccgcgtatatgctcgagtgttgctaaattagcctacactccatcgctacttcacgaacttagatcatcacgacagacaagaacaccaaggatgttggaaaggcaatgaccgagaaccctttggtcaggaaagtctcgttcaccggctctgtaagtctgattgtcaatttagtgtaaggacgagctcggacccataagaaaaggctgactgagattggtatattcgtcaatcgttctagagtccggttggaaagatcttaatgagccaggcttcgtctactcttaagaagtgagtactccgtcttactttatctctcgattgtcagaatatttacctcgatcattttgcttgttaccaaaaggtgctcctttgagctcggaggaaacgctgtgttcgcaggtgtgttggctgttggctctttcttgcgtaataccaaaatttgtgtaaataatcgctaataacctttcatgacggcgcaacacttagttttcgaggatgcagatcttcaaaaggctgtggaaggcttgatccagtgcaaattccgattgtctggtcagacctgtgtgtgctgcaaccgaatctacatccatgagagcgtgtatgacgagttctccaaattgttcatcgaggccggttcgtttctagttttccgtgctcgtcctctgtttttgcctcgcttatcaagccctgctcctacggatttccatatagtctccaagttcaagatcggatctggtcttgattcctcagtcacccatggtcctgtcattcactctcgcgcactcgccaaggttcagtcccatattgacgatgctgtgtccaagggcgctcgaatcgctctaggtggacatccccttaaagagctcgggcctcacttctatgccccgacagtgctgcttgacgtaccgcttgatggaacattgatgtccaaggaagagacttttgggcctgtggctggcctgatgaaattcagtagcgaggagcaattgattgagaaggccaatgataccgagtttggcttggctggatgtgagtatctgtacttttttctgattaatcggataaggactctgacagcactcgactcccttcgaatatagacttctacaccaaagatatcagtagagctttcagagtttctgaagcgattgagtgcggaatgctcggtgtatgtctcaattctctcaaacttgttacaaaccgctgagcacttgctaattgtggattacatgcttctctaaatctcacccttgaagatcaacactggtttgatttctcaggctgctattcccttcggtggtgtacgtcaaagcattcccacttcgtttgagatgggtaccatcagattctgactcgttcgtgtgtgtgttctaccaaacagatcaaagaatcgggcttcggacgagagggaagcaaatatggaatggcggagtacgagtaagtctcgacctttctcttgtactcctttagttgtgtaagatcgtcaactgattgctcgatggttttcatcattctgtcttgatagggtgaccaagttcttggcattgtctatctcgtaatcgaagctcgctatactcttctatatataactatcatcatatttgtataacaaacttggtactcgattgtaacagcagtggcccatacgctgcatttgaaacttcttcctctctctctttctctctctttgtcgtcatcaaatctatgagttaatatcaaacatggtggaaatcaatagaatttttgagaattgagccatacggctgacgggatcgaagaatttgagccaaccatttttgactacgtacagcaacattttccatcgcgtggcattttgaacgtccctcaaatacggcaggcaatggatacatccggcgatcaagtcgtttcctttttggggattccctcatcacatctcgccccagtagcagttttcgtgtcatactttgttctgatcgcttgcttgttcagtctggtcattcctcggactctcggcgcatcttatgcctctattaaatctcaatctcaagataggaggtgtaggaggtatgcagccatctttgggttgctgacattgggcagccagctccatacttggtatcgtgaggtttttttttcttgcttctttgcctcgatcgtctgatagtctgacctgttctgaacgaatctgtattacttcgtgttctcataagatatgatcggatacatgcgatggtcgtacaccaatttctatcagactttgccagcctctccttcgccatcccttcgagcgatctcattctggctactcaatacatctctgttcactgaggcatggtccatcgttcttcaacctgggacgccattctggatatcggatcacatcactagatttacgtgttgctggtggacgttcttcgtttatctgtcgatccaacgcccagctcccctttcgagcaaatcaagtggcagttcatctcacctgtatggatcaaaagtgggaaaggataaggctggccagcccgaaagttcatcattaacatctttgaaagatgaaaaatggggaaatgcctcggcagccgccgttctactactcggtcaggttgtggcgatcagcgtagcaagcaacatctggttcgtaggttgtgttaaacgaggtttccctattgtgggggacggcagggtccgggatgtgccagtcaaggtatggggagcgttgttaggaagttcaatctgtgtgggagtgatgcctttgacggtgaatcgtgagttgaagccttcttccaaataatttcttttgcttgaaggtatgtgtgaactccgtactgacttgactttgacaatatgcgctggatggattatttcagaaccttcattcctaacagttgtgagtttttgaacatcattacgctcccgaacgtagccttaactattgaattgactactgagatacctcatcacgccttttatctttatcttgggtatgtttcttttgaacagctcttgattatgcacgcactactcttcgttcctttccttcctacccgtctagccgacggcccctcgtccttcaccctcactccgacccaagtatccctcctcctgctcgttcctcctgtcgtttcctccatgcttttcaacctccctatcctgacttccccatccgtggcgcttaggacgttcctagcaggaaatcatgcccttcgatcgatcggctcggatgctgcttggtgtgcatttggtctggtcgcttgggccagttggaaggttaaaggaccaggaaagatcagtagaatagtttgctcattaggagccttctgggtgggtggagtcggattaccgttaggtctggattgaagctatgtatcgaacagaattcttagtgaacatgctttgtatctcccatgaggactaccatgagaactgatacgagaaatgttcggctctaagaacgtaccgtcgggttgattacacgctggcatgaccgaataaacatgttagggttatgtgaacgtcattgacctccactttctagttgtttgttgaaacccatcgaaaaccatcttccttcctcaacgttcacttcttcaaagatgtccctggcttccgtatctgatacgatcaactcagctgtaggcgtgatccctacgacaccgttcaaacctctccagtgtaagcttgtgaaattcgtatattttctccctgaatgtgattggcatgcaggctgatgaccgctcactgtatcccgatttgctcttttcctcgccagctatctgccagcatttctgcgcgtaagtcatcttctcaactatccaagtccaatggatgagagagatatactctttgcagatctgatagaatctgtgactgatcacgatttgattaggttccacgcatatgccaacgatctctcgcgccatgttgagagtcagtctatacattctgcatcgtcatttgaatagctcatacctatctgacctattctgtccattggtgccaaggtcaccacttttgtacccacctaagcccggattttcatcagtgtttgatctatgatggaccaggcgatggggagggaaagtttgacgggagaagattgatcgggattgaatatatcgtcactgagaaggtttgttcacaaatactggcccgacgatccaccagtaagactttgcatggaaagaagaccaacacacactgacattcctgggtataggttttcaacacgttacccgaatcagagactcaatgtgggtgcaattcttatctaatatctcgcgcagtcgtttcagctactgcctctatgtaaacggatccgatgatcgatatggctgatcgattctgtgagaacgacatgtacagactggcactcgcacaattatgaggtgtctagtggaatgctcacccttctcggtatgaagggcgtacctggcttggctacttcctccgctgaacaaccagcgatgatagagttgcaaaagacgtatggaaagacgtacgtaaatcgctttaatatcaacatgtactggcgccgttagaatttatcgtttcatcccggttcaaaattcaagcatccatacatggcagtcggatatctatcctgatcttcctctaggacctcctcaattgatggtctcctataccggcccgtacgtccttgatacgtacatacaagattctcaaatactaagatctaaaactgaaaatgtactggatatacatcagaaaccaactcccagggcatttgatcgagaagcgagacaagcaatatggaattgatactgccgaacaagcaaaaaaacgagagggatacctcgacatggagttcgaaccaagcaagaaggctgatttggtgatgaatggaggcaaggtatgttgttgttctactcatgcaagcttgagtcgagattgcgcatattgagagaatagatagttgatcttaattgtggttcgcttgctcgatgagcagaaagtaagcttggacaaatagtgcctggaaatttcgataggatttgaataaagggttgttggtgagagagatgggagagcatgcttatgtattgaatacaatcttgcagtatgtatcaagtatgtatcgatgaacaaagaatgttagcaaaacagtagattttcaagacgaattcttcagtcgaccatacacaggacttcttgggttgtatgattgagtcgagcgtacttcatcatcatcattgatacagaccaccaattttaagcttcatatacctcttatcttgccccacaaacgtctttctcactttaaaagagagaaaggtgcttgaggctcgttcatccggaacgtgatggtcttcgtttgtgtaaaagaatcgatggcatattttccgttgaatcgaccgtacccagaagatttatgacctccatggggtagagatctatgagcagcccacaaattagcatatatatagacaagattatgagaatgagaaaagtagagagcaagaaacaaacccttggtcgtgtacggtattagagttgatgtgcacagcggaacattccagcgcttttgcgacctgaatagcttgtcggtaatcctagggcatcatgtcgaaagtcatcaagctcgttatcaacaagaaaacaagaaaatgtagtaagaatagagcctacctctgtccaaacactcgaactgagcccaaactcgctatcgttggcaatctcgaccgcatgatcagcatcgtttgcacgaattatggagagtaaagggccaaaggattcttcaaagtagacgttcatctgtgttattgataacaaatagcgagaacagataggttgagaggaacataagctaatattcatatgagaccaaagtgagtagaatatcgatacaaagcgaacctcagaagtgactccctctagaacgatgggttgggctttggatgaatgacatttttccaagctgtggatttcgatcagagaagtcgcgccctgagtgacaagatttacatatcaaaagacaggaccttggtaaggaaggtggataacctataacgaataagaagagaaataactaagaaccgatactaaccttgttcaaagcatcttttaccaagcatttgactttctcagccgatccttctcctgacaaccccatctcagcaacttcactttcatcagtcttgagtgctttgatcagatcagtgaccttgcgtttcataacggcaacaaagtcgtcatagatggaagagacaacgatgactcgctcagtggccatgcaagtttgtccggcatggaaactagaaccaaagagaatctagattcagacagatggtatgagagccgctcagacaccactcaaaagataacgacgagtagaaagaggttagaatagtaacgaacagtgtgagctgctttctctatatcggccttttctaaaacgactgcagcagccttgccgccaagctcgagaattgcgggtctagattgagcgatatgatattatattcagcaaacaagtacatgccaatagatgcatgactgctcacttgatatatcgtccacaaattgatccaattttggatcctactgctggggatctatagaataggtgttgagaaaccagaaacaaagcaaacacagttataattggctgtttgattcgaatgttaacatatatatatgaagggcacatacccggtaaagttgaccatctacgattgaaggcgttccaggagtggttaatgattacgaacacgttcgaaagctacagtatctagatgatgggcaagtcaattaatgctcacctttatatctttatgcgcgatcgtttgctcgacgagtgacgacacattgtcaggatcgaactgaacaatgtttagtacgccatctggcaagccggcgtccttgaataactctcccataagagaatgtgtatacggaatcaacggagagcctagttaaggtttgaaaagttttgatgcaataatataaagacaagagacacgttcagaagagtaagaaatacattctcgagagagatgatgagtttgagtcgccaaaagagagcaagcacctttgagcagaacagagttgccgcaagcaagaggccatacgattgctcgaatagagaggatgagagccatgttgaagggagagattgaaaagacctgtaaacgttgacagaagtcaaaagaaacaaatactttaacttcttcaggcatgtaaactttggagcagatgaagcgacaagaacgcaccgttccaaagggctctcgagtaacaagtgctaaggagcctggataagaaaagagttattcagccggaataaagttgattgagcatgtatcaaggtgactatagatttgatgcgaaggaaatgagattaccgtcaaccgtctgaggaatatcgcccgtgatttgagaggtgctattgattggatgattcgatggagagggtttttatcaacagttttagtgatagattcgacagcgtccgaacattacatagtacacagcaaagcgagaaaataagatcctacattgcagcagcttcttctattgagttgatgctcaatttgaagtcaacatcctgtgtgagcccagtcgcgctcgtctcagcggcttgagcgtccctgaagattgctttccgttcatgaagcagctgagctactctggttaggatctgtcgacgctggaaagctgttgtagatgcccaagttttggctccagagcgggaggatgatatgattttggagctgaagttgatgaagaagaaaatgagagcatttatcaaattgtcgtagcaaggaagtggactaggcaacagaacgaatcatacagttgagatgcatcacaggcagaggcctgagagatgtctcaagatatggaaatcaaccagtgatgagatgaatgagctagtagtattgcttatctatacacttaaaaacccggtctaacctacctgggtagcgatttgcttagaggccggatgcctaacctcaaatgtaccagaagtatcaagaagtggtcgattattcacccaaagaggtgcatacttgacttctgcagcggaagcgttgcacagtgatatcgactgagcaaacaacctccttcctgtatgagcgctcaaggtaagagctacagcatgttgggataacctatggatcatctggaacaaataaacacgagaatcaacgactcggatgatgaacagaagaaaagaatgtctggctgtttcgttcatctccgaatgatagcggtgtaagatgtatgtggcgataataatcacgtggctcggttaaacaaacccattccatacacatacatacactcgcttctatctctttctgtccgtcagcttaaccttgtcagactcttcgtactagagatggcagactcagagtagttcgtattagactatgctcctactgaactgacaatcaagatcatcttttttgaccaagctaagctaatgatgaaaacaaaacatccggcttttgcattcagcctagacacatcggctcctattgttctgccttcggtcttcccttcacatagaacagatatagacgacgaccgagacgacgaagacagaaagtcagatggagaactcttggatgagcttctggaggaggaagctgatttcgattggggaggctttagagaagcaagaatgcagcaaataaaggaggagtatgtgtttcgttccttggtgctgtagtgacacacatccaggctattcactgataaatcttatgatctcttctctggattgggatatttgcagagcgcaaaaacgtttgcttttacaaaatacccttcacggccgttataccgagattaagaatgagaaagagctaatcacgaccgcatcgtgagtgaacgcttcctttcaacaaagagcatacatcgcttcaaacgctgagtatgatgtcgttcaccttcttgtttgtttgatgattacagaaaagagccatactgtatcattcactttttccatcgagacttcagacggtgcaagattatggatagacacctcgaggttcgcttcttggcttgatatcaacctcatccgctccgttcttcctcgactgacattatccaattcgcgctcttctgaatacatcaacgacctgtgaaactttttgttgttattattattattattattaaaaatgacagaaaatagcaccggctcatccaagtactcttttcctgaaggcggacgtgacgaatgtaccatggctggtccagaaaatgagcgtcaaagtcctgccatgcgtaatctgttttgtgggaggagcggccaaagacaagttcgctctactacctcttctgttgtgtttttgatcatcttgagtgatcagctccaatatcatggtctgactctcactcttcgttgctctcttttgtcttcctttgtctcaatcgaacggttttgttctcaatccctcatttgtaaaaatctaattcaacaaatcctcgtcaggatcgtagggtttgaagatctttcttcgatacccggtaaagaggatgaattccaatcgggggctctcgaacttcggttcaagcatagtggtctgtccttgaatctcgttgttaccctttcaaaatcatcctcttgtcactgacaccttttccttttcttccctgtgcccttgattctttcacatcatggttgatcatctccaggcgtgattcctaaaccaggcgctcctctcccaggtcaactttccgctgttgactacaactttaccaacactgcgtttgctaggcaacgtcgagctggcgcatctgaatccggagggattcgacaggcgaaagcaagagctggtagtgatgacagtggtagcgacagagactagaacaaaatgaattcaaagaaaacaacatacgtcgtcatcttccacgtctttgggtacatctcatttgtgatgacttttttttccctctcatcagcccagcgagcgggtagcaaatacgggtaagagatacatttcaaacaataagcgacatagacaacgacaagaggtgcatattaaagaaaacagatcgagcaagaaaaaaaaaggatttataatgaagaaaatatttttttatgttgctgtcaaggagtatagcgcaaactactgcgtcagaaacgttttacaaatcaacatgacgttttcattcgtatcgctgcaactgagacttctggtaacatgcagacgaagggtttgacacagaacaggaagacatgaaagtaagtatgttgtcgcggacgagaatgttggttcgaggagcaaaacatgacagaccttatccttgaaaggaggaagaccagcggctatccttgttcctccaacgagaccacaccaatcaagattgccacctccgttggctcttgcggcaatcaaatgctgatgggccactgtacgaagacaacagatggccatgatcagaatagaaaaagaaatttagttacagcctagattgagtacgtacaatcgatggtgggcattggcacgttgtgctcctcggcgagtcttcgaatgtgaccggcatctttgatacctccctgcagagaaaagccatcctctccagaatactcattctgtcgtcaaattaaaagaagcaatgttcaggctagttgatcgagcggcatacagtcaaccaagacctcgctgcataccttgaggatctttttgccgta

SEQ ID NO: 286 - DNA, 37937 bp, Xanthophyllomyces dendrorhous
gggtaaagctctgtttcaaagaaagagaagatttgatctgagaaacagaagccagacaatagactgaagaaattctacagaaggtaacgtaccctgaatgagcttgtacacgttctccttaccgactccgctttggtcggctgaagccacatgaagccatacagaggtcagtacagtctgaccacgactctgtgcctgaggctcaagataactgtcctagacttgagaacaggactgaccaagtgtcatggtctcggagagcatctcgatagtggccaagatcatactgtttccgaccaacttgaaggacgcagccttctcgacgttggacccgagatccatgacctttcggccaagggcaggaatctgagattgagaacagaaggatggagatgagctagctgagccgggaacttgtacatcatgggcgtggaaatactgaccagaacgtgagacacgctctttcgggaccggtaatctggtcatgaagagaagaagcgtccaaggacgtcagtttggttaggctgttcaagtatagacttaaccgaactgtcatagcgactcacctcctgagatggcaaacacaagctgagcacgagcggcagcatcgggccgtccaaacgcaggacaagtgaggaaatgacgagttgacttcttggaggcctctcgctcgagtttgccagcagtggcctacgatccaaagaaacaacgtatgtgtgaaagtaacataggaattgatttgattagttttgtatcacaacaagaatgatagaggattgactgagcagaactataagcaggaacaacatacggggtagatggtggaagtctcgatgtaagtcgtatgcttggtaggtcggctctcctgaggttcagaagatgagacacagctggtcagcatgagttcgctgagccactatcggatcatcgtttaaagggaaagagatatgactggtactgacttcatggctcttgaaaagctctaggtagatttcctcgacggcctcatcggttcccaagctggtaaagatgtagtcgcactctgaagagtcgatcaagagtaatctatcagcaacagaagctgcatctactccatgtacttaggcctgaaagactttgagacgattgagacttactggaaccgatctcggagacgtccttggcaacctgaatgggaacttcaccatcagctctcttctgggtagtttcgagaaacttgtcggtgtgctccttggttcggttccaaaccaacaaaggggcacatccttggttgtgaacatgaacggcgaggttctgtaaaggtttcagaagaaggtgattgtcagacagtgtttgttttaggaactatgatcgagagatgagggcgaggagatagaaaagcaaagaaaaaagggagaaaacgaaaagtggattgaataggtacacgggcaatcaggagaaggaaaaaaacgcactagagccatgtgctttcccatgtttccgagtccgataaaaccatatcgcttctgtaaggcgaaacggataggaacagaaaggagaatcacgcaagatgaaagaaagagacaactgtgtgagctagacgccaaagagaatccagtgatggaaacgaatcaagaaaaaaaaagcctcacggtctctcggtggccagccggggaagaaggtcgagagaaagggttaggtgcttcttgaacaggagtgtttgctccagactgagctgcagaaggagtgttgggagtgttgggcttgagtccgaccatggttttgaagattatgtatgagtgagtgtgttggaacaagttgaatgagagatgaggcagaaggggaaaaaggggaaggccagacttgagcgcgtcatcttttgccccaactgagatggctagtcagccttccagcctgccaggccaatcgattcgcgctcgtccctattgttagggtcagttccctaggtacttgatctccttcgatcaactccattcttccagtagcatcccgttcgttcttgttcttattcgcacagtgacatcgaccagcatggcataaccaactcaacaaacataacgacctatttggagacattggctaaccgatagaatactgatctacttgaaagaagaagaagaaaacaaacatcaactgattaaaaggcatctctgtcgatcaatattgacgtctgaccggacctttgtgcctgcaactgatccaggcacgatccatcaggccgattgttacccgaaggcgagagcaaagaagaattaaagtagcgcccatccgatccgctcacccattctgatcatggaggacatgttgatcctcggctcagagtcagaggggagtctggatgttggatcttgcccttgattactcattgcgtaccttgtggtgaccgtgtccgcccacgaaatgttgaccggccttttttttccttctgctgctcctcctctagcttgtttcacccagttccttgtgtccctcgaaccccgagatgtacctgttcatttagaaccgaagctttcacaggaaacaacatgatccagtctccatccttcatccctcattcatattcatctctcttcccctctttctcttctgttcacctgtaccatccatctagacagattcgatcaaggttttcttcgattctctctcgccctcgttcttccttgattttttccgtctcccttcagctccttgtcttttccaagaacctcctagccacttatgtctggtaccgttctccaggacagcacccggatgaaggacagtttgagcccttcgttcacgccggtgcctggacagcctgggtttccctacagcgacgcatgggacaacttttccaacagaacttctgccgtctgctctgggatctcgacgtttccggcagaagcctatcggtttggcgctagcaaccaggccccttcggtcaatagacagccatctgacgagtcaatggtttccagtccctcgtcatcggacgaaaccggtctatcgtccctgccgagtttggaaggcgtcgggtcggtgccttcgaactcttcaataaacagctccaactcgtcaacgttgaactcgccgctgttgcacaagaagtctccctccagaaacaagcacttccttcgtctgccccataccgtcatcaacactcctatccctccttctcttctcgatcctaccagacgaacttccttgccggtgtccgctggcacttcttacacttcgaatttcaacattgctgtcaatcgatcggcttccatgtcctcctctcagtctgatgggcattcttcccttggtcagcaggatactgcgctggcaacggacgatgaggatggtgaaccctccagcaatggatctaagggcacccggcctcccctcaggcccatggtgcgcaaaggttccaaaggaggatggccttatgataaagcgcctcagtcagctggttatggccatgctcttggttcttatactggcccttcacccttgtcaacttctacgtcggctacatcttactttccaccccaagccaagtcgatatacccagcatataagaatgtcgagggctattcatatgatccttccgttcaatcgaccaaccagtctcatactcctcttgtgggaatctccaagtttgcgtcttaccaacagttggcctcggctcaggcagcctccttcaacgctccacccgaacaaaattcgctggctccgcccagaggggtcaaatctcaatcttcctcacttgcgccccctccgctctccataccggcgagcaattcaggtccgatcactcatcttcttcttgatggacatgccctcaatcctctcttcgagtcccgatacgatctcagtgcagttcttgggtcgggagggtacggcttcgtctgtgttgccgtagataaaagacgcaacaaggaagtagccgtgaaattcattctgtcgtccaaggtacctgcccatgcatgggtagagtggacctgtcaaggtgagagcggagatggtatgcctcctttgggcgggaaagttccgatggagtgtgagctcctcagacggatccgacaccagggggttgtccgaggagaatgggtatatgcagatggaaagttcttctacttggttcgttactgtctactctttttctcaacgtatatctctcgagaaccgatctcaccatcgtgtgccatgtcacattgacaataatgtctcgacatcaggtacaagagcttcatggtgcctcctggtgtccatcaacacctgccaccccggtaacgcccagtactccctcgactcccgccagtccacacatcacggcagccaacctggctgatgtgtcctcaacgttagctttggatgcaactcgattggcttcacctacaccattcgctccttcgtatcctctccctgcctcgccagcttgtggtcctccatcgctgattcccaatggcacagtgccgccactctctggcttggaatccaggagaccttccttgaatatggagagaagaggaagttgtgatctgtttgaatgtgtagaagcaaacaagagatttagcgagcccaaggcgagaggaatcttttttcaagttggtaagttcttctgcgttacgcatacttatcaagcatcatacactggctcatgacttcggctgtttgggtcactagtcgaaacggtctacgctttatcaaaggaaggtatctatcaccgagatataaaggacgaaaacatagtggtcgaccgaaaactcaaagtgaagctcatagactttggtagtgcggtttgggaaaaggagccggagccagtgagatataaggacttgtgagtgctatccttaacgttctctcttatcgagaaaaaatttatcaaactgtttatgcccgttcgtcagttttggcacgaacgcttatgctagccctggtaagtataacttccaatctgccttcggctctaaggccacagctcatcgacatttgtttattctcaaccctggattcatcagaaattctgcagcgcaagacttatctggcgtctgaggctgaggtctggtctcttggcattctcctttgcatcctgatcaccggcgagtctccattctcctcgtcttctaacgccatgataggccgtcggtcgcctctaaggaatggggtcgtcatgtccaaggagctcgttgatctgatcgataggtgtctacaagtcgaaccagagaagcgcatcaatttggaagaaatgagaggccacaagtggtttagatcctgagctctgctaagtcctcctctggaatttctctttctttctcctctacattatatgtttttttgtcctctatctttctttgttctcaaatgtatgttttctccatttgcatagtcgctgcttgatttcttcttgctgagaattgcagttgtcgttccattctctcctcaaattttgtcttccaagtaccaatgtcgtcatctctacttttgacttggttcccataactttgaaggagcaggcttctctcttcttaatgtttgcttcttccagactcggtggtgatacccaactttctaaacttatacctatcctttttctcccatctcaaccgattccaatctcgtagttagacaaactgtagccaacattcaatccatccttattgtcctctctacaggacatattataatcgttcgacatcccatctttcttttttgttccattctctgataaattcaagacccagtgttccatcagatgtgatgtttgtcttaatttgaactaaattgtcgtctatcagtggggattgaaatgcccatgaatctgtacacttctttctttctttctccctcccatgtatgcaagaaagcaaaagtgtccgaaaaggcaagaaagaaagagatggaaggttgaatggaagaaagcaggatggtataaagcaagaatggataatggatcaacagcgcaagacattgtaaaaatccgaaaaagaagatgaggagtggacaagacgatagaatgaagaaaaagagagcgaaagtcgtaggatgaagttatagcacaaatgaggggggttcaaaacattccaaaactgatagacgtgatctatactgtcgttgtcgttgtatcggtagcgagatcagccggagaggtgtctagaccttcagaggataaccgtcgagtagagcgatcgactggtgtatccaacaactatttcgtttgttcccaagacccagaaaaaaaagagtagcatcagtatcgccaatgaagaaattcagcaaagaacaaatcggaatctagacatacctccttcctgagttgttctccactcaaatgttccgactcgtcctcatctatctctgccgctcccaataagacaccttttctaaagacctcaccctcctcctcgatccaatgggttctcttcttatccgtcagagaatcgatagaagatctgctttctttctcggtccctcctgatgcatccttcttttgctctgccaaggcctgtccgtccgagcttagcacgcgtgtggtctggatggggaactggtagtcgcctggttccgactcgttctcatcgtccgaatcgccggcaatactaaagttcgggctgactgccatctcgttcgatcttgatgaggaggaggatgaccctcgatgaggaggagtgctcggaacctccaaagaggttacgcccgagggaccgagtgcggaagaagatttcgatatcggattcttcatcatctccaaccgagctttcttctcatcggacgctgcctttgcccgttcagctcttgaaagctgtgtggtcaaccgatcgaccaacccgagaaggacctgcagtttgtcttcttccgacgacgcttgagtttcttgaacggccgctgactgttgaatcatctcctccaaccgttccctcagcgccttggcttgctcgatcagctcgaggatctcatccaacacgacacctagcgagttatgaacttcgaccgattcatccagcgaaacgatgagttcctcggaccgagtgatcaccaccgtagggctatattcgtacacggtcaatcgggcttttcccgcaggcgtcgatacggcggattgaccatcagcaacggcacgggcggtgtctgcttctttcacaatccgggccagagtagatttctgaataggtccccagacggctgcacgggaggctttcgatgttgttcgctcttgagcgagctcagtatttcggatgcaactctatgaaaaggagaaaaaaacgagtaagacgaccagctccgaccaagttgcccaggttagggaatagagaaagaatgaaacaaagaaaaaaaaagaaacaaagaaaggagcctagacgtgcctggaggatatcttgagacaacgtagcaacatcctcattgttgaaaggaatactaagatccaagcaacgcatcagtcggttgcttcggagtccgacagcgagtgccattattcctgcaacttcaatcccctggttcatagtcaggtccagatggagcagatgcctagcctctgggaagaactctgctagcgcgatcgcgccttcggttgttagacctgtatcagcaaggaacagtctttttaggttggtgttgagcgtgaatgatgttcggagaccgttgatctgttcagtacatatgagatgtggttcatgtcaattcggaaagtttggtttggacttcgtcgtgtgaatagttttgaggtctttggggcttactccttcaagtccaggaccggagcacgggttatggttcaaatccagagtgtctaatgtagagttgtatttctacaaaaggcacaggacagttgagatgtttgagtaaccttcagatatcagatggatctagcccataattgaacataccaatgcttcagccaatgctgctagtccgagaacatcaatcctgttttcagctaagttgatcatcttgagcgtccggtttcgcttgaggacctgtgcaatatacgtgactccgccctgatggagtcagagaagaagggtgataaaacatagaacgagaacttggtaagaggtctgagttgtgtttcacaacgttctttttttttcttgtcttctgtaatcaacgattgacatacgcggagatcgtttcctttcaaatccaaagtcactaggtttccaattcgctgcgcgtcatcaagacttcgaactctactctgcatcatcccacccaatactctgttgactgcagacatcgccttgccattcccttcctcggtttgaccaatggatctgtcgtctcttccggttggatagccttccggcattgttcttgatgtgatcccacctcctgagtttgatacaaccaacgggatggtcggcaatacacctcctgggccgttcgtcagatcttcgagttttcgtctggaacggggtgtgtacggagtatatgttgtggccatcgacgcttgctttcctatgaaaccggaagacttgtcggcggtagcgaagggcgaagaggaggaagacgaaggcgaagagggattgacgtaggaaggattgaacgggttggagctggaagtggtgagattagtgtctggataatccttgatcattagcgccacagctacaccgccaaggctgttgattttgtttcgacgaagagaaatatttctgatgttggacgatcgaacggcttgggctgtatgatgggagcagatcagggtgatcgttagtcggaacgcatcaaactcgtgttccttgcctgagcacaaataaacgactccatcatgggtatagattcgtgcacatacctagactctcgagtgcattcgctcgtagcacacatccatcgactctcaacgtctccaatccctgcctctgtcccactttcgtgccatcatctcggaaggactttgttcgatcgagttccctctgtttcaacaaagaaacctgcctggtctttttcggttcggcttctactctgacttgtccctcgacttcgtcagactcctgatcgtttgataccaaaatcaatccaggctcttccgtgatcgctagactctctcctcgaacatttgcctccaaatcttcggcctggtccggtcttttttgcttttcttttggacagactaatgcttcggccaatgcatcgacagattttttatcaaacgtgttgtcggagatatcaagatcccttagcgatagattttgtgcttgggtgaggtagacggcaatgatcttccagctcgtcgtttttagacgacgattcgatcggatagatagtgttggtagggattgtgagtgaaggagtgcgtgaagaatacttttcagggccttttgatgttcaatcagtttgttcgaaagaaaggaagaaacaaaggaaacttgcgtcagagaacgagtctgggaagtcttgacggatagaaagaaaagttttaacactcacgtcatcaaacagatcacaatcatcgagtacgagcttggaaagtccccattcaatggccaggacgtcggatagagcatctgccgtgaaacggggtaggtttacgcctgttaagtcgagtactctaggagtaggaggcatcacatcgcccacttcctattgattcaaggagaaagaacgatgagcgcacaaattcagtgtctgactcgttagtcacccaagcagatgtttatccaattccatcagcacacatactcctacgcataaagagggacacaccttgagcgctctccaaatacgttcgtcgacgccttcgtctcgcgccctacatgcccgctcgtacaagtccaacaacttgagagacgaccaatactgccagccttcttcctcctgaagttttgcgagatatttcgcttctacttcttctctcgactgtgcgacggattcagaatacgggggtaacgcggacaaaattgggtacacgactgatatcgaaggcagatggaacgaggctcgtttgaggaagacggaacgctccggttgaatcgagtcggaagatctagcgggaagcgtagacgagtctagagagtggtttgatgccgatgcagtgatttctgaagaagtagacgaggcagaagcagtattctgagcaaaatcggatgatgaggactgctgaacggatgttgattgaatgttgttgagcgtcatagtggctgccatgttgagcttctcaaacgctttggagaaaaacgcgccggctgctgttgtcgctacctgaggggttgctccgtccccgttcgactgatactgttgttgctgcgattggttatgctgaagttgcccactagtcctagtatcggccgcaccttgagaataaggtgtctcacccatcagtcttgctcccaagctccctacgagatctctaggctgtcggcttatgagtgaagcgaacactccttttggtgcttgtttcggtggcttgagaatacctctcatcggcggcggcggtctcctatgcggtggtggaaggacaggaggcgtggggatttgtgttgagggctgaaggatgatgcgagggccactcgcaggaacggaaccatcaaaggtcgatgaggttgacgatggggtacgcgacggtttgcatacagaatcggagacagaatcaaacgaggtcggcaactttggatctacgcgagacggagaagatgatgttgggaccaaggctggagtcggagctgatgaagcctcaacctgggtgccggtcgagctggcgtctgatggtgcgtccatctgtaggtcaaaggtcaaatcagaccaagagatatctgccggatgtatgttgatagacagaacgatcagatacaatctatgttgtccggcaaatcacttcaatcacaagaaagaggagcagagagaacaacaggagagaaaagcacgacacaagcgtgttgtcgtgttgagaaggacgactgatgcaaagaaggaggctagacgacgaagagagagactctggaagaagagtgccaccaaacgatcttatctcacacacacagagagaaagagagcacgatgctactaacaggctgggaacccaaagaggatttgtgtgtatggtgacgttgatcagaaggtgagagatgcaagcggaaagagaccagaggcaaacagaagagagatcgggccggggcccaaagagtccgttcaaaaaaacgtgttacgcgtaattgtctgctctcctttcttcttctgaggatgaacatgtcaagtttcgttgcgcttcaatctggtttacttgaatgcgcatagctcgtcacaatcgtatgataaccattttagccaaagttatgacgagcatctctgaaggcagggatatttgcggttacaacgcctcagtatagaaggtttctatcttgcgttgttgctggagctgaaaggaaacgaaagaagcagtcttggggtttccatatcataagcaagatctagaagaagtattgatcaatcttgctggatcgcaagtctagttttaacagaaggtacgggggatagagaattctatgaaacataaacgccgcatcaattctcaaagttgacggtcagtttctgcccaagcctagattgatgtctgacctcaagcttctccttctcctcgcgaactctttgaactgttgtcccagccctcttaacgcttcggctgattccaactcttccgcctttgttttccatcctgtacttttaatatcgcttccagctcactgagcgctttttgttcttcagccgtcgcggtctgtgaccctatcagatgtccaaaggtagtcccgtcgagaacgatacgagtatcggaagcagaagtggtaggaaggtcccggaagcgagattcatatggagaggctaatggtgagttagcaaacgatgttgaggttgaagatgacagattgggtcgcgtgcgggttgctgctgattcaggttcctcgtctgccacaaatccaggaagagggaagtcagacgagctggccgactggattcggtctctactcagagaacgtctatcctcatgtgactgaaatgaatgatcgtttgatgatatgagcggcggctgcttccttgaaggttttgatgatcgtttcgagcggaaagacggatttgaacggccatccatgtcatccggaggtaagcgtatatgctcataggccttttctgacctgttgcggtcaccatttctgaccttgtcttcgtttccgttgtgagtgagcttcatgccaaactgactacgaccgccattcttagaggatgcctgactggaagaggctgcccctgcaaattgagagaatctatccgggatacggtgcgacgagactggtgaccgaggtttaggggcttccgaagctcttgaggacggccgaggttgtgtatgattcttgtgtatatcaccgaaagtaatacggttcttcttatttggccgaggatagctcgatgcaagtgagctagctcttggctctctcaagtggtgttgttggttagaaggagcttctgctgcaggtgctttcgaaggtgccgaaggacgtgaagtcgaacgcgaggaaagggaggaagggcgttcatctatcccaaagagaggcctgaacgaaaagggagcagagtcatatttaggcaaggacgtatggaaagagacccttgacgtttgagtggctagctgccgaactgctgagcgtcctccaaagagtcgtgtatgcatcttgtctgatgagtccagaatttggtgctcttagcggttcaatttgggttgaaagttcaaggggactgtgctcttcgaaggcacgtgagctcgtaaccctaggagcaatacaattacataagcagattaatattacataattacctctgcacatccaaatgacgtaacagggcagagtctcggctttgctctgacgtgcgttgtcctgctgcgcgatgcacgtgtaggccagccaggcaaaaaaaggcacggtcggccactcagggcgttgtcggagatttccttctttccccacttttcactgctcttgtctcttcttttctcttctcttccttcttctcaccaacatctccttctctttttctttcagtcttcttgtctttattggtctctctcatctcctcgtctctcatacaacgtctcctttgtatccacgtacagcaatcttctcgttcggtacaggatctcttcccttatcccttctacccaaatccatctttcctcgcctcttctctctttcctcttgaatcagtcaacacatcatggaaccctctctcagttctattcaggagcctcctcaagggcccaacgtctctttggaagacatgcgagcccgggtcaagtctcttgaagatgatctcaagtcgaaagagttttctctaagtggtcggcttatccatgtttgcgtgagtggttgcatctcatcagtttttttttcctcagctcctatctcctttgcgtccctctctttttgtgttgtcgacccgaggctcttttcagactaggagagaactatttgttctatattgaggtagttttgggaatgatctgggttgatccggtttaggagaagaatctttctgacaagaaaaagcatcctcagtacgagtcctgaatacaaaccaactgtatcagatcaaagaactgagacagagatatcaaacttgtcctcttttcgactcgagtgcaatctgttcaatcatctttattgacgttgttcctttctcgtcatttatctcactctcgggatgcccgtcctctttctcagcactacctccctgtcgttcctgtcttatccgctactgccgaacccgaacccaaagaggagacccccgccccagttctcaccgctcctgctactcccgccgtcgaagtccctgcgacttccatccttgaggatctcgcaaaggcaactaactcgctcgccgcacaggcaagctcgaccgccgcatcggtcgcctctaagttgacggcctcggacgcctcatcatctgctctctcgtggacggtgacccctcgacgaggacacaccgcgatgaactctggaatccagtcactctctgagactcacaagcaggtggtcgtcggatggaccgggacgttggagagccagtcgaattcaaccgaaggagaaagccacgtcgagcaggagactagcgagaccgataagctcgctctggaggaaaagctaaagggcgagccgggagcacagttggtgcccgtctggttacctcccgtcgtcgccaaggagcactacgagggctactgcaagtcgagtacgtctctaatcgtctagttgtgccgttcactcggacccgtctcaattggcccatcttcttgtttcttatctagctctctggcctttgttccactacctgctgtggcaggatggtgagtcatacttccttccccttacatcacgcactttgtcactcattcaaccatttgatcaatccacagtcgcttctgagtatcccagagaggatcctagttttgcttcgtactacaaggctaacatggcctttgccgagaaggttgcttctatccacaagcctggagatttgatcatcgttcatgactgtcagtccagattcttgccccttctaaaactctgtggctgtttgcaagaccactgaacctacttctcgtttcacagaccatctcttgctcgctcccaagatgattcgagaactacttcccgaagccaacatcgccctcttcatccacgctcctttccccagttcagagatcttccgatccttgcccagtgagtctcttatcaatccacactctctgcttgtttgcgcttctgacaagtcatgttttcttcattctcagagcgaaaggagattctcgagggtatgctcggcgccaacttggtgtctttccaggtaagactttatttatgtagacgtcttcttcactcaacactgacatagctcttgacaacctatgcatatagacctactcctactctcgtcatttcatctcgacctgcatccgagtttgtggattcgagacgaccccagccggagtggaccacaacggcagcgttaccgctgtctccaactgtgctatcggtattgattgtgagcgggtgaccgctgaccggtaagtattccgaccggatgctgttatccgagttccagccgagccagcgcttaattatcgttcattattttccgctatcgacatacagaaaccgaccggaagttgcacccaaagttgaggcccttcgatccctatacagtgggaagaagatcattgtcggccgggagaagctagatgtgtcaaaaggagtgattgagaagctccaggcgtttgagaagctgttggagtgctacccagagtggagaggcaaggtcgtccttatccaagtcacccagccgtcgttgaccgaatcaaggaagcttgagcgacagctctccgagctcgtcagtcatatcaacggactttacggaagcttagactttactcccgttcatcactagtatgtctatttgattcccattctctatagtgtcgaagctgatgttatcactcttgtccttgtccttgtccttgcccctgtccttaccgcctcagccatcaaaccatcgaacgggacgagtactttgctcttctttctgttgccgatctccagctcataaccgccctccgagatggaatgaacaccacttcaatggagtacgcaatctgtcaggacaagacgaacaagtcgcctctcgtcatctccgagttcatgggtaccgcctcatcattcaactctgccttgttggtgaacccgcacgatgttttgggcgtcgctcgagcgatcaaccaggggcttgtcatgagcgaagaggagaaggttgagaggcacaaccagctgtatgaacaggtcgtcacccatacgagcgcccactgggcggctacgctggtcacccaattgttgtccaatatcggaggcgacaacaccgctcaccagacgccttacctagaaaaggtggacatgaaggcgaagtatgacaacgctaagaagagattgctgctctttgactacgatgtaagtgcccaacgaacatcgtctttggcgtgatccatctgcgttttcttcagaaatgtatgcttaccgctcttctctgattttctctctagggaacgctcaccccgatagtcaaggttccttcccaggcgaccccgacagagaagacgctcaaagttatcaaagaactctcaaatgatccccgaaacgtcgtctacctcatttctggccgagacggtgatttccttgaggagcactggggacacgtcggtttactcgggttgtcggctgaacacggatgtttcgtgcgacctccgggatcgaccgagtggaaggggctcacggatgcgttggacatgagctggatgtcagaggttaacgaaatcttcaagtactacactgaggttcgtgcccttactttcctctgttggttcgaagatctgcctttgcttactctgctttctcttggatcacttattatttcttgctaccagagaaccacaggaagtttcatcgagaagaagaaggcgtccatcacatggcactaccgatcaagtgatccggactttggatcgttccagtgcaagcagtgccacgatctgttggagagctcgcttgctactcgacggcccattgaagttttggtaggaaagaagaacctggaagttaggcctttagctattaacaagggagagatcgtcaagcagattgtgtacaaccatccagatgctgagttcatcttctgtgccggtgacgacaaggtatgcctttcttcttttctttgccttttgcttttgccacaaacatcatgctcatctctcttttgatacgatatcagaccgatgaggatatgttccgatccctccgaacgatcgcctctagctcctctactatggcaccgcccatcgcggtcacctcggcctgtactgcagaggaggcggccaagttcccagacgtcgagacccatattcaacccgagggcatcttctcgaccgccgtcggaccgagcgcgaagaagacactggctaggtggcacgttaccagtcctgaagaggttagtcttcctgtgttcggttgcttgtttagcttgggttgttctcgtactgattgtttaattctttgactactcaatatcaggttgtggacatgatggatttccttataaactaatctttggccgtgcttataatctcttctagttccttctagtatcatcatgatctgcttcttcgatgggttgtcttttctctctcgctaaagaatcctgtcctgcatgttagctagttgactgtgtatcgtcagatccaaggactctatctcttcttctcttttccttgtttattcatatattttgattgttttgtttctcctagtgtgccttgtactcgatgtagcccccgagcctatctcttttccttggtcttgtgtctaaatgtctttccttgtcgtaaattttgtttcccatttcggtctcttctctatctattgagtgtcatcggcttcgtaatcatttggatgtattcgaggttgtcatttgagagatccgtcgtaaaatacaatacataagaatcggctcactttgtttgagtcaatccagttcatagtactcgcctgaagatggagtattgcttcacagtctcctcaacttgcccatgaaaagatacatggttccaagtacaaggataaagacacgtaaagaagaatacgtggaacaagtccggccggaattcgacgtttcttacccatggcgcgtagttcgtcttgtcttcgtgagtaggttacaatagttttgtggccctttctgcccgcctccttcctctccaatcccccgcttcttcttcttttccattctgacccctttctctttctctttccccttcaagtctctacgttctccctttagaatcttgacaatttcttagaaagagtcgcactcgacactgtcattgttgcggctgatcctctccattcttcggctcgtttcgcatcggtttctctggagtataccagttcggatttataatcgaggctctcatccggtcgtttgactgctccacatcgccaaaaccagtttatttggtccttcctagtcttctttctgtttctcatccaacgatcctagacgtgacgatctcttggctgtcgttctctgcataaacttataactgatcaatcttttcatcatggctcccgtgagacaacgtcttttctttcgctgttatcttcttcttacatcttgatcgaagccatccagactctgactatcttttcaattggtatcgttcatgttatatgtcaacgggtggcaaccaacggttcataaccatctatagacacgatctcgacaggctctcttcccagtttatgtcgatcctgctccttcactgtccctttcgtcttgtaacatccccagtatagaacatagctctgttcgaacgtcgcctcagaaacggaaggcttcttcgaagtcggttccatcgttcaaagaaaaaccggtagacctcgtcgtcgttgcaggaaatggactgaaaaagagggatggaatgagcgacctggggaaggttgggaagaacggggagagggtcgtaaggagggaggtgctgagagatgtctctcaagagtggggtgttgttggttgcgagccggagggcttcaagaacgctgtacgtttgtgactcttcagttgtccgagaacatagacttgcgatcgcaacatgctcactcaaaacgattttgtcgtagtctgttatcaagaaaccgtttgatcccgtgaagcctggcaagcttcggatcttcgccgactctgcatcccttccttctagccggccatcagcatccatcaacaccaatgataccgtcaccgcgaccaatgctcaaccttctcgcaaaccgttctcagtttacacatcaccttcacgaacgacgtctgctatcacgcggcctaaggggcttggtcttggcgggccaggagccgctcgaggccttcgaagttgaatttagccggatctttcctcatttgcccgtttagaccactatgtaacagagagtgaatgtcttgctgaaagcttgacaagcttttttctttgttcatcgcatcaatttcttcctcttgtttttttcctttccacctcgcgactgtcttttcataaaaagaatccatccaatcatctttggccctgtaactgacccatcctgtcctatcctatcccttctcttctcaaaactgttcttctttctttcttctagatgtctaccgtcttgtgtttttgttttttcttccctatcgcagatatttcgtcggtccggctttgtttttcctatctacaagctgcgcacacagatctacgcgactcggagcgagcgggcgcgcatcttttgatttcttagtctttttcttgcgcagtagaagaaaatcagtcgcgtctttctttcgtacttcctactctttctctctgtactcgtccgagatctcggtttgttctgatcactctcgccttctccaggtcagttctatcttacccaatgtacatacccatgcttcgtgctctctttatgaaaatactctgttttcctcaacgcaagccgagcggaagtgagatcagatcgcatatatcagacacttacgtaatatatagtcactctaaacaattgtatatgaaatacttagacaaattcaaatttggtcatcgcagtaggtcatactcattctctccaactctctggcttcatcacattaagcccaatcagcgactatcaagagattatatcctctcctctccttcccatcgacatcatctaccagtatggatgaagagaaacgaaccgggaaagttcacttcttctgggatccgttgaagaccacccgcttcgtcgtcgccgctagaggcctcgtcaagctctacgactggcaatcatacgttcgtcctgatgagctgtatctagagcacttttcagagaacctgtagtttgctgatcatgatgcgctgtgtctaccccacttggactacagaaacgatctcctatcgaactcaactctcaaagcgagttgggatcgataacagtgagtcttccccaagattgatatctcaagtccatccgttccatgatctgaacacgactctcttattcagtccttagcttggtctccaaattcggtcgacccatttctagcagcagccacttcttccggatcagtcactctcctttcgtttcctccgattttctcttcctcggatctgaagccaacaccttccatggcctacctacaaccacctcgtcaatctcgaacgtgtacatccctcgctttctctacgcctcacccaggacaatctcacctcctcgctcaagggttcacgaaagctcgctcagatccttgtgtgctcatctgggatgtcacccaactagaacgatcccacctggcatccgctagagaagggtacgatgtggatgatctcaggcgtggatccgcgcaagagggaacgttcatccctctggactttccttcgttgtcttcgtctggaatgtatggtctagacaccgggctagaaaagatcaaaccttgtgtctctctcgttccctcagagacgattttggacctggcatggatgggaccgaacctgttggcagtgtccactcagcgtcaacatatccgactgtttgacatccgatctccttcatcgataggtgctaatccacaaccggttattcaatttggtggttctcaaggagccttcatcggtggttctcccagtatgagcagaaacgggcttgcgcctgccaatgccggcagaatgattgctaccggtctgtcggccgatccgttctctgaagaccgattagctgcgtatgacgaaggtccaccatccaacttgtccctcgccgggagcggagcttctttgcgggatggtatcaagtcaacccttacagccttcgggaccaccggtggacctgtgagagtgtgggacaagagagcaccaaagaacgaagtcatcaagctagatggacccggagggatgctcagaggcggggctctcggcgtcatgtgggacttggagaagccgggaaggttgattgtcaccgaaaaaggcggaggattggctatctttggtctcgtgtctcccaaacgacgcgacgaaacaagtgaactggcgcccgatgagcctgtcgagagtctcacagagttagtagtggaaggagaagctatgaagatacctccaatcaccaacgcatctacggtcactctggcctatcctgggctgacagttgcccacgaaaagcctcagagtcaaatcgctgttttcacgccctcacgtgggggagagatcatttggcccgtcatccctgagcgaagtccactacttttctccgaatcttcaactctcagtttcggaccaaagttgaccatcgttcagcctcctcctcatgtgtcaatcggaaaacacgctgcctcggctcgtcacaaccgtcgtatatcacattcttccgagtcggggatatccgaaaattctaccactccctactcgaataccgtcactctgcctgatcgatcgggattcaatcagatacatacttcagataatgagacatcggtgggctcggtcatcgaagaaaaagtaaagagtttcgatgtagacgaacgaggggctgctgttcatagactgttaatcagtgatccagcttatgttatgaaggccagagcagagaacggatatgggcttgatgacgtgagtcccttctattctcgaggttgatccacacacatgaccaagcttactcattcttgagatccttttgccatcaatgtattccagcttgatcgaaacgccactgttgcagagtcgatgaatcaagaaagcctggttgggttctggcgatgtttcaagatctggactcgcttcagttcagacgccaagataggcaattttgattttgcttttcaaggaactcaacagcttatcgaaggtttccccgaaacggttcccaatctcaacatcccctctaacctattcgaatcctctagtgcaatgtcttctcctcgactccgagctctcgcgcccactaagcgacgaggactgtctccctctccatcaaggacgcctatgcctagatcgcctcagtcgtacacaccaccaaaggcgttagagtatcagtacgcgatgaaacttttgaacgctcaacagagaaccgcagggttagcaggcgatgttgtgttgggtgtagctggccaaacgaagctcgagcaggagaggataggagcgctctctgcgttgggatgggcaatgtcagccgaccagcttgagcaacatgttcgacagtacgttccattccgtcatatggcttcggtccaatatcagaggaaaaaatcgaggtcgaaacgttgagcgcggctatttcctttcaattctaaaatatcctccaatgcagtcttatggatgaagaagaatatgagagagcagcgttctgtgctttgttcaccggttccgttcatcgaagtatagaagcccttcaagcatcttctagtacgtatctctatctgcttcgatcgaaatatcgcttatttaggttcttgtgcatttggctgaaactacatctcccgacagaccaagtatatttgacgatcgcattgactctccaagcgctgataagcgacgacaaacctcagccagccaagcacgctgcttcgttacggacgttccgtctgatcaacaaagttgattccccttatcttcgagctgtatggagattcggactgacgaatgactgggaggaagtgttcaacgaggatggagtaccacttgaggacacgctcgggcttgctttgatgtgggtgtcggatgggttgttgaagcagtatatccgagcaaaggcagctagctcgacggcttcgggtgacttgatagggcttctcttcaccggtcttcggaccaatcaaggactcactcttctccagcgatacgtcaatcgaacatccgatgtccaaacagcagctatcatcagcgctcatgtaccgaactttagtttcaaacgacaaaatccatctgttcgatggaaggacgcgtacgaacggtatcttctgcagtggaatttacttggacaccgggtggcatttaagataaagagtgcgaaacttgcaagggacagaggaggggttctgaatgtgcctccttctgtgtatatccgctgtaatttctgtaataagaatatcacagaggtcgagcaaccgaattcagcaggcggaggtggcccacgaccgaatttggtatgtatccccaaatcacaatctagcccatttggatacctccttccaaaaaatactgacagaagctggtttcattaatcttggtacgttgggggttgcttgggtaaatccaaaggcaagactatgcccgtcgtgccaaaatgtgctgccaaaatgttcaatctgtttcctgactattcaaacatcaaatgttcaaagggaaaaccacatcttggatccattcagagatttgcgtaagtgttcctctcaccatatcttctctctttgagcggttcatcccattaaatctgttgtgtattcacatctctttgtatagactcattcgagacggatggagctggtatgtgtcctttcgatttctgattgtccatttgatctacttttactaatctggtttatcttgatcgatcggataacttcagcttactgtcagagatgtcgacatggaggttcgtggtctttttacatgaatatttgtctaacccgatgaggaagagatgtcctgacaactgacatccgtcttgatcacccttttacgtatatacatatatcacaggtcatcaagcgcatatctttcagtggttcttcggtgcccgccatgacatcagctatccccgatctagacaggcctccgccgtgcgttcatctcgttcgagaagcgcttccagagatatcggtcgagatgatgttcgaggcagactcactcaaaacggtgaggtttatgacggcgagaaagacggagcagaaggtgatgatgaggaaggagaattcttggagcaaggcaattcagtttgtccggtcgttgggtgtgattgtagatgtatggattgatggtcgaaccctctcctctacatccatattcatggtttagaaaagttcatctctcctagaaacgagttccaaatctaagcttctggcagaaagacggaggaggacatggaaagaatgaaatggagatctcacaagaccatcagaagagcgcaagaaaacgcggtcacccgttcagagtctacaggtctcctctcgaaacgaatcaatgacaggctgaacgtcagctaatgtccagctggatatgtctgtcatcctgatggcggctttgatagatggctcatcagctacatcacatagcggggtcacacccatcctattgacatgaaaagaattgaaatgagacaaatgagaagaagaacaacgtcatcacccgaggagatggatcaagctcaaaagtggaggaagacgaagaacccaccaagtgcaaactccatacatagcctgttttggtgtcattacttttgctttagctagcgagagtattggatccgatcgagaaaaaaccgcatctaaatccatcgacgtctcccagatggtcttgagcgcgctcccttgaaagttacttgaaccgaaaggagattggatgatatcaatctgtgctccatgagagagtagccagtctattctatgtttcgaatagatggtcctgatgccgatctttgataagatctttcctattcgtattcaaaaatcgggcggatgatgagaactatacatcagtacatatcaattctgatgaacgactaaaccattggcatatacagaccctcttgaacaagttgttttagaactaaaagcgcgctcaatgtttcttcaggagttttcagctcttgagcaagtagataagagtctggaggtcctcctagatgctgagtgcttttttcgagagaatatcgtatacgttgttcgattgtttgctcagccaaagctggatcttctgcctcaaggtcaaatctatctcgagtgatcccaagataaaagaaggaaaaagaagaggctgtatgagttctataggttaaagagactgtccgtaaagatcgagaatactcaaaactcgctttgtttgcacgaaaaggtcatctctccaataattccagtcccgcttcaagaaatccaaagcttcgcccacaagatcctccctagagatagacacggatggtgagagcacgtatcagattctgtgttatgtagagctatcatagtgagtaccaacagagctcgaaccgatagtattctgattgggccgacacgtcgatccctgcgaacccggccaggatggccttcacgatcaagactgtggtcttttggcctttgctgatggatgcccgccatatgtaaaaaaaaagaaaaagaaaaaaggactgggttcagatcaagttcggataaagtgcaattaactgagacacaagacacgtactgagcagtatcaaacaggatacctggagcattgaaagacgataaagacatcagatgtacgagagatgatggaggaaccggacgaaactctccagcggctttcggcccggatatatccttgccgcatcgatcacgtgccgtatgtgttgcatagctttatacggccatacttttttaatcctacaccgaacgatcagcttggtatcattacgttcgtctacctatcaacttgaactcgtccggaaggaaagatcgtatatagagtcgtgttggacccatcgatatatcagctgtaacaaggtgagtctgttttgttggacaggcttgtcaactagtgacatttggattgagtgggcttctttcttaattctgtaaattctctgatcgtctttctccagagctctccttacccttccccgatcttcatcgaccatgaccttctactctcgcgtcctttgcatcacggcccggatgccccgacccatgccttctctactctttggtcctcttcgacagacagctcatctcaagttctcctccaaagcaacttcatctgcctctgagattccctcaaaagagcccggtgaaaccaacgaaaacgttcatcattctgccccgatacctggatgggaagacctgaaatcagctcctattcttactggacatgacatcagcaaagtccagttaaaaccctctgggagccattacgaacagctcgagaagaagagaacatccaagaataagcttcggcgacaacaaaggcgattaaaagctgtacagctggaggagcaacagctctccgccctaccttcggcgatttcgacaatcccttttgtccaaagcgacgtcgcttctagccaagagaaagaaccgaagaccgcagaagattggtctttcttgagcggtggggacaccaggccgataaaggatacggctaaggaaccaaaagatcaaccgactgactcggaggcattatcaaaagagccttggagggctcaaaaggcgcaaatgaacaaggtcaaaaaatcctcgggcatctcgacctggagtcctgtgaatcggatcactcacgaagagcaacacagactgaaaaagcttcgagcggacgacccagacaaatggaacatccaagccttatcgaaagagttcaagatcagcccagaggcgatcatccgaataatcaagtctcggtatcgatctaccgacctgagaccctccagattggccaaggcactacaggaggaagaaaccatcgacgccgatgaatgggctaggcttagcgaagaagagaaagaaattcttcagatgatcgaacagtccgatgagtctagccttgccagaaaaggcgatgaagagcctctggacgagaacgacccgttcggtgatcttgaaacagtcgattttgacacggtcgaggatgaaccgaagactattgaacgcaaatgggaggaacgatacgaaaaaattgctgatttccgtcaacgaaacaaagagtttgaggaggagcgtgcaaagatcaggagtgatctttggggatggcagcctctcaaagcaaacaggaagagaagcccgagaagagttcaggttgagaagcctgttgaggtagaggccgaggcggcagaaccggaggactcggtcgaagaaaactcagatcctacttctgccaagtcgacgtttaactgggttcttgcgctgcaaaacaagaagaagacaccctgagaagagggttgtacatgttgttcttgcggatatatgttatgttcttctatttacagtcaaagttactcagagcgcgtcaaatatttgttctccctcttcaactataagatacttgtcactctttagtttcaaaactttcaagagcgacagtctagaactacaaagcaagagaaagaacggccggagcttaaggagtcatgagtactctccgtgcttggtgattctcgagtgttttattctgtatggatttattgtcggtaatattttctcacgcgttttctttttacctgctcattttcagtcgtgtccaaaccaacttcaggagtactcttctctgtctttcaccatcatcaccacagccatgtcagacgaaacggcgctctcggatcagattcaggcagtctctcttcaggtaggtctcctctgatcccttgttttttttttgtttttcaattcatctagttttcttgctcacgccttctgaaccgtactggtctaaccggagcagaaagagaagacgcctcttcaagctttcatgtaagaacatcaagaactctacccagagatgttcagtccttgagagaaatgttggtttatgctgaaccctctttttatgtatctgttatccagctcttttccctcgccatacacccaaacgttgatcctgacctcgctagcgtcaaacctgacccacctcaacattcttccttccctaccgacgaccccggcatatcctcttctctgttgggcggactacgacgttcttccccacgagctcatccagtcaacatcggcctcggctgaacctctgctcctctcttcatcatacatctaccgaaagtctctcatcaggaagcattacctccattcatccatccaggagtacttggggaagtatgatcattgggtctcattgggtaaggtcaagggtgacactccgttgagagcagcaacgcctagagggtggaggatggaattgcaatttgcggacgaactggacgagctatttgcggatgacctgtacgacctactagagttgatggaccagggcgagaatagacaagcaagcggggagggagagagaaactggttcattctgaaacctggaatgagtgatagaggaatggggatcaggatattcagtacgcgagccgagttagaagaaatcttcgaagagatggaggatgacagcgatgatgaggatgaagacgaaggcgaggacggggacgaggacaacgaagaaaatgaaggagggaaagtagcgacgagccagcttcgtcatttcgtcatccaggaataccttcccaaccctgtccttctcacccctctcccagctgctacgaccgatctacctctcgcgcctgcaaaccgaaagtttcacctccggacgtacgtcctcctcagctcggcctacaccgtacacctctcccgaactacgctcgccttattctcctctctaccgtactctcctccggaaacgactgaggaatccttgttgcctcacctaacgaacacgtgcctacagcctcctcagagcccaggcgaagtcaatgaggaaaacgttcatttatggtgggagttggaaggcagacagtttgatgaaggaaagtcagttttgacgaaagagttgttggattttacttgggagagatgtggagaagttgctggtgaagctatcagagctgcagtagaatgcgggagcgtacacatgcaattgttgcccaactgtttcgaggtgagtcttcctgtcctcttgtattctctcgcacacctaattcgatcggttggttgtgcctcatatcctgaataatctctctttttgttctttcaaagatctttggtgtcgacttccttctcactctaccgtcaagttcatctcctagcacggaccttcctcaagttcacatcctcgaattcaatgcatcacctgactttcatcagtctggtgagcgactgcaatccaaaatcagagagatgttcgacggtgtcgtcgacggcttcgtcaagcctttcttcggcatcgacgatgatagcgatgacgaagaaaatgaggacaaggagagcagtgccgaaattaaatgggacgggcagtgggaacaagggatggaacgcgccggctggaaatgtttcaccaagggagagatccggagaggatggtgaaaacgatgaatgcttttcaactgaaacatagaaactccggtgattcgtgtcctttacagacgaacatgagattgagaacaatcctatatgtttctctttcgttttaaaaaaaactaacatgctcccttcctatcctctgacctcttacgatcggaccaacccactcaaaaactcgtcccaaactttcctagcaaatatcttatccaggtccccggtctcatcttgcgccatttgaagactgtcgaaactgtgttcgagatgtttgcccttggtcgtatcgaagggcgattcttcatctgtgacgatccaaagtttgtgcgctaacgatgactcgccaggcgcggactgagggcgttgacgctgatgatgctgaaccagagaatcgtataccgcagtggattgggtatagtggttgtaagaatccgactagtttgatcagcagccaaaaagaatagagttgggctcaggcttgtgtctctagaccagaccatagaaagatgatgacaggacgaacttcagagtgaatcaagaacgtcggaggaaagtcttcgtctgggcctaactgattgatcagccaaggcacgctccatcgttctctaatttcttggacattcgttgtgccatacactttggggtacagaagacctgtaacccattcatgatcttcgatgtcagtgcgcggggttgaagagagagaagaagggaacgaaagaaagtgggtataccttcttgcgcgagatagaacatagcagctcctctatttttgtaagctgcacaagcatagcgaagcgatgtcagccattaggcgtagataaatctcacgcatacatatcaaatcgatggacaaacatacaacaagtctctagatcaatgtcatcttcctgagaggcactgacgaccgggccatgttcatcgagcgattcttcaacctcgtcaagctcgatcaactgtgttctacctcttgggggatttggaaacgtttttgcgtccactccctcgactgtcttaaggaggaacgagcagaatcaaaggggaagcattagtatctctgcacattacatcagatagtaaggataggtttttaccggatcggcaagcgcatagagcgagatgatggccaaaggtttgggctccaagtatgagcctgcgagtaaagcgagatgaccaccagcggaaccgccggcgacgatgagtttggaggtatagacggcgatgtgggggatcaaggatggcagtgtatctctagcccatcgacaggcgtccgcgatatcctatttcaccacgcgatttcacgagaaaggcatcaagtatgagtccgaactgggaaagaacatgttgagcggaatttgaagaacacggataaacagacctgatatatgccatcaatctttgtttgtggtgctaaacgatggtcaagattaacgaccacgtagcctcgttttgtaccggactgccaccaatggggtcctgcagtgatcgaatagcagtttgttcaacaacggagctgaagcaggaaggtgaatcatcagaagacgaaccggcggttgaacgtgagaagcacatgaaccctgacattctatccaacaacaagtcgaatgcatttgaaatgtatgatggcatcagcccatgtggtctgacgtaaaacatagaggaagagaatgagagcaaagactagagaaacacaccggatgaagagcaagatgggagcaccatttgggaacagtgtagcctggtcttcagatggcacgtagacgtcgcagccgatggaatgtccagagggatccaccttgtagatgaacgtgctgggaggtgggatagccatgtggtcaaagcagatggttctatgtgtgttggatgacggtgattgaatgtgttctatctgttctatctgttcaccatgtgctttgtcttcctcttttcctccgaaacagaagagaatgagaatcattcgaaaccgattctcatctcattccatcaccctcaaccctttcctaattatcaatcacaaagcatcaccatcacttgcattcatcattgagctacatgtccaaggctgagaccgtcgtcaatccttaccttgctgatccagccccgccagtagtgagtatcatcgtctccacccatcgggctcgtccgatgtgccgtctctttcctctttcttttcttcaccatctcgtcccgctgactatctcactcgcttctcttcgcaaactcattcagtgcgggttggaaatcacctcggcgttcaacaatttgaccaaaaaagaacagctgtactcccattggcagtctaaagcaggatgggaaggagctaggatcatcatggtgagaaattcactcctagtattctttcttcaacgcacgatcatggggagttgactgtttgtcgctgcactgttctctctctaggctcaaatgtcgcatgatgtgaaagacatcatcgatcttctcctctatatactttccaaacctaacccgaaggctggtcggcagggcgagccagacaacatcttggtcgatcttccaaatgtcttcaaacaggccggcttcaacgaggaggaacagcagcagttcctttcgtatgcctcccaggtacgaccttccttcctttcctctcctttccttcctttttcatcttgttcgtctacgtatcagtttcgttgaccgggttatccttgatcgatcttgaccgtgtcattcataggtatttggaaacttgggcaacttcaagtcatttggtcacactcagttcatccctcggcttacacaggaaaaggtatcacccagtcgatcagtctccaagcgatgtataagatatgctgactttatatctccctctttctgctttcatcagtttgctcggatcgttgccacagctatccatcacaaagcttcgcctctctgggagaaggtgtgttcggcgtattctgctctcttctactacctcagtgcgctcactatgctcactctaaactactcatagataaaagttgcgatctactcgatcaagcgcaagtctcagttaacaatcggaaaaccctcatctggccacacgtccggctattaccttcctcggaagacaacctacgacgataccgattcagactaccttcagaccgtgctcgagaagcatgagatcagtcaactcaacactcgggtcgagaagacagaggacggcaaactcatcgtctggatcgcctctgtagaggaagaggaaagagaaattgaggatggcaaggttatcatcaagaaaggagacttcaagcgagaaatggaagccatctcccttgctcttgaacaggttcgacccaaatctttgtgaatcaattgcgatcaacgtctaaacttttttatttatttttcaaaggcgaagaaatatgcggcgaacgacgcccagaaaggctttattgacgactatgtcaaatctttccgtacgggattgattgaagaccatgtgaaaggaagcgagaaatgggttaaggacattggacccgtcgtacgtctaactctttttgtttcctatcaagcatcatatgcgctttaactaatggatgagttcaaaaaaggttgagacctatataggcttcgtcgaaacttgtgcgtcatagtcttccgctctacatctgagcaacagacaacttccattctgacgcctttctcacgaatatgatcacgatcagatgtggacccatatggcggccgagctgaatgggaagccttcactgccatcgtcgacaaagaactttctgctaaatacgccaccctggtcgactcagccccagagctgatcaaggctctcccctggggaacagaatacgaaggtgtgttctttgttggctcttactcgattcggttgtccagtctgaaaccggttctaatttatgccctgtatagtcgacaactttatcaagccagattttacgtccctccagattgtttcttttgctacaggtggaattcctgctggttagtaaaaactatttcgttcgccaagaatgataagacgaaagacgtcgctgactgtgtatgaatttgttttgtgggcaggaatcaacatcccaaactacttttcagtcagagacaaggtcggattcaagaatgtttcgcttggtaacatagtaagtgacctttaacatcaagttggctcttcgttttccctcttgttgatattgcgctaacgatcaatcgtttagtcggcggccaaggatccgaacgagaaactaacgttcctgactgaggacgatgtggttctttacaaagaatttgaatcacaagcctgggaactccaggtcggtattttaatcacataagtttacctcttctgctggctcgtccttcaccccctcccaaagaagacacatcctgactcttgaattgcgatgcccgttgattgtttctgatcacaggttgctcttcacgaactccttggtcacggttccggcaagctcttccaggagtccccggacgggactgtgaacttcgaccgggctacgatcaacccgcttacgggcaagccggtcgagagctggtacaagcctggacagacaccggatagtgtgcttgggacatgtagcagttcttatgaggaatgccgagctgaggcggtcgcactgtacttggcgacaaacgaggatatcttgaagctgttcaaagtaagtcactttcctttgcccttgagccatttgtagcgatccgatgcttacaatgtgtgggcgatttgtagtacaccgacaagaaatctcaagaaggtgtgctgttcacgatgtacctcatgatggtccgagcgggtctccgagcgctcgagttcttcaatccagagttgaagaagcacggccaggctcatatgcaggtttgtctcgactttttctatctcagagagcgcgtgagcccgtcgatgttaatgagtatgtgctgttttgcggtttcctcaaggcccgaattggtatcaccaacgtcttgatccaggatgggattgtctcacttattgagactcgaaatgaggacggaaagctgacggacgccaccatcaaagtatgctctcttttgtcattcattgttttattatcttaattcgcctttagggagagctggatgatcctgaactttagtctcgttttctctgcaacgtatattgtagctaaatagggagaaggtgttgaaggaaggatcgaactcgatgggtaggttgttggttgagctgcaggtcaggaaatgtacagccgacggtaaaggtgcccggtccttctatggttcgtctcgtccttccctttgtcgctcttctttcattcaaagaagaggaaaggaaaatctgtcaaacatgtagagggcgctaaaccggtattgcgacgtttgaacgggatagaacaattgacgacaccaatcgagaattgggatggagaacttcgcgatctagtgatctccaagaaagcagtgagtctccatttttctcctttccttttcgagtccttctcgatccgttccactttgtctaacacaggtatatattcttgttctctactttcaaaaagccacgaaagctgttctgtcagccaaacacgtttatcgtcgatggagaagtcatcttgaaggaatacccgttgacgctcgagggtctcatcgagtccactatcgagcgagggatctaagaaagggggatgggtcgagtgagactgttttgtgtttccgtattctctggtcttgtgtcctttgtctcctcctttctttccactcggattcttgtatacgacaaagatatgggcacgatgaataatgattgtgttatgatacatgctagggcatacccgtttgcaggtcttggctcgcgaagtaaaagaatgaaagaaaaatcaattgaaacaagaagagagagacagagagagatcaatcatgcagatcaagcgcgagtcgaacggccattccgcccaggacccagatacctagcccgatggtcagtcctgccagacttgattttatctttttcttgagtttccttctccttcttcctttgtgtgagataacactgctcctgctgttgctcggtgttcttgtgctactgttatcagccctctgagttcccctcgacaagagcttgtagtcatcgtcctgttcttcttcatcttcttcttcgacttccgctccatcatcctcatcgcctgaaatatcttgttcatattgttctgcattgtgagccggggtgatgggctcacttgcctcgcgctcaccaccaggtaagccccagtcaagtaacgcgtccaagaagaatccgccatccaacagacttagaggcaagagattgaagatcgagagcgtggtcgagatgacggtaaagtatttaaagaggagggcgattgatcggatttgagggtagagtgatagggggattagagaagggggaatggtaggtgatgtctcgactgaggaagagaggatggatacagaagaatacaaagaaagcacaaaagtaaaggttatcggacgacatccggtcaggagcaggagcgtaagacagaagagagaaacgaactctgggaatagattgattcactcggaccctgccaaacgatagattcctcgacgtcagcccaccgtttgtttgttccgctcggggaacgatccgaccgagggctgagaaaggtgatccgaacaatctctcctttggactcatctggctcaatacagatctcccctgaagcgagacatgggcacctctgtggcgtccttccggtagagtctacctgagtggagggaagcatgattgagggaggtagacatcgacctgatgaggacgtggaggcggaagggttgaagcatatcgtcaaatcagaggatggggtactcgctggtttgcaacacaagtcgttttgcgctgagcgtgatatcctccagaacgctcgtcagcaaacaaaaaataaactaaggtgaatgagaagaagagaaaagacgctcaccaagaaaccaagcttcagacacacaccagccggacgtaagaccgggaatgtctgtatgtctgtcgacaaacatgtctgaccagagcttgtcggattttcccagactggtcgccccgagcggactgtcgtcgagatgggtgatgattgagcccaccgggatagcctgtgcgagagctgagccaggttgaaaaccaaggacggctcttccgatatggctgacgggtatcaacgcttgatttgcgagcagggtaagagcaccgaggacgatgacggagagaaagttgtgccagcatccggcagccgctatccgcgctcgttctctgggtggtgtcagagcgagctcgatcgagggcaaagtgactgaggccgagggaaagatgggagagagttgaactgtcatcagcagagggttgattgacgatctagggcaggacgatgacgggcaggatgacgagcaaggagacaggaaacaaggcgataaacagatcaacagaggaagcgaaaatgtagaatcaaggcagagggaggaagaaagctaacaaggcggcagagatagcatgaccaggttcatggactagttgggcgagtaggaaggatagtataaggtataatgcctgagagaagggaatggtaattcctgggatctggaagaagggcaagaggaaagaaaggaaagaaaggaaagagagcaagacagaggacaaaggatcagaacagagacgacaaggacgaaagaaatatacagagacactcactaaaggttttataaagccagagtcggctgttgtctcgaccggggtcgctcttttgacgagcgaggcaatcccggaggtggtagtagtggtggtcatggcgacggtactgccagtgggactgccggtggccgatacaaatgcccagagggatgtaccaacagtccaagcttgccccacgagcagactcagggaaagaacgagaccgatgacggcccaaatgatgcctaggtcatagaacagacctgcacgagaacgagtattgggtcgaaccgattgaaagagcgcggctggcagctgattgaatgcagtggtggatagagcgatgcctatcggatttgagtataaatgccatgagtgagaggagaacgagcgatatttggtgggacgtagcagatggtatccagcccaagctatggagagtacgatgaacgagaccggcaggacgaacgactcttgttgcatcggtgcatattggggaggaagggatggaaaggagagggtaaatgaggattagtgaaggtgagtaacgaagaagattagattgctgtgctaaacacgtgagggatactcggcatcacgtgatcatcaatgccaaaaactgtcagggatgttacctgagttacgctgaattgataagccatgacacgtagacctccacctttacttccactactcctcccgctcctactcccagcgcatagaccaacttccagcgcattatattgccaacgcatcttttcatgatgttcatagggtctgacaaccatatataagccaagcttctcgaccacttgtagatagaaaccctagtcttggatcctttgttcattctactcctctccttgtccttgtccttgtccttgtccttgtccttgtccttgtccttgtccttgtccttgtccttgtccttgtccttgtccttgtc

SEQ ID NO: 287 - DNA, 62069 bp, Xanthophyllomyces dendrorhous
  misc_feature (43183)..(43192): n is a, c, g, or t
tccttgtccttgtccttgtccttgtccttgtccttgtccttgtctccttgtccttgtccttgtccttgtccttgtctccttgtccttgtccttgtccttgtctccttgtcctcatcctagtgatcctatcaatcctgtttcccagtctcaagagcttgaatttccccctgaagcctaagaatattgtgtggttactgctttgtaacctttcgttaccaacccagctcccgtccttaacaaatactgtcaggaatgtgacccgaggttacaccctggaaaccttcccttacttctagttctcctgcctcgttattccttatgctttttcattgcatcaacaggcaggtatatagtctgttagcgcatgtgcttctagcaccttctatgatccgttctcttatgcttaatcgttggagtctgaggacgatatataagacgtggttcctttgccaccgaaagtatagtttctcaagccaaaattctttgtcatttctttgtcatccctttgtcactcctgggttccctagtactcttgttcccagtgttatacaaatcttgttcttccaaatctcttcgccttgtgccctcgtcacagtgactaagccagagagcctgaacttcctccctgttagccacatttccgtctggttacacctccgtaacctctccatcgccctctgaacgcggattctgacaaatactcggttcgtatagacttgtagaccgcgctttcggcatgatgtcatagccaggtgtagataagcactgaggataaagttctataaatagatactgcgtatgactgcgtctgggtacgcgttggtgttatctgccgatctgacagtctgtcggagggacgaacagatggggataggaagcaaactattgggggacacaaacaagacacggtccaaacaaaatagacaaaacaaacaaaaacaaacgcaacagaccacggccgtgacgttgccggtgaggaacaggcagctgtctgaccagcaacctgtttttcaggggtacaaccaaaataaagccgaccggaccgaaagcgcgcgagaaattctgctcgatttttctgcaccttccattccgacatgactcgtctcttcggttttctttggtcttgtcgctgtcttgactgtgggcgccatacggtaaacctgctgagctggttgagccgaccgagccgacggagctaactggactgactgagacgtccaaaatgactattggcctttcctcccgccggcaggtcagcgcgaccacgacagcgacagcgctgaggccggcactgagaccgagatgaccggcgttggccgctgtcgtgcctttcgtccccttttggtcctcactgccctgacttgtattctctagccccggcctccgctctggctcttggtctgtggccgctacgctcgctccgactttttcttgcgctagctgtttatttcccgcttgactcttttactttagaaaattcatttttattctctattttttgctttcctcttcttttctctccgtctcctcttctagacaactcactgacctataccaccactgaccaacacatccacaccatgttagacctcaacggagatcagatcttcccgcccatcacccagaagcaagaaacgcaacagttcgagtccgcgctagagtcctacgccgtaggattttctaacccagacccagagaacccgcaggactggccaaagctcaaaagatggagaggtcggtctgggtttctttgcttcctttgccttgttgttgcctagcacatcgtttacggttcttctacacacgcacgcacattcgctgacagttcggttttattcattgggttctaattgatcaacagtcctttgcgtcgctctgtttgtaacgtacgtacgctcattcgatcctttcccttcatttccttcatccatctaggccccacattttctccctcagccaaaggctcaccgttttaaaccattcatatatcctgttcacagttacacctctgcctgttagtatcatcaatgactctgtcaatctcccaagaattgtcctagagcaacctattcattgtcatggtcttttccgtcgtgaccgcgtcctcacagtcaatgcaacggtcagtttttttctttgctatctcaaagtcttttcgtttccttccaacgcactgcagtacatttactccactacaatacatacactccactacaatatattcactgccatacaatgcactcatgacccaccatgctgacattctttcctctttccctcatttcaggccaacggagccgccagcgccggctttaggaaagagcaccccggtgtcacgaaggccgtgttcacctcgtccagtttcacctatcttgtcatgcttggtatcggtcctctgtatgttcttgcactcgttcggtcgtcgagatccttcaagccgtccatctcctgaccgactcgaggttctctatccttctttttttcctcctcttcctcccgccggctttctatcctcccgctcgcctcttcccctatagtgccctagctccaatttctgagacgttcggccgacgacccatgctcgtcatcctcaccggcgtcatttgcatcctcttcttaccccaggcacttgcccccaacgtcgcctccatcatcgccaccaggttcttccagggtctcgcagcctgtatcgaagggcccgtcgcagccggtgtcgtcgccgatcttttccctaaaaacatccgaggaccagccatggggacattcgtcctcaccgttttcactggtgagtttccaaaaagtcatttgattttgcttcaactttccaagctgatattttcttgtccctctttgccttccagctaactctaccggcccgttgtgcgcggcttggatcgcgcaaaagctgggctggcactgggtgtattggattcaaatgatgtccggtggcctctgctgggctctctgcctgtttttccttccagaaacccgtggagatgtcatcctgaccaaacgggcaaaagccataagcaagcagaccgggaaagaacactttgtctttggactggacgtacacgacagcttcgcccatgctatcaaaatttccctttctagaccgctgctatacttgtttaccgagcccatcgtcaccgcactctccctctgggtcggttttgcgtaggttttctcaacttgctttctctcttttctactcttttcccagcgctcaccgttctctcctctcctttccttttccctctagctggggagcagtcttcctcctggtcggtacaatctccaacgtcttccaggtcacctacggcttctcccaaggtcaggcaggcacagtcttgatctgcggctttattggtgcttccatcggctggtttgaaaactattacatccaggagcgattctgtacgttctctttctcttgcttcgctttacattcttctgtctttccttctctttcttgcctttttcttcatgctcttctcacaccgaacacaaatacttttatccttttttaatcccagatcgaaacgcaatcaagaaaggcaacggtctggctgctccggaggtcagactttactctagcgccgtcggagggattctattcgctgtcggctgtttctgcttgtgagtccttgatctttcaccttggttcattcttctcatcgaccaagactgattgatctctcggcgcgctcgctcgcacgcacaaacacttacagtggctggacggcgagaccgtggattcactggattgtgccctgcatctttatcgtcatcctcaacgccgggatctacactatctatctcgctacgtacaactatctcggagacgtctacaatcggtactcctcctcagcacaggcttcccagtcgctcttaagaaatatcctcggcgccgtctttcccttctttgccttgcccatgtataacaagttgaccttcccttgggcctccaccgtcgtcggctttatcgctctttccttttctgtcgttccctggatcctgatcttcttcggcgctcgactcagagccaggtcaaagattgccgtcgatctagccaacttggagggaacaatcatccctgacgaaccgtctgcgatctctgtcacccaggagaagacccatgtttagttgcacatacctttctctccttctcttctctccctttcctcctgttctatttatccctctcccttttcccccacttgtcatctcttgttatcttttggttgcttcttcgtctcgctcgctatcagagaattagttaccacacctagttgaacctctcgttcatccgagcctaatctttcttttctcaaaaacctagaagtctgaatggcattttgccttcagatctgcacttgcaccagaactagacggcctcctcaaatgtagaaccggaccatccatcttcaggtcggttctggtttcatcgtagatctctcactacatggatccttagaattcctagaactcctagaactttttagactgtcagacgcgatcacctgtgttgacatcattctggtattcttgattactttttttctttttctttttctcctttctcaaaacctaattgaacctcttttctctttctgtcaatctggtttatccagccatctttctttctcgtctttttttctgtcttccttttcctcttccccttcctcatctctccttcctgtcgtgttcgcctgcctgttgctactctattagggtgtatgtctctctgtgtgtgtctgtgtgcgtgcgtgtgtatgtgtatgggagtgaggcgtgtagaagagcattgttagcaagagatgaatgaaacgttgtatttcttgtctttccgactcgtcttctaccatctcttctgttcatcgtcctggtccccactcttcgtttgattactcgccaagcttgacgataagccgaccgccttcgatccctttgtccgcaaaacctctgccagctggtctgttgcctttatcttcgtcctcccctggagcaagacagacgatgaaacctgcttcgctcgaacagtcgaatccttctatactcaattgttccaattccgagtttgacgagtcggctgtacccgtcggaggagtagtagaagaggaggaggtccggaaagcaaacgtatgactcgtcagagggcttccttccatgttttgatttggatcttggttctggtatttgatctgatcgttcagattcggtcgatgcacgaactggacatgttatcaacacatgaatgaagggggtttaccgtttgacaaatcagtacttcaggcttcgaaccttatgaacagtacactcgtgtagaacggaagcaagggaaaagggagatctacacagagaagaagaagtgaaatccatacggaacgcaaacaaattgaaagctcaccatgaaccgttctccgatttgaaggctatcctctcgttcaatcgccatcccgcctcgggccggatccccactgagtatcctgacgaccctgttgacgtgccccatggaaccctgatcttcggtcgtagatacgccctcgcgcccccggggacggatgagaccgagaaagaattctttttctttgctacccagatacgacttgtggtcgaaccctgcggaggacgactcttgaagaagcatgatcaaatgtttcgtcgggttggcgatggtgtcctcagggtccgatgcgcatcggctgatggacaatagaaggttgccttgagaactattcaagagaaatgttcaaacttgttagcacagcgagtgagacatgagtcccggaggaaacacaggaaaagttaagatacgaagagaaattgggtacgaacgaaacgacttcgtatacctgcgcctcgaccggttccatgccctcccatccgatatccatcctcactccctccccctgcttttccttaatgtctccttccgagatgatcgccaggccaactgcgccttggtcgtacgtctggttcatgaaatagagtgtgtacggacggccggtcgtgaatggcgtttggggcagaactagccctgctttgcaagatattgagggaaggagatcgaacgtcgggctcaatgatgtcggtgtggaaaacaaaaatgtcatcccgatctgggctgggcttgagagttgatacaaatccatcagcaaaacctagttcagaaccgaaacacagcaagtcatctcgatcgaaaagcaaaggaaaggactcaactcgaccgattccaagccttctaaatcaacgacctgtccgtcgacttgtcccccgacattactctttttccattcttcccaaacatcagaccagtcccctcctttgaccgctctctccaacacgttcccctctcccttatctccgccttcttgtatgttgctcgatgtttctcctatgggtctccatctccctacagacgctggatccttccctttctcagccgatcgaaagagccggtacgtcgtccggtccgtgtcccaaaaatgagcgatcgagatcgtatctgtcctcctcggccgatcctcaaaggatgaagccagacagccaatcgagttcggaaacttttcatgaatcaaaggaatcagagtatgtaaggatgttgactcttggggtaacgtgtagatcgtggccgacggagcggccgatgggctgatgatggaccgaggaggggttggaggcgtgtacgtcctcaagaacgcagaaagatctgatgagatgacggtgtgggcaaacgagtactttcgtctggacaggccagccgttgtaggtgaatgaatcctctgtcgaatgctcatctcttcaaatttagtcggttgatgaagaacagagctggcaggatgggagattcgaaagagatcgtgtgagagatatctcgatgatgtcacgtgactgataagattgagcctgatagtttcataacgtttacgtttcccctccccggtttccagacaaatctctcttccatacacaaaatgatgatacaacaaactcagaagtaggaatatgatattacaacgaaacgaatcagattctcatcacctgaccgctgacccctagagggattccccactgatctctgattactgtgaaactgaaacaacagctgatctcctttcctgttctcctcaacaccggggtcgagctcgaaccaccaggccctaaaatatttcctgcagtgtttgtagtatttgagctcgacccagacatggagttcatagcattcgcagcagctagcgcggcggcattccttttcagaagacgcgccggaggacaaagcgtacaggtggtcaaaacggccttacgagatgtactgcaaaagagatagagaaagaacaaaatggtaagtcaatgaacgactggtcaagatctatcaaaatagtttgcagacaaggaacatactcgaagccaactgattgagaaaatggaacagaattgtattagatactggtcagaccttcttcgagcgtaaagcagacaagaaaacgtactagcacaatattgctagatcatgtgcaaaacatacttcagtcagtatataatcaaaaattacaaaccacagataccagagttcttacctcccaaaagtttaccgctgagtcttcagtcatcagctcataaatacccagctttccctaaagaatgacatccattcaaagcccaagtagaagaaaaagtcaacctcaagctctggtgagtagagaagtcaaaaaggaacacaaacgtctttgaaccaattaatgtctattcccaacagattggcaaacctgtatggaaagttgcgtgaaattttcataagtaacttatcgggaatcgatcttgatagtaaagcaaaagagaacagaagtatattcactcattgttggccttgaatatctgtcctgttcgcctccaaaacaaactaggcgttcgaacaacttttcatatcaaattcgccagatgaatatatgaattggccgataaatatctcatttttgtctttgacctattgaggtaaggacaaccaattggactgatggatgagcaaatcggacgcacccgtaaagcaccgatccatctgtaaaaccagccgttgaaacccttcttcgatcaagatcttttcctcttttgatagactggcaagaatttctcggacagtgggtcgaaaaattcgtagtggggccgagattcgctctttcgacgcctcactaacgctaagcagagggaaagatagacggaaggcaggagtattcagtttgaaacaacgatgcatctagatatgatactattactaacgtggcatccatccagctttccaattttgcccaacccaactcccaatcccaaccttctgaagcgctgaccaactgcgaactttcaaacttggctctcaagatcgcgtgtagatgatctcccaccgccaaactcggaactggctgcaactgactgtgcgctcctgacaacataggctgatggtcttcatctttttgatgccctggattgacatattgctgatgttgttgctgctgtggctggtggtgaaacgtatgctggacttcgtctgaagaaaatgggaccggatgtgacaacggatgctgagtcgaagattgtgctgcaggctgattaggtaaaggtggaggataaggatggaaatgatgagggaaatgtgtagggcttgcaggtcgagacacccttgcttgaagagctccaagattgatcttgtgctgatcttgatacgatttataaagctgatttaaaaggtcgttgaaagacccgttctgttgagcgttggcaaagagggagggagacgcggcgctcgcattgagtgaatttggtatgaaagattgaccggccgattgtgatggggaagggaacgaagtcgagttgttcgacgataggggaaggagagaagaagggaattccagggtgtttaggaactcactatcgtaaaaacaagcaatttcatgctttcgtcagacatataacacagacagtcattgagaaagacgtgatgacacgccaagacgactcacctaagacttccccactcagcatctttgtaacctgagctagatgccaaagtcggaaccagattgtctcctggtggttcttccagtcctttatctctgcttacacccaaagcctcagatgtcctcggagtcaaggtccctattccgttccagggagaggctatgggcgtcatgcctataggcgaaggtgccaacgatggatcaatcattgtctcctctgtcctcatgacaggcttggagtagtttggagatggtggtcgcaacggctttgggtttggtatcgaggtcgctttggaaagtagagagtaagcctgctgactgtctggttgaccaaccctcggaccaccggaggcgtgttcaggatatatttgaggagatattgatggtctttgagcagacggatacgattgtggtagaggcggatgttgaggttgaagctgagaagaaagggggttgtgctttgattgtaactgatgggctatgctttgaggaggaaaggccttgttcaaaggattgcgctgttgatgttgacgcaattccggcagagttgcagcgttcgattcttcttcttgctgctgctgctgctgttggaggctagagatctggtcttcttgtggaattgaaggcacttggtcatcccctgaccccatacttttcggtacgatgggcggtaggaaaggaggcggtccagcaagcgaggcttggtggttgaaaagccgtctcttatcagaagagatttcattggtagaggatgagctagagatgcgatcagcaagagatggtcgccgtgggttagaagctaaagcttggctcgacggtttgttaagagagtgtttcgttcgagagaaggaagacacgcatgatttcgacttcggcggtggagatgccgaggaggatgatgccgaggagcttgagcccaacgaggatgaagttgagggtttggttacctgctgcgacctcgacttcttgccagcgttgagtgaaacgccagaagaagatgaagaagatgcggcggtgatattagcagtagtggcggtagcagcagcgactgtcccatcggacgcgttggtcgtggtaagtgtcgatggatccaggtctgtgcagaggtgctgaattccccgacggacacacctctcacaaggacgttctgttgattgacaagcagagagacttagttgttgattccagttcgtacatagtccaatatgctgcaaagaaaaagaagaaaaaaaaacaccaaccattcgaacagaccatatgagaccgcttgcaaaacacgcatgcgatctggacctttgtcctcttcttttccctctctctgtcctttgaagcagacgactgagtctgtgctactgctgctgccgatggtggtggtgatgaaggtaatgcctgcatggctttccgcttggcagatgacatctctccaagttcgtagataagcttcttccaggcctcttacgcaagtcactgatttctctgtgagatgatggatggctcgtggtcaagagatctgtttgctttccagttcggttggttggtcaaattcagatatgattacgtaaagtgatatttgaccactgacctccgtcgatcattcggctacgatttaagccgacgccaagtctcaattacccacatccatccatctaaccatctatttatcagtctatctaatcattcagatactacagcgttctgttgacgatgccgatcgacacgtccgctaactcaaacgttctgttgactggttctcaaatctcgcaactttcttcactggaagttcaaacctcgagtggctcttctgttgcctttggatcgctcatcaatccttccacgggtaatcattcgaaaacacttgttgtggcactacgtcatttctggtgtggtctgtgtaaggcatacctcactcagctatgcgagcagattccagagagcgtcgcaaaagaacacgggatgaatattgtcgtccttggatgtggaagctgggtgcgtcctgccatcctgtctaatttgggttttcaaggaacaagggaccgactggctgatcagatcgagaagatttgcgcttgaaattgataggaaccgatcaaagactatgcaggtcggaacacgaatcttcttatacctagcaattgagtcagcctgatctgatgacgactttctgttgctttcatcttgcaatagctactacaaattgtccgtatccaatctatgctgatcccaccaagaaagtctatcaaaccttagggacgacatccactatggcgcacacacccaggtccgtactgatctcctatcagaactatatgtcagactgtactcatcttctgtcctcttttgtgacaactcgtttcttacaagtggacaaccaagaaagagttacctcaaggagtcaatgttcacgcaggcaatgggcagtttgaaagtcgcgctcacgaacgtcggatcggtcaacaaagttggaagcttcaagtatgggccgctcgaatcttcatatgcacttttaccatctatatggctctcgaccaataaactgaccttcattgatccttcttttgatcatgttataggcaaaatggaggagagttcatcttcgaatcaggaccgatcaatatatttgcgcataggatgcaaaacacggaggaccacacagagattgcagagatcatagatatgttgagcgtataggttcgaaaaggaaagagattgcaatatgtatgattcatagtttttctgtgagggtgtaacattcatgagactctgcctgagggcttttgtacttgatacacaatcaacaagtccacacaacaaatataaagtaaaaactcataagatcgtcaaaaggtgcatatagatagcttttgcgcacataactctatgaacgtgaagtttaaagaaaaatcatggaaaacgccgaaaggccaatcctctgctatgatcctactcaaagctttgaatcggcaccggtaaactcatacgcaggtttatactgaacctccttcactttctcaaccaactcttgcaaagacaatcccctcaaatcgacccgtcgatcaactttctgtttttgtgccacctggatcactcgggcagcgacctgtgcggagatttcctggattcgatctattcttgggtagagtaagtttgcggcagtctcactaggagtgagtgcttcagagagcgcgatagaagtctaacagagaccaaagagagcaggtgttacatcaagacaaggtcagagaacaagacagatcgtatggtaaaaacggggaagagacgtacagtttcaagcatcttctcagtcactcgggtggccccgcagagcgtcacagcctgtcccaaagccgggaagatataaaagtctattccagaaagagatgatacacgtttgttagtcagagcgagccaaaaagaaaaaatatattcaaaccactggtcatgagaacgagaacgtactgtttccctgggcagcttctctgtgctccccgttgaattcgatgggatcgaaaggcgaaccagaagcaaagatgactctgccttccgtccaatcgagagcgtcttggaacgtgagctcacactttgtcagcggattacttaacgggaagacaatcggtcgagggttgatctgagccatcttgcggacgatatcctcggtgaatgctccctgggtcgtgctcaatccgatcaacacggatgctttgaaaccgatcgaaggataggttaggtgtggggtttgatttgaggaatagagaagaagctccactaacgttgtacggaatcgacgacatcctcaagagacttgtattgttttccctcgttgtcgtccctagaaaagaatttcttgtgctcggccagtttgtcacctcgatcgttctttatatgcgattgatgtcagattcagaacatgttgagaagtgtaggtctttaggagcaagagagaaagagaagaggacgcacagtgatgagacccttagtatcaacgagatatattctctttctggcctcctcaggagaaagccctttggtggtgaagaaagagacgagctgtttggcaactccaactgctgccgatccggctcccaaaaacactaaagagagaacgaccaaaaggaggtattatttagcgcaaatcgacgaagaaagaggttatattgacagcattaccaattttgtgctcgcttaagggaagtccgctgatttttgatgcctgaacagcagcgttgatgagagcggtatagatgacagaggcggttccttggatatcctgttcacctcacaacacagagacttgttaagtccaaactatctctggggaccatgaaaactttaagagatatattcacgtcattgaaggtacagtatttgtcctggtatctctccaagtagtggaacgcagcctcactggaaaagtcttcgaattgcactgtgtgatgaaatcagagcgcatgttcgatagtacgtcccaattagtatacatatcttgagggccatcgcgagagcaagtagagtctgctagaaaaatgaggtgaatgaacataccaagcgcatcagggaagaccgccttcatagcctccataaactcgtccaagaatgcctcgttctcagctatcgatcgtcgtttctagataagagaggagatttagtatctgtcgatctatgattagattcttgatagacacataaagaactaaacgtacctgtcggaggccaaggtagaggggatcctcgaggagtcgagagttgtccgttcccatgtcgagaactaaattacaaaacagaaggatgacagaaaaggagtgagcatacgcaagcaagtatcgaggatagtcggattaaacgaaccgatgggcaaagtctgctcagggtggatacccgctctagttcacacagaaccgacatgacagcaatgagaaatgaattagtggtaggcgtgaaacaaagtgtaatgaggttgatggattgatggtattcacccagcgacgtagagagaaagctttccaatggagattcccattcctcccaaacccagatctccaagtcccaagattcgggatccctaagagatcggagatagcaaagcaaacatgtcaggccaaacatcacacagagatcggaaaaggttaagcgtatacgtacatcggtcacaacggagatcctgactttatccttgtttggccagttctcgagaacttgtctgatagatcccttatcctcgatagatataaataacccctcaggccgtcggtaaatcttatcaaagagaaaggagcaagcaaagttcgatgaacaaatgtaacgaagagcgcaaatggagagaacgagaaggaacagacctcggagtatctctcgcaggcttccccaacggtaggagtgtagatcaatggggcaacttcggtcaagttctccgttactgttggcagaatgcagggatgtatacatcagttagtatccatcaacctcatcgaacgagattttaagaaacgcttgtaccaattttgtagaacaacctgacgttggtttgtcggaggttggaaagatagatgtgtttctcaatggccgagtccttcgatctgagctggataagggcccgcttgacttgattacccaacgattcgagggcgctgtaaagaatggcatgggagaagatgaaaacactctcagtatcatttcgaaatcaataccctgcattcgtcttcattggtagtacggctaacagcctatcgcagacgaccacagattgaaatgcgtcgagaaggaagccaagaatactgaaacttacgcaggcatcaaccctcggattccatgagcatctcggtttgaaagcgacagaccaagatctatagaaatgcgaaccgaatcaaattaattaactgtttccaaggtttggatgagtcaatagcctgcgaagtcaggtgcgcaccctggttggtaagaggatctcgatgaatgtacgatcttaacggagcagggtcggtagaacctatagaacgacatgattcggatgtttggggtgagtcagatttccttcatacgaattttccgattgagcaaaagaagcggggaaagagagggaatcatattcagtgggtaggccagtaactcaccaggcagcattgcgcgagcagagtcgacgagagaagctacagaaggcatggtcatggaatctttgctgttatttttattggtagtagtggtggtttggggtgaatttgtagaagtcgtggatgaaaccaaacgccgctgggagtattgtgtattgatgggatgaagcttcgagaagaggagagaagtgatcagatggtctttatttgtgcgggagagcagtcgggaggatgacatggtattcatccgcttttttaatttttttctcggctcaaacccgggttgatgatgagaggaggatggaaagaccgttaaaaagagcgactcaaagaaagacaagagttagaggaacagtgcaaagagcaacaagcgagaaaagcacatgtatagcagatctgtataaaatactggcggcaattgcctcattgggaattctttcgtccgagaatgaaggagggtgtgagaatgtgcaggtactttactggttaaaatcggttgattagatcaagagatagcatcatcatggctttcttcggatttcctcggccgacctcgtgaagtttggccgatccgatgtaatataccatacacctatacggccactcgtgattcatgcttgttcaggtcagaactcgagagcaaagagatgaaggcgagattcagctggtcgtctgtccgtctatatgtacgtcactgactctgcctatgattgttaaagatgattgttaaaaatgattgttgtgcttctcttcgctcttgttaccatccttcttcaagtctcctcaggaaataattccgataaaacctccagatttaagagtggctttagtcgtgtgcgcttatttttcggcttttcctaagctttcccgaaaaggaagaaccgaggggaacagggatttcgccgcccatatgttgggggttggacgcccatgtcttgggtgtcatctgtggtggtcatatcggtgactaaccgaccggtttcccaaaaattatgcgattcttagagttgaacgacttcacaatcttgtatgggatagacaatataagttatattatcaacacatatacacactctcaaccacgttcacaatcaccatcaagtctccatgcctaagtctgctaaacagaagaaggccaaggtggcagacttctcggtgaggatggctcttttctcgcactcgtcagaatataactatactgactgaaatatacccttctgttacaaacgacaccaatacttggttcaacagaaagcaaagttcaagcttggtaaagggaaacagcaggctaacaatgcgactgatacatcttataaggtaagcctcaaccctgtctttaaatactcatagtctcaacaaggattgcaacaacgcctaataatatttttttgttgaacaggctcgatgtgtgtcctcatatccgctccagcaataccttaattgtgtcttctctcacactcaatcttttcaatgctgacctgcttgtctaatacttctctatagccatcgttctacctaaccaatcgatatcggtagagcatgatgagaccgtccctctcaccaaacgaaaccacacttttgcagacctgatcgttcaatctaagcactataacgccggcatccgaaaaggtatcgttgttgtaatctttatggtgatcgacgagcttaaggagactacaaatcgatccttattccccttccttgaatacgtttgttataatctagatgccatctatggtttgaaagaaatcttaactgcgtatccctcgctcagagtaaaggaactttcctcggtcgtgggcgtaatcgtcagatatatcaacgacgaagtcagtttctttatacatttcacgtcaagtctttcttggtgcaacccactgacccgttttccctcatttcattcaggactcatctgtccgaaagacccttcccgtcttcctctctcatctattatccatcctaccccattcaggtctcatccctcacctacctgtcatattccttcacttctcttccgcgctttcccatatatttcccgaggtccgaatagatgcagtcaagtctttccgtgttctgctcgagcactatccctcgctctgcgtcgaaggatgggttcagaatagagggaccggtggaagagccggtgaaggtctcatgggagtcttgggtcttggaggcgggaacaatggagggaaacaacaagctggtgtagcaagtgtacccctcaaatcaggcgcaaaacttattgtccttcaggccctggaaaaattcctgaaggcggctttagactcgaacatgccatccacttcgacagcatcagcgacgtcttcatcctcttcaattgcagcaacatcccgagaatctacctggttctttgctcattcgtttgcgtctcctgtggcgtttgccgaattttctaattctcttaccagcactccttcgtcttcggcgggacgggttgactcttgggcgcttggaactacaccagacgcttgggatctttcctctctggccataaactcatcttcgctttcttcttcctcgctcatttcctccagcccagccgaaggaagagaaggaagtggcatccaaccggttgagagaagagaaaaggctagggctgcagcaggaatgtatcaatctctccacccgcttctgctttcaacattcttggatgcagcaccaggcgcatttgatccttctggatcgatcactcaagtttcggtggcgggtgaggaactggagctgattgccgtggtaggagaattagcaagtgtgctgggaaggacagtcatgggaaattctgaatctttggttcgtagctttttccccatcatttggtttggctaaattttccaagagctgtactcaatgtcatcgggatggtgagctgacaatttgtgcatctattctcatacactctgatacatgcatttttcccaaacagccaagagaaacgttgagtggagtcaaaaagggtctgagaacgatgttgaatcacatggccgtgtactttcccttcaattcgtccactttccagaagagggatgtcaaagtatgtccatgataagtcaacatgttcaaattcttctatgtttgtacaatacagctgatcatcttcggtttcttctgtcctgaagtccgaatctcttctcctatcgctctctcttgcattctcctcactcgttgctcaagtgtccttgacccactcttcagtcgcccccagaacgaagagttcgaaccctaccgagaggaagaaagcattggaagaatgctatacgagaatgagaaaagggaccggggcgagcgagaaagtgttggttgataaggtcgctgtttgggtcagcgagctactgagaggagaagtgagtcttcagatcaattgtcaatatgaaagctctaaagtttcaataccccgtctgatcaaacaacacaaaccgtcttctttcctcgcagaccgtttcggcttcctctcctctaggtcaatcgcttccttcccatacgtatgaagctctccttccgactatttggtctctcctttgtcaacctcctccagctccggctgtcaagacagaccaaactgcctcacccgtagagaacggaaagaacgtatcgctcttgattggaaaggcagtgtttgaacattacaatcggttgaagagtttggatccgacgaagaaaatcggattggagttcttgggcaggttgtgcttggtatgtacaatgtttcttttccttctgaacccagtctctcagtttctctagttgtgactcgagatgctgacatactcccgttttgtccttcttgtgtgtaatcaaaccccttcctcccttcagctggagacatttaccttatacaacggtcctttccggttgcgtgaaccttcgtccgttctcacatcaggtctggcatcagaggtcgagaactttttcaagacgttgcctcggatcatctgggaagctggaagtaaagatcttcaactttcagaggtgaattttcatctccttccgcgagaatcaaggaagatcagtagactaactggactgttgccatgtcattcgattttgatatatgatacacacatagctcgtgcttcgacttactcagacaatgctcaagacctacctcaatcgcatcctccccgctatcctgccatcgtttccctcgtatttcaccatgaacattccctcgcgcggtgcgcttcctggaccgtggacgaaacttcctttggaaggtagaggtcgagttgtcaggatgctggctatcgataccgcttggttgctctgtaatctatcgatcttagaaggctcggctgtagctgataaagatcagagacaggctttggagaaagcggtcgagcaagcagtagatgttgtcgctgtggaagacaaaggtgaggcgagtaggtactgggttgggttgaaagaacttaaaagatagaaatgaagactttgtcgtcatcgtccttgtttacactggattcttcgagagtgagatacatatatagaattgttcatcatggagagttacttgaaccttttttttacatatgtttctgaaagcaagcaaaccggttgagcgtgggaggacgggatcaaagtagagaaagactctttcaatttctggcggcttctctgacctcttcctcccaaaccttcttgaactcctcgatatctcttccgccgcctatacagttgacatcaactgggtaagcgggccaggcaggcgcattcctcgccgccatcggatgagccctggaaggaatcatcaaaagaagtggtaggctcgtgatgacttcaacgtcttgttcttcctcatcatcgtcgtctggtgtagtttgagacgctggtaagtctgaaagagagagagctgaaagagcgtcgattgggtgagagtctcgtgagagtgaagatgactcagacccggtacatgaaggtgaggacaaggtggacagatagagctcgtgcagttgttcataactgaaaagaagaggagaagtatgaaacggatggtagggtgaaaagtcgacgatgtgtgcagatgaaaggttagatgtcatatagacatccacgacgtctgtaattcgccatgacaagtattattggttaggctcgagaaagggttcgcagtttttctgaagcagctgacattataaaagaagagagtaggaaagaatgaaacatacagtcgggcccaccggcgaatttgccgcgaatggtggtgtcaaagaactccagcaacgactggtgtatcttcgcttgtgtgtccggatccaccagatgctcataaaagtttgtgtctcgctgacagattcccagcagtgtgttgtcccggatgaacatcctaaattctctggatctgtcgagatcataccactttttgagaaccatctcaagtagttcgccttgaccctggtcctcggtttcatcttctattaccccgtctacggcttcttccccatccgtgcgtgtctgattgagcgcttccattacgccgttcatgagcccgcttgctttaagaaccataaaaaggtcttcgatgctgggacatttcataggcagtggaaaaggcaagatccattgagcatcttgagggcagacagagttaagcttaggaaatactccggacggcttgaacgttgtgaatgtggaggcaatatgagatgtgagccgagggagtgaatacacaggaggtgtagaggatgagctagatgaactacaagtggtatagcagaggtatgcttcttgagtaattgatttgtcaatgaataagaacaggtagaacagacctatcgtcgtctgccacatcatcatcatcatcatcatcatcatcatcagcatcgtcatcgtgactctcgaggtcctctagaagaacaccatccggcaacctcatcccatcctcgtcgaaccacttggtgaaggtgacttgctcttccggagaaaatttgaaaaccgtccctctgatagaaactctcctaaagactgggtaccattcagagaaccgaaaatgacgaagtttcgatcgggtcaatgtaggaacaacttggggtggcgatggtgcagggactggcattatgttcgtgtgcttgatcgtccgactctgtagacgactacatacatgtgaggttaatgacgatgaacgtgagtgtagggttaagagccgatcgattcttaggtaatcaccaccgcggctctggcccagtcaaaagttgcaccttctgactatgaacttttcccatgcctttcatacttaccttgagttgacagagagcgtcataaaactctctgtcctgtatcgatcgctgacattgcacggcgacacatggtcctcatcagcttgtatcggtagagtgtggttggttcgccagcttcagattcgtaatctttctcaagccttcattctcccttcggggcgggcggaggtgcatcctttttggttttgttcgtctgcttcaatcatttagaacgatttagtatgcacgttgtgttgcttagtttatcacttataacgtcaacacttcttgggagattatttatttaaaaatggttcatcgggtacatatgcgttttgtatggggtgtatgtcgagaaaagagttgtatcatcatggaaaaagagttgagaacggccaatggaagtgagatctttgatcgtttctctactcttggtaggcaggtctaaggtccgctcgccgtggtgctatgcaagtcacacaaaatgagtcagatcaaggttctatcttcagatcggcacttaactaaacagactcatgatgagacatctcaaaaggaaaaaaagtactcacagagtaaagggtggagttgcgacagatacgtgatcccccacctaagaaggaaacaagacacatcatgacatcacgttcgatcagacaacatgatgatattcggcgatcaaagtcagcaatgagacgtgtatacgattgaccagccggacaaaggtagaacagatcgatcaggaaggagaggtcgtacataagatagcatgacgtgagagcgagaaggatactcgttcggatcaatctattcatcatgaaaatcacaatcacaaatacggtcaggttggtcatccgttggttgatttaatcgaaacatgaataggtagtgaagaaacaaagtggatagagagataaaagtcttgtaaaggagaaggacgtacgtctgattcggacctttgggaatcacaaaccatgagccagagccgagagcggcctacaggcagggtcgacatgcagaaagagagagcaaagtaatcagcggaagaaagacacatcatcttagcagtatatagggggatagaagaggttcttacagcgatgagtgcaataacaaccacgagatatccagacatgttgtttgaacgaggtcaatgggtttgatggtttaaagcaaaggagatgagagtcgcgttggattcgtttcaacggcgagcgccgcctactttcactttcctcctctacataccaaaacgtcgagccatcctatttgcttgagacacacctacttcaacccattagttctcttcctctttttcacaacatggtgcctacatcggttcatccatcccagagattcgaagtctctctcctcggccacttagcgtcttcaatccatcctttgttgatcgagaaactctcgaggatgtcgatactatcctccccgttcatccaggaggaaagtctcatgcagcctttggctagacaaataggatcgcgagcagaggatggaacgatcagagctcggaaggtggatgaggatggagaactcatgacgtccgtcccttcttctctaatcatgtttcttatactcatcgacctaatctgacgtggctcattcactctctccatttgagcagatatcttgtaggcgctcgtctatactaaaaacatgcctttctgttattatattgaactcaccacgtcttacgagatattcaaagaacaggtagcatatcaacgcccagagtctatccgtgccactccccaggtaagctctatcacgttctcattactatctcatttcatatgcgatatgattctgacgtctagaattgctcacttgtgtctttgcaattctcttctttaaggcgctcgtgacaccgtgtacgtacactcaaatctcagccgggtgttcaggagaggaagcagctactcaattaggctttcaaaagtatgttttcctccgactatgtttcactcttccaatcctacttctttttcagccgatacctgcactctagctgaatatatctgatgcattgatacttaatttagagtctcgagctcaacaaaaagaggatttatcttcatgctcgccgttgggctccgaatagaagtttactcactcgacacaaacgacgtggtacgcaacacctatcatctctttcatcttgtgacctcgttttcttctttctaacgcccattcaatctttacatcatgttgcgcgtatgaatatatagcgctctccgtctacaccggaaacatatacaatcaaagttctgtcgcctcctataccttacgctcttgttgctcagacgatagaacacgctctaaacatcagacgacagcttgttggacttgtgaaactaggacgggtcgagggatcaaattaattaaaattctcgaatgatgacaatgataatagtgttagaatacatgcaaagattgcgtggaaacaggtgaaggctgaaggatgggaaaggtcaaaaattcgaagtacagaggtcttgagcgatgtttctcttgtttgatgagaccattcgttcactatgaaaggcaaaaattgatatcatagacaaccctatgacacatcaagacatatcggctttgattatagcttggagaaatggtagaagacatatcctcagaaggatatagtccttacacgtcgactagttgtgagtagcggcgtaggaagaattctcctgaaccaagaggaacgatgacgttaaaattcattgaagctgatttttgcaccgtgttagaacgcgcctatacctacgactaccttcgccaacaacttgtagtcgactgactaacttacagacaacaaccagaactcttgccatgacttccgatccaaatcactcagatgaagactcatggtcagaatcttccgcttcttcatcaagatccgatatcgctacaagcacaatgctcggtcttcccgatggtctcattacccttccctccgacctctctgacccacaagtctctcacctcggcggcagaccttccttcctcactggtatcaaatcagtgcctaacctgaaggaggcaagttgtcctagctgtgagcagggtatggagctgttggtgcagttatacgcgccattagaaggaacggaggatgatcgggtggtctatgtctttggatgcgcgaggggaggatgtcaaggtgagggtgggaaaggaaggtttgtataagttctttctgcatttctatctttttcgttttctctgtgtgatcagaaaagcctaggaggaagaaattatcgaaggagatttcttatgagacacaaaggttgctcatcaatccttccacggttttaaatctcatatgtatagtgtccgggcgttcacttctgtcaagcgtagtggaagctcttcaactactcagaagctggaagagattgaccaggcccgagtaaaagttgggcagctccagctgagcgacaagactgttgattctggtgagtcgccttgtagagactcaagtcatttcgcaggtaactgtttaacctcttccaactcttgtgtcctaatcttttggtttttctatatctagcctggaccgagacttctgcttacccggctcaataccttgaaactgagactgaatacctgacgaagaccaaaagctctaaagccgccgaacagacatctctcgacgctgcctctgctgctgcttcttctgggaagaagattgtggatgagtttgacttcacgctaaaggaaagtggaatccccgggttggatgaaacacttgaaaggtttttgggcaggctgaacgaggagccagaacaggtcgtcaggtaggtgttctctagccttgtagttgtctccatccgactctcttctatcacagatctgacctcttaagcaatcataaccgatcagatacgactttggtggcaacccgctcgcttactcctctacatccaaacttcatcaactcctctatcaaacacctcctcttcccacaggaacgctcgggtctacctctggtcccaaacgaaaggtctttgacccgacgcgaattccccgatgcgatcggtgtggggcggaccgagcctttgagcttcagctaactcctggtctgctcactatcttgagagttcaagaaatcacaaattcttcctcgcttttcccgaccggtggtgagtcgattgaaaagagtgatacagacaagaagaacgaaacagacgcaacggagaaagaggaggaagaagcaagaaggagacaagcagaggtacacaaggttctagagaagaaagatagggaggttaagacgggaatggagtggggaacgatctgtgtgttcagttgtgtagacggttgcggaggtgagtggggacaagaatgggttggagttgagtgggaagaataaatctatgaaatgtactcataaggatctcgactagtcatcaacagtcttccgtctttcttgatcttgaaactcatagaatatcagcgatatcgtccttaaaagaaattgagaacatcgatggttatgtacaagttgaggcgcgcaacaacatttttggggcaaggggaaaacacggagagtgcgtgtgttgatattcttggcgacctacgcttgctccctccgttccttgtttcccaaccgccatccagccacatccatttctctcaacaaggattctttctgggagcatacagttgttctctctagttggttctgtcatgtcagaggatacctcttcagccgtaggccatgttggcgaatgcgatcggcttgaagagccgagtgcgtcatcaattagtccgtgatccacacctgtccttgaacctgttgggctgaacacctgtcgttcagttcagctaaattcggatgtctatacttactcatttcttgtgccgtcaaacactcatgtttctgttatcagccttcgaaggatgtctacgatcattggtcccagccgacaaagctatccttatgaacgaacttcctcagcgtatgtctacgacttcctcactgactatggttcagatacgcatatatgcgtttatctatttattgtagccgtcctgatgaacgcgtttttgccgtttgatcgatgttctcacagtactggagaagcttagttcagaaaaggatgtccaaatcatgacgtccgatcagatgaatatcatccggatgtacgccgaagcagaacctgatctagagattgacctggaagggctactgaacatgtttgcgtgagtgtcaagggacagatcattcgtctacagttgaccgctcaatatctgacttggtgtcactctctagtcaaatgaacccggggtcaatggagaatgcgtctcctacttccgatgcttctgtccttggaacgcctgatctgtctcttgatctgacagattgctccgacctcaccaatacaaagtttactcttccagccactccttccacatcatcgaacccttctacagacccaccatcgaaatgctacaagttgaaccaaatttctaatcttaattcggacggtagcgacactcaggatctttccgtgaatctccaggattcttcccgcaagtttcagaaagcacctccaaatagttgggaaagattttctagaccaacgcctttgggtcatggcaggagacgaagtggaggctctattggactggcttcggctgccagcgatgccggaagtgaaggtgaaggagcgaggaatgaggtgagatgagcttcgtctttcttcattttgaatatagagtatatgcactttgtttgtcctaaacattcctttcggtcgcaaaaacgcttatgagaaggctcaaatcgcctctactcccacgatgaaagaccgccgagcccgaagacgttcccgtcaggtatcacagcctactgatctgccagcttcgggtggttcaatcagtacccctccaagacgggtttctcatgacggttcatttttgagctcacctggtttgaacgaaaatagtttcatctcagcggctaatctggtcagtcctgattcagttagcataccaaggaatgagcgtgagggcagtctagagtgggatggtgaagtgaagagcagaggctctctaaaggatgaagacagtctgtgtgtacgtgctcgcgcaatcttttcctacaattctcttactctcattctgacaaccttggttctgactaaatcaaacaaaaaaaactttgccaccattctcttcaatacagaaacaatcgacagactccccgcaagagctcgctgagatgcaagaccggatacaggaattcgagaagactatcgccgatttgactcgaaagctcaggattgctcaagaagaactagaacagactgcaacagatagcgagaacttgacggccgagtttcaaaacagacttgaggaaatgaaagcacagttgaattcgaagcgtaaagaagaaaaagagttgagaggaaaggagagagggtatttagaacagattcagactgtacgtggtccgtattgggcgcattgagatatccattgccactgacacttcttgatggattcttctgactgttagtttgaagcagacgttagtaaactacatcaaatggtggaaatgtcgaaaagcacatattctacgctaatgaagagctacaacgaacaaataggttagtcatcgcctcatcctgactctttcgacttgaaagttcaagatagatgctgagcattctacatctatatgccctcaaccagccgaatgcgagagcttgagaaactccattaggactcaagacgtcgagttcaaagctacgcaggaagttttggatgcattggaaagcgatactcagagggtgagacatctatctatatttcttgcattcagtttgtgtttctattgatgttttgtatcatggctaacaacctcttggctcctgacagctcgagaaggaacaaacctatctcaaacaagccaacgagctacttttacttgacctgtctgctgcccggcaagccgagaattgcttggaagagcagagaatggaaaacttgtcgttgaaagaaacgtgagttatgacaacactcttcatactttcttgcgtgctatgtgctttaaagtcccaccctctctgaatttaaacacctcagcatcaatcgacttcgagcagatctagataacctccgaacgatgagtgccgccagtctggtttccattcaacgcgttcaagcgcataatggccctgaaactttaggtcgaagcttagagaaagagcttttgaagcaattgcaggacccatcactagaggtagatctggcggatccaatgagatgtgatggcgcgactgaaaacgagctagataacggtgatggagaatcgcttgttcaggcgttgttcgcggcttctcgtgaacaggtaagatctctctatcgaagtctttcttagttttgcactcaagacagatatcgattgactcgcgattatttccttgttggactaatagtatcagagagaggcttttgacgaagatgtcgaaactgaagatcagcctgcagtaatcgatcaggaagactttactgtacggccccatgcagcttgagacacgtatgactttctggaggctagaacgctgatcaaaatttgtcgatttcctctctcttaaaactcaggtggctcctgaagaagaggggtctcagatgcaggtgccaatacggacggacgaaccaatgatggctggtcttccagcatactctcctcgaactgctgaaagtctacccacaggaatatcaactcagacctctttgatcgccaccgctatggacgattctgtttcttcattgtcgaccgtcgataaatcaggttggttgacaggtattaggcagcgacaaaagaagattcgaactgttcggttgaaaccatcattgtttgtccttttgcccactttactcgccatacagcgggactggtgtctgttaactgctctgctcttgactgataagatttcagatggtcatttgtaatcttcaactttagtttcacagatagtgaggcgcatccaagctcatctctgtctttcgaagcacacttctgggattttacaaagcgacacggacggtccatcattaccggagcttttcttactggcgtcacattctaccgtaagctctcgacatttcctgatttttgtgcagcctttgcttcgatattcataaacgatggtcctatttggttacagtcggagtcgtatatgccgacaatcagcatccaatcggaacaaatcttcaaagcgttctgtctggcgatgccagcgtatggcaggtacgttatatgctattcctatcttttggcttccacgggcgatcctgatcatgaactgtacgattgatgattttctcggacaattgattgcagtactacaatgacctcgcgcgagctcaaggcgcaggagtaggcttcagccaggtaccttgggagcaacccagctggttagggtatctaggtgccatcggaattggtgctgttgaccatgttaccaggagagtgccaacctgagagccgttggaattgtgggttggaatatgtcggctttctcggtacttctacttttctctctccgttgtcctctctctttcttctctcgtatttacttactggtatgacgcttcacgactctcctacacatatacccatcctgtccaccgcttgtgataatatatatatatacacgtttgtaaacataatctctcacggcatcttccactgctgcagttgatgtgttcccaaccgaagatgcaaacgctaacgaaagaaaacggcgaatgtccttgttggcttctagatatgttatatgaccacataatcatgtagtcacacaaactcgcaaccacattaccgcgtaaccgcgtaaccaccaccacgattctctccacgcgacgcctcccgcttccgctcgtttgactcatcgctctctcaacctgaggatttccaagctagctgatagttgaccttcatccttcatcaatccgtacactcaaggcggtcgtcgttctctctcatccttcctcttctctctcttcctgacgtgtaaaatatgggaaacggtcaatcttcccctaacccacatcacacaccgcgcgaacacaaaccatcatcgtcccatcatcacctctctcgttcgtcatcacctgctgcctcaaactcggcgaacaaccgacggaagaaatcactcgaacttccagacctcgccaatctcaccctcactaacgttaacggaacggccgggtcatcgccttcgtcgccatacgctccggaggccctcggaaaagactgccagaagagttcgttaaagaccggaaacgcgaggaacgttcctgggtcagcaaagccggttgataacttgggtcttaagaaaagaccttcacctctcgctccctctttggtaacttcaccactctctccgacgtctcccaaatcctcttccatcaacgccgttcacaacctttacttctcttcgtccaatccaacctcttcttcttcgtctgccaacaacaccaacacgtcatcgcccacccacgtagataacgttctaggtagcagaggtgttggcgccccccgtgaaccggttcctattcccaaaaccccccaaacgcctaacgccggccttccaaactattctcgatcttacactcccaatcaacgaaccgaatctgatcctcctgatagacctccgtctaccgcaaggggtgatcacctaaagcaggccaagacggcacgtatatcggacagtttgccagaggagcatccaccgctttcgacatcgcctgcatcatcaaagcacagcaagagggatccctcgggtacaggcgaagatgaggtatacgttcgaagctcgctaccactaggcggagcggcctcctctcccggcccgcatgtagatggcaccgaagtggcttcgatgggcttaggtctgataggggcagatgcgaaaagtcagtctgtggagagaggttttggaagcaagaagactgctacacgacaggtggaggatcctaaacaggcagagaaggaagtctttgtcaacgtgaaggaagaaggcgtgccgacaatcatcaactggaccggaggaggcaaagaagtcttcgtatgtgggacgttcgcaaagaactggaaggagaggatcaggatgaataagaggtacgtttctgcctcgttcaaccggttgaggtcattctgtctcccagagcggtcgaagttgattgcagctgcttctctttggcaacatacgaatcacgtcgcttatgtgtatcaacttcaaatagtacacatgactttacgctagttctaaaccttccaccgggtccgcatagactcaagtttattgtggacgaatcctggaagtgctcagacgacttagccacggctacggacgcggatggaagcttagtcaattatatcgaggttcgtccaatgcatagggcaagaataaccaagagagatacaacagatacttatattttccttttattctcaaactatggtatgcaggttgagcaggaatcaagcaaagatggaaaaggctggagctcagagtgggagggtgcggctgaggataatgatggtgcgtttgttaccttctgtctttctgtctttatctggaggtttagacgatgtagacctattgttaaacttacctatgccgtcttctatcttaccttttgcatcacagatgatcctgatcaatggactactgaaattccagaacttctcacgcaaacccaagcggcggaagaagctcatctggcgtacattgccaatctgccaccagcaaaccgacaacccggttcggccgcactcgcgaatccgccaggtttgccgtacccgcctggattgccaagacacctggagaaggtcatattgaacaacccgccgaaagatggtggtcaaggaggctcaggagggccgacagaggagagtggagcgagagggcgcggagcaaagagtggaaataactcgatcgctgcttgctgttcgtacacccttctttgccgtcgcttttttacctgccatcccttcagtcgtggcgtctttccctctgtgtgagattaacgagaaagctttatctgaattgtctttctttctcttcctggttctcaactatcaacagggacggcgataccagatgataactcgattttacccatcccaaatcatgtggtactcaatcatctgacggccagtgctatccggaacggaacgttagccgttggaacaaccactcgatacaagagaaaggttggtcttttctctatctatctgtcaacatgtcgcttcccatgactgcagaatataatctgatacggtaatctaccttggccaccatgattctagtatatcagcacgttactctacaagcctgtcgagatacgggattgagtcatccgtggatgaaggtttctttcttgagttacttgacgagttccaatcagcttccttgtcgattctttattctttttatctaatatcatcttcttttacaatctgccatgtgtataaacttccctctacttccttttgatgtcattttcttttgtgtcaatcttctcggcttgatgattctgtactcatacgtccatcttccttcgaccatccccttcttccttgtttcctctctttcgttgagaccttctatctccaaacggagtagtccgggtctcaactctctgatgtcagcatatttgcccatcttttcacatgtgatcctctctacatctacacacaccatagtcctcttcgatctgggcttgtttcatctttacatctccttcctctgtcccccgctctatcaatcatatttctctctttttatatacttctggtcctctttcctccgtggtgtctctgtatgtggcctcacacgaatcgcagatagaaagacaagataagacgcatgcgattgtgcatgtgtcaagaagaaggttgggtatttactttgtttgtctgtctgactgtctgtcgacagaatctgtggttgcatgtaaccatggtcttatgcactcttaattatattctcactctctcccaatcttctcttctggcttctgatgtgaatctttttgtgttggtcagaggtgaaacatatgtgatagatcggatgattttgaatgcataggacatgggaaggcaaagctttgatgtattgtgtgagatggaaacaaagacaaaaagagaaacgagaaaggaaaaggagaagaaaagaacgtgtgagatacctgtgcgaaaaagatgagataagacgtgaagctgagaagaaagaaaggggtagaggcagaggaccagaattggaattgcatgcgacgagaaggatagcaaacagagatacatgggtaaggataaaagagggtgataagagtggatcaaggacattaaaaaaggaaactgtgtaaggagattggacccttttttcttttttgagaaacgaacatgagacaatccgatatgtttgatgacagtttgaacgtgtttcctcatagagacaagagaaacatgaaagagagagaaaaagacctggggatgttgaggagctataggtggcaaaatgtcaatagagaggatgtttatctcccaaagaaagcagaaattcctcgtttcttctccttctttgatttcggaggctccacatatgtatcaagcttgtttgttgaagtcgacgccctgcccaatgatgcgtcatctctgttctgagattgagtctgcatcatcaagcctgatgaaaatgaggtggtgggcagatgataagaatgggtccggccttccgactgcacaggtacggggaagctataaaccgaggaggctccgcctgtacttatgtatggttcaggcgaagaagatgggaggggaggaaggtccttgtccaggttggatatggtcgagatcctcttgagatacagaggacgagaataatacccgtcggtcatggagggcgaagaagcttttgactggaaagaaggcatgtacaaatccgtctgattttgcagtaacgacgagctcatctgcgaaggtgtcaaggatgttcgagaagggaaagtgttggccgaataagatttactatgcagtctttgatctcgttccccagtaggatcaaagtcgacaggaagataccccgtctcggacgtataatccccagtcatccttcgctttttcccatcgaacaaagacgcattcaccggaccacttccatctccattatcgacgacgatgagtccgctcttccggctacctaatgtctctctgctgatctgtcggtcgaggaaccgcatcgatgatgtgggcggagacgacgtcatcgagggagttcgttgatgaggtgggactccatatggcaaagacgggttgctcccagcaacaggtgtcgagactgatcgaggttgggaagacgaatagcttacgccggtcgagagggcaggtgggaagttgccggagaggcccgaggaaccagaacccgatcgaccgtgtgtggacccactgatatcaccgtaccctctaggaatgttcggtccagagctatgtgaacctgaggagcttccgccccctcctgcgcctgctccagacttcttcgacaagaaggacaaacttgggggaggagccaaaggagaattcagatcgtcttcccccggagtttgaggtctggattgactgaatgttccagggttcaacatctgaggtgaatttccaaagctcgatgttgtccggaccgaagcgccactgcccaacttggagaaaaactttttgatccctcctttacgcttcttatgatctggatgatctggcgagtgaggttgcgtgaagagatgagacgaaggttgcataggtgaggattgggagtagttttcaaattgaatggtagaggcaccgagtgtggatgtgtgatcgaactgctgacgccaagattgagaaagaccatcgatcgaagcagctgcaggagggtatggagaagagtattggtttctaatggccctctctcgttctctctcgagtccaagacttataatagcaaggtagacgttttggttagtcaggcttccgtattcactgatggtacattatggtgtcaatcaaaacttactgcatgtcaaccatactgccgcttgctccatacatactcccctctccacctgctaaatcgctggtctcacttcttccactgccaccagcaagcctacctttaaagattcctttggaatccaacccgattgagcttgagctccttcctcttcctgcccaaacagcaaaactaaatggccgaacgactcttgaatctatcgaattcgggctaggtgcgtccgctcgagaatccactatttgctgatgagaagtcgtcatcgtcggaatttgaggatccgagtatggctgatgattcggtcccataggtctcgaagagtttgaaggcgttttctgctgtaagaacaaaggcatagtgcttgaccgttggtgtgctcctggctctcttccaggtggaaacccgattgcataagcattcgaggattcatatccttctataccagagctctgtcgatgggcgtttccaggtggcccgatggattttgcaccaggactgtttaagtttccattatgagaaacccgggctcgaccggcagtcgactcgagcacgccaagattatttggtgggtctcggcgagggctggcgagcgagctgcgcactttgtgtgaaagagcctttggttcagattcagtcataggcagattagacaagctatctaatgcgtccggatgaatcaatgtaagctggttgcgcaagtagacttgaagagtgcgaagccgatgggtagacgcaggtgggttctgttagggacgaaaagcaagacaaaccccgttagttgagacaaaactcagaatttttcaagcagtggaaattcaaaacggaccttgagtgtccattctttcaaggcgctttctgtcaactggtctccggcaattgaccgcttcgctggcatctcgaacccaatcaccatccccattccaacaggtcctcctccctcccaatctttacctcctttgagtagttcagtcacgtcttccccggctgattccctagagacgagatctgcgaaatcaacatcagaatggcgtgcccatattccaggagacgtgacatcaaccatgattagatccctatctcgagttaagcatctgtacgtaacaaaaaccacacgcgcacatgatcaagattgaggtaagctccgtttctcatatgacgatcgtgaattttacagaggtgaagaagactataagaggaaaaactgactctagacagacttccgggccaaaggatgttcccttctgtcctccaccgccaccctgaacacctagtctgagtccaagtcctggatccaaactccttcgagcggcctgatatggcccatcgatgtcaaacgcttccgatctcggtctgaacatgtcgtttccgttgggaaccggaggtggcgggggtggagtcggactgaatgctgtcaaagattgtcgaggtcgagatgacggagacgaagtcggagggagaggttgtgatattcgtatagatgtcgaggtgtgcgttgggatattcgagaagaggggcggctgaggaagtgcgcgtctgtctaggggtggagaggaagccgggtcaagttcgcccggagggtaagatagcatggatgtagattcggccaaaggggagaataactggcgggatccaattcctgcatagttgattggttcttcagtcgaagcctgcttgtcaggaccttccgcccgggagaatttcgactcttcgagttgcgagcgttgttcaagtgatgtgagactggattcaatcttggaaggatctaatacagaaccttcgcaaggagattgaacggtagcgtgtgctgattttgaatcggacggattggttgagaacgatggtgggatgggtagaggaggcatagacagattaatgtgtgtcgtggctgttgatgtcgatagaacggccgatagattccccgaagcgctcgtcgcagtcgaagcggacagcatgtttcccgctcggggcgacccaagcgcggcccctcgagtcgaatgattaggggaagatgaagacttgagggatgattgagactcggcagtgccttgccgtcgaactgcgtacccattcctgctgtcctctcgatcctgctcggttttctgttgagacttggagttttccggggcaaactcgtttgaaagactgtgtgaatttcttggtgcatctcggatgcccaaccccaacatgacttcttcatcaatggctgcaatgttacctggcataacgctcgcacctgtcgttctctgcctgtcgactgttattgaaccatcagattccaagtcttgagaaacatccggttggcgcgtatggatgaaaggctttgaagagatttgtaagatttctggtgactgtttttgcttttgatggctaagcgaaggtgcagaaggtgtaggtgtggatatctctctggcagtcgtagctgaagccgacgctttcctaggagacgtcatgatagacgattgcgatgatattactgagccagtccgaactctttcgcgccggcttctcaagctgaagcttgacgttccacccaggttgggagagactagggaggatgatggtggtacagatccggagggagaagacgaacgttgatcgaaatcttgaattcgaaaatctttaagggtatccaaatgaataggcgggtaatcaagcacgacgggaggggagatgggtggagctgatgagtcttcacggtcggacaaagttagtgtaggaaaaaatccgtcaggagattcttcaagaggaagaaatccgttggacgactgaaactcctataatggaaaggagaggtaaacaagccacccagaaaacgctattcagcctaatgtgtctcgagacccctccattggactttacgacctaaccgaaagccattgctaggagcgatgatgaacagatagtttggtacgtacaaaggggctcacgggagcgacggttggtaggtaatctgatgtgccaggagtggatgaatggctcgccggacgaaggtaggagccattcggtgaatccggtgtagatccccggctactggagcgtgccatagtgctgttttctttggtctcgtttcctcagtctcggttggatagaccttggaggcgattgatcaacttgtacaacctggtggaagtaatcacctctcgttcgagggaaagagaagtagaaatcagagcggaggatagaaagggaaaacggttgatggaagaaagatctcactagagtcaaacaaatatgaaattatgacaactcctcccagttgcgaatctcagtgggtggcagaattagagggttctcgtgttctttcttctctactgttttctctcgttagtcttgcaccagtaaacgttgagatagcgaggaacttgtgaaatgagactgaaaacagacgagtgtcaggaggatcagaacacgaggaaggtttcatcttttgcagcttgatatgtgcatgcatgcaacaccaacaacatcaaaccaactcgccttgcatccataacagatcgtttcccgtcttctaaatgtctctcagtctctctataccacctcaaccagtcgctattgtgcacacccagaaggagattacatatgatacagtcttttttttctcttgtgttctactctcggaacagaaatagctggcgtactctgcctcgccgcaagcatcctcttgtcgcaccatgcaggatataaattatcattgtttactctggcttggatggcgctgagctggtctcgtccagcccaaatggtttgggggcagttggtccatcctcaagtctgttgaaaaacaatatcgccaataaacatccgtcagaaaatgtagatttgaaaaagaaggtatgtcgaaagagaaaagaatcgggagctcacggcgggggggcagaatttcctgagttggcacgtcgctatgatccatagagaataagaggacatgttagcgggttgcgctcaaaaaactcttatgtacagaatgcgtccgaaaacgaacctcaaggaaatcgtccatatcgtcctggatgtcaaacggtcgtttgccaagcaattcaaccatgatctctcgagtcaagacttccttctcgagcaacttctttgccacaagttcaacctcggctcgcttctcctccaacaaatctcgtgttcgctgtcgagccttcaacagaagctttcgaacctgtgggatagaaaaagagtaatcagcataagctcggaacaattctttgacaaacacatcagagaagattctaagagattggaaacactcacctcatcatccagtagttcgccggtcttctcactgaatggcttctggaagctctccgagtctcgtcgaccataactgactggtccaacggcctcgctcattccatagttcgagcagatctcaaacgccatctttgtgaccttctgcaaatcatcctgagcaccagtagtgatctttccaaaaaagatctcctcggcaactcgaccaccgagcgtcatactcatcgaatcgagaagctgctcggtcgagtagaggaatctctccttggggagatactgggcgtatccaagtgcacctactcctcgagggatgatagagaccttcaaaagagggtcggcatgctccaagaaccaaccgcaaacagcatggccggcctcgtgataagcgactgtagttttctcctccttgccgagcacccgactttttcgctccaagccaacaatcactcgctcaatcgcgctttcaaagtccttctcttcgatcgcaatcgcgtctcgtcgggcacagtggagagcagcttcgttgcagacgtttgcaatgtctgcaccagaaaatccgggggttaaaagggccaacttctcggcgatcatctcggttgagaggtctttgatcaagacaagaggtcggaggtgaaccatgaagatttgtcgtcggcctccgatatctggtcggtcaatcgcgatatgtcggtcaaatcgaccgggtcgcataagcgccgaatcgaggacgtccgctcggttcgttccggcaaggacaacgatgtgctcgttgccctcgaaaccgtccatctcgactaagagctggttaagtgttgattctcgctcgtcatttccaccaaatgagccggattttcctcgagcctttccgatggcatcgatctcatcaataaagatgatgcagggtgcgttcttcttggcgttctggaacagatcccggactcgggaggaacccactccgacaaacatctcaacgaattcggaaccagaaacagaaaagaagggtacaccagcctcgccggcagtcgccttagcaatcagagtctttcctgttccgggaggtccagagagaatagctcctcgagggatcttggctccaagggcaaggaacttggcgggctgcttgaggaacttgacaaactccatgatttcctatatatgtttttatacgatcggtcggttgtagtcagcatagttgatcgcattgaaacctagtgaatgctggcaacaagagaagaaatgatgaaccaatttagactaacctgcttagcttcatccataccggcaacatccttgaacttgacagcgatatcagtctcgtgactgtaaaagagaaaggacgtcagcttctatttcttagggatcaaatagacacaacgatgacaagagcccactcacttgaacatcttggccttgctctttccgactccaaagatcccacctgggcctccacctccacctccaggcagcgccttccttgtgctccagacaagaactccgacaagcaataaagtaggcgctatgctgaagacccactctccccaactggtttggtccttgtactgaatcgggattcgctcatgactagcgattccaagctcatcctgagcaagctgcatttgtcgttcgaacgcatcaggcgagccgatggtaaagtagtagcttggctgtccggaagcggcaggctgtgtgggagtaaaggccccgttgcctccaccgctccaggagttattgtcgttagcggacggaatggtggcaggagagaacagggtgacgagcactcgagactggttgactacggtgagcttttgaacgagtcccttagcgagtagcgagtttcggctgtggaagtttgatcatcaagaggtcagacagaaacacgcagccaagaagatggtccaagtaagcaactaacaattcctggtaggtgatctctcggtggttggtagaatcaccagagagcagttgataggccatgacagctctgcaacaatggtcaaagaacgtgaggtaaggtgaagttgagtcgaagataagataaagaaactatccgtcagctttgcagttcatttcgtatcctacgaatgggtttcaaaaaacagagacaaggataagagatagaggaggaaggctcacccgactccgatcaggaaaaagttcctgttggacatgtttccgccaccttcgggaaagccaagcttgaacaatggatcctcgctattttctttcttgccatccttgccgtctttatcgtccttgctgtccttgttctttccagacaagtcctgtgcagactcatcggtggacttgcccttattgggagatgtcggcatcgggttggtcgaagatgctcctttctgcttgggctgtccgaagaagccagaaagagggaagggctcctcagagtttgacttcttgggatctttggattccaccgccttatcggcggactctggagtatgcctggcgtaagacgcgatggaggacgagtggaaggccgatcgagagtgaacggaggtcgatgcggcccatcggaatgagggaccggtcaagacggacgctatccttctcgatggctgtactaaacgaagcatgtaaagaaaggaaagtttttatcgaaagcagcaaaggtctaacgccagcagatcaagctgaatgtatatctgtatgggtgtatgtaaggatgattgaatgctggttgatgtgggatgggatgaaaggtggaaagagaaggagaacgctggaacttccgtcagttggccgatcccatcggcaaagcgctttgtaaccatgtggttactgatcgtccatggctacgctgctctcttgaggctttttcttctcaactctttaggaatgtttcgatatgcaaaagacacctggaagaaagcagagtaggatggaaagggagaagagagggaagaaatatcaggcgattgatcggccatcgatgaagaataactatggatgagtctgctgtcttgtgtatggatggtagatctgatgtatgtgaggataatacagaaagctgggcagactgagcattcagttgatcctctgtatcaagcgtaccatacatgtggcatgcgctgtaacaggatcatcaaagaacacagggcggcatgactctctctttcttctctcttcatacacgatatcttcaaacaagcagacaacagtcaaccagcttcttgtagggtactcattcagatagtctactcaactaggcctttaccactagagcccacttggatgatcggtaagtggaggtccgaaccctaacaaacagtttgattacctaatcaagttcaaaagttttttcaccgctttcgtttttatcgcttgcaacttttttttttcttttttttcttttttttttccttcttttttcgttatctctccagaacgtttctctttctctctcgctaacctctttcttttcttgcctttgcttcgtagtcaccgacctctaaatgctttcgccactagttccctcttcctcttcnnnnnnnnnnctcgtctagcattccctacatcgggaaagcaccacgccactcagctcttcacaccttcacccactcgcataaaggatagcctggtagttggctggtatcccttttctacagatcgactgcatacacatatacacacgcgcatccttaatttgtttttatatcattccgcttggatttactttatcatttgcagttcttgaacaaaaatgctaccggcaactttcgacccatttgctttaaacctcagacagcaggcacacgctctccttacccacctacagatccctgagtctccggctccgcctacatcgactcccttcccgtttcttcctctttcacatctccaggctgttcaccatgtggcctacactccggagcaggtcgtcccggatatgacccctgaggcattcgtcgatgtcctctcggatctactagaacttcagcccttggctgagaaggtcgccgaaatttttagaccgcttctcatggttctcatggccagatggctcgagagagctcgaggaggcagggacgaatgggtcaggaggctcagctcgggcgtcctgatcgcaggctgcatcgaagaggtttggccgtgagtttctacttagttccaccatcgagcgtctctatctatcttgatctgagtaaaacttgacataactttatggccactctttccctttatgacgctcagaataatttctagtttattacaaaccccgacatattcgttatacccacctaccgaagaatcgttgctcctccctcctaaagatctccatcccctactcctcacccatttacgactacttgctcttatcccgtcctccctccttccgaagcatataatctcaacagctacccttcgcgcactattcaccacccctcacccagacttgtcgactcggatgcttgccgttcgagcgttctccattcacaacgggatctcagaatcgaagcgaaaggaatgggaagaatctctcttgcagggcaaagcatttggtcaggacgatatggtttggtatgagggtttggccgtcatcgagggcgttacccaagaggtttggagtgacggttggatctggcctctcgtcgaggctagaaggctggatatgttggagagcgcttggaacaagaacgtccaggagctctacacgccttccaactggacattatcgtcgagctctttgcccaaatgcttggctcttgcggcagaccgggtgcttctcttccgaccggcgcccgcaccatcatcatcatcgtctgcaccgagagtcaatccaaatgtgacagaacaacctcatatacctacaccatcaaccacaaaatccttgttggcgctctcccttcatctatcaaaacgatcccccatcatgctcacttcacctccatcgagtggcaagacccatctgttgacgtacttgtctacgctacatttcccgttccactcaaatccgacgttgactatttctctagctgacacatcgctcgacccaaaatcacttcttggtaactatgtgtcctctccgaccgaccctggaaagttcacatgggtcgaaggtgcccttgctaaggccgtcaaggaaggaaggtgggtcattctggaggacattgacaaagctcgaggggaggtccttgctcttctcggcggattggccgaggagatgagcagagggaccagagcggttggcgacagagggtcacttagaatccctggaagggaggatgtgaggatcggagacggctttgcgctctttgccaccaggacgatcaaaccatttgctgcccctgctaccacctcggacgcagttgacgaaatcgacgtcgccaagccggacgcgaggtttcccaaaccgactttcttaaatgctcaaaagtttgtcgaggtgttcttggaggagccgacgaagcaggagatcgggatgatccttcaagctaggtttcctcgattagaggcaaatcaaattgaccagcttatgtcggcttggagttctgctcagatcggcagatccaccagtggaagcggtattggtagtggaggtgctgcaggcagagaggtaggactaagagacctgatgaagtggtttgtcagagtagaagccctggttactgggtatgttttcttgtctttctccttcttcttcctcttcagaccaagctcttgcggagtccgaggttcttatcacgcatcatctttcttcctatctatagcgcgggatcgacccagatctttggtttggatggatctttcgtcaaccctatcgttcaggaagaggttttcatcgaggcgctcgacgtcttctttggttcgcttccaaagcaaaacgttgctcgagctattgcagtcggagctcagcttgggctcaacgaggaacgagcggagtggtgtatggaaaagcgaatgcctgaagtgagaacgatcggaaacgaagacggtggagaggtcaaggccgttcgatttggtagagttaagttggattgtagaaagtctgccaagggtttgtcctctttgcttgtctcttctcggtgtttctctttcaatattttgacctcgattgaacttgtgtgcgatacttttcgaccgatcagcttaccactctgccgcgaccgagcgaccgtacgctctcacccgaccctcccgacttcttctcgagcaaattggagttgccacctctcacctcgagccctgcctacttgtcggagagactggtacaggaaagaccactgctgtttcctacatatctcacttgcttcgtcgacctctcgtctcgttgaacttgtccactcagacggaatcctctgatctacttggtggattcaagccgctcgatccaaaaattccggccggtgaacttttggtcacttttgcggacctgttttccagaacgtttagtagaaagaagaacaaacgattcgaagaggttgtcaggaaggctgcaggagcaggaaagtggggaagatgtgtggagatgtgggaggaagcaggtagattggctagggaccgtttgaagaagaagcttgaaggtgtagaggaggatgaagaggtcgagtgagttccttatcttcctttgtttttatacatgacgagagtttacgatcatttcaaaagatcggacagagtcttatttgtaccatcttttcgaaaaggtccacaacggctccctctggatctgataccactctcgacgcggttggtcctcgaaagcgacgaaaggtggccctcgagcagcaaaacccagagaccgccaagctcgtgactgagtggaacgcgttctccctcgaggtcgctgattttgagatcagacacgtcaaggccggtggtcgattcgtgttctcgttcgtcgagggacctttagtgaaagcattgaggaacggagactggttcgtcccaccatcaccctgttctttcactgtactgttcgcaagtggtttaacggtcgacttttttctattctatcttctaggctccttctcgatgaagtcaatttggcctccccagaaactttggagagtttggcttgcatcctagagagcccttccgcttcggttgtcctcaccgagcgaggtgatctcgagcccgtggtcagacaccctgatttccgtttgttcgcgtgtatgaaccctgctaccgatgttggaaagaaggatcttcccgccagtctccgatcaagattcaccgagatctatgttccttctcctgatactgaccgacaggccctccgagatattgtcaagcaatatctggacgtcgccgatcgagcggtcatcgaggatgtggctgagctgtatctcagtatcaagactctcgccgattccagacaactggctgatgggtcgaacttcccacctcactactcaatgcgaacacttgccagagctctgacgttcgcttcagagaacgctccggcatacactcttcgacgagcgctctgggaaggatttttaatgtctttcacgatgctgctcgacgccaagagcgcggctattgtgaaggctctgatccagaagcacatccttgaagccgctggaaatccacaggccatcctttctcaagtgcccggattgccttccggaagatccgccgatgatatgtttcggttcggacacttttggctgcagcgaggccctaaggaagccgatgacgcaacggagtatgtgctcaccccatctgtatctgagaagttgatcgacctggccagggtgatttcaacaaacaggttccctgtgctcattcaaggtccaacgtcgagtggaaagacaagtgcggtcgagtacctcgctcgtcggaccggccatcgattcgttcgtatcaacaaccacgaacacacggatattcaggagtatctcggtacatatgtttctgatccggacaccggcaagctcgtcttccaagaaggagttttggtccgtgctgtcagacgaggtgattggatcgttttggacgagctcaacttggcccctacggacgtgctcgaggcgcttaaccgattgcttgatgacaatagagagcttgtcattcccgagacccaagaggtcgtcagacctcatcctcatttcatgctcttcgctacacaaaacccgccagggttgtacggaggaagaaaggtgctttcgagggctttccgaaatagattcctcgaagttcatttcgacgacgttcctcaagccgaattagaaacgatcattcatcaacgatgccggattgcaccttcttatgccaggcgaatcgtctcggtcttccaggaactccagacaagacgacaggccggcagggtgttcgaaacaaagcagtcattcgccactcttcgggatctcttcaggtgggcgatgcgagaggctggagacactcagcagttggctgagcatggttatatgcttctggcggagagggcaagacgtgcggatgacaagttggtcgtcaaagaggttttggagaaagtgttgaaagtctcgattgacgaaaagaagttgtatgatctgtcctgtgagttgctgtcgaggttttataatcatatctattgctttgaactgccagcacaattgtactgaaaacattgctttgtactcctcacagcgtccgatcccgccgagattcagaaacgtttgggctgtcccctacctccactatcaactccctcatctatcgtttggacgagcgctattcagcgcctctatactcttgtggccgctgctatccggaataacgagccggttcttctcgtcggtgaaactggttgtggtaagacctcggtttgtcaattgttagcctcggcactgcaaaaacaactttttgctgtcaattgtcatcaaaatatggagacggccgatcttctaggagggcagaaaccgatccgaaaccgagcaggtcgtcaacatgatgttcttgaagagctcagaagtatactctcccgcatggacgttaccctttctttggaggatacgaccgagtccgaacaggtcatcgttgctgtggagacttacttgagcggtcttcctaagcctcttagtgaggacggaaaacttcttcgagcttctgttgcagagctcaaacgatctactgctctgttcgagtggcacaacggaccccttattgaagctatgactactggcgaccttattctccttgatgaagtttccttagcggacgattcggtgctggaacgattgaacagtgttctcgagccagccaggacgcttgtccttgctgagaaaggtggaagggatattgaacaaatgactattgtggctgctgatggattccaagttcttgcaacaatgaatccaggaggtgattatggaaagaaggaactctccccggcccttagaaatcgattcaccgagatctgggtgccttcattggattcccatgatgacttgatcaagatcgtcgattcatcttgggcggttgaatcactcaaagcatacagtgaatcagtcctgtcctacctccgatggtttaccgctgagttaggagagtctgggtccccagtaatcggagtccgagatatccttgtgcgtccgcccagttttcagtgttgttacatctgctgtgtatacttaatgctaaccggatgaacgattcttcgtggttttatctttccgtaggcttgggtcaactttaccaacattgctgtcaagaacttaaacatctccgagcaagaagctttcgtgagtagttagcttcacaccttccatgttttggtgatatgctgacaatagacttgtcatcttgcttaaccacagcgtcacgctgctcacatgactgtcatcgacgggttggcccttctgccccaaacatcaggcctatcgtccatcgcaatccaaaatcttaagaatgagtgtgtcaaaaagctcgaccagactctcggttcttcttctctcccccaagacttcactgttttggatacgcccgaggtcttttcagttggtggatttggggttcctaagggtcatctcgccgaatctgcttcaagtttcagtcttcgggcacctacaacctgcgctaacgccatgcgagtgttaagaggctgtcaacttcctaaacctattcttcttgagggtagtcctggtgtaggaaaaacgagtttgatcactgctctagcctccgctgcgcagtcccacctttgcaggatcaacttgtccgaccagacagatttggcagatctgtttggatccgatcttcctgttgagggaggtaaacccggagagtttgcctggaaggatgcggctttcctttcggcattgcagtctggacactgggtccttctagacgagatgaacttggcgtcgcaagctgttcttgagggactaaacgctgtgctcgatcaccgaggtaccgtttacatccctgaactcggccgatccttcacccggcaccccgatttccgaatctttgctgctcaaaatcctgtcggtcaaggaggaggtcgaaagggtcttccgaagtccttcctcaataggtttactcgagtctacgtccacgaattgacatccgaagacctgttgctcatcggccagcatatgtaccctgacttctctcctgaacttcttgccaagatgattgagttcaacagccggcttcatcttgagaccatggtgcatcgttcgttcggtcgagatggaagcccttgggaattcaatcttcgtgacgttctccgatggctgtcgctccttcattcaccttcggcgttagacaagcgccctggtcaccctatagaacatctgcagactatatatcttcaccgtttccgacaggagcaagataggatctgcgtgttgaatctgttcgaggaaatcttcgcggaaaccctttcgctcgaaaaccatcctttaccctctaccactccttcgtctgttcagtttggtcacgctctactctcgaggttatccagtacagcagatgcctccaaggacgaaaggctgtcggttcttcaaactcagcttgccccgttagaggccatcagtcgttgtcttgatcttggttggctcatcatcgtttccggaccagctgccagtggcaaatctggtttgatccggttactcgcgcaaatgtctggtcagcgtcttcgggacttcccgatgaactccggagtagacacaatggaacttctgggtagctttgaacaagctgatgcctctcgccgcatggatcgaattcgacatcgattagctaacttgtcaagaaaagcgttagttctcgcagtcttcaatgactctgagtggtcttcgctatctgcggcattggatcacctggatgaagcttctctcactatcgaaggttttgttgtagaggccttggccgtcttgaaaaccctggaagccatgctcggcgatccccattccattctagacgtggtttgggttcgatctgctttgcaggagctttctgcgtctagcagcacttcaggtcgattcgagtgggtcgacggagagcttgtacaagctctttcagcgggagactggctagtgattgacaatgccaatctttgcaacgcatccgtactggatcgaattaactctctctgtgagaccaatggaacgttggttttgagcgagcgtggtacggtcggtggggagcctcagatcttgacgcctcatcccagtttcagattgtttatgaccctcgatcctcggcatggagagctctcgcgagctatgcgtaaccgaggtgtcgagatctgtttggatgccatcacttccccgtatgatctcgcccaaatcactcggcaatctcgacaatccttgacggagccttcggaccttacttcgcttctggctcatcgtgccttagctactttcgacacactgccagccactgtgcctcgacaatcctggtctgcttttgcttctcaagattcatctctggctggaattctacctcaccttcctactccagtactagaatctgaacaggttgcttctttatctctcatcccccaacaagttgctgatcttctgcacttgctatcttcaactgctccatctacttcgaacattgtccgacatgttcttgccttgtatgataaggctctgggactgccattatcaagccacctttccacggctctccagaatgtctttgatcctcagattatcgatttgataactcaagcctcgaaagagaaagtattccttccagaatcattcgtgaggtaccaggtgagtactttaaattcaactcttcttcaactatttgaacttcgtctctctctttttccttcgcttccactcttgtgtaggcgcgttgtgattgtgtagctactaaacaagtgctatacatgactgtttcagcctatcgaccccctttccaactcccatatctctgaagcgagtccccggtcactgttcatcagccaaatgattgaacttgttacgcgcacctcgatctcttcggccagcttcacgtcttcattatctatggccgctaagaagtttgtaaacgatctatcggtcgtggagaagtctttcctcgtcgctcagggccgaaagttacctgttccggtggatcaggtcaccactgcgatctatcctttgattagcgctttctacgctacgattgagcggtcactggctcctattctaactttgcagtcgccggctgatgaagaggtttgttgagtttcccttctctatctgccagtactgtacattgaacatgccctcgattcgtttccttctttcttttcagacaactgctgcgttctctcgatcgttctcacaatttgccgatctagtcgttcaactcatgctatccaccagcgctccagtgcttgattactctgcggtccaggtgcttgtcggttggctactcgagagtgccatccgaattccttcgggtctactcgatcctctagaagcccctcttcagaacttgaaagattcaattaccttcgataccgggcatggtcaacaggaaatctggctagcttacctccgaagaacctcacacaaatccttccgagacttagttcatcgtcttcaagctcttttcgatggtgtcccgacgactcatgacaacttttcgagtaagttcggtcgttgttccgttgacagcttagtccgaactgatcatttcccgtgtcactatctttgtagagcttcgatcgaccgctttgaagctatcagctacatatggacttgatcttatgaataacgatcaagacgactccagcgcactccacgctttggagcaggacatcgaaaaggtgtgaattcagtcttttcgacagacttacatcttagaataatgttcaatttttttgaccttcctctttcttcccttcttttgacaggcgttgatcgaactgcaggacccggaaagctccccaactttgatttcaagatcacgttccggaattttggctaccctcagtcttgatatcctttctagcctactagtctctcagaaaggccaaaacatctcagtatgttatagttacttcttcctctctggattgttcctcactattgggatgactaattcaattctttctatacttgtttaggcggttcttccgtcccttcaagacctcgtccatatggccgagtctgtatcctcgttcccattacaggagacggttccccttcaacacgccctctggaatattcaagctctaggtatgcattcatttctttctattccatgcttccgatcaaagatggctgacgttgaacatcactttcaataggccatatggataacttcactagcaaggatcttcttgagtcttggctaaagactctttggctggaagctgacatcccagaaggcgtaagtttaacatgagtcctacaaaatattttcagatttattgagctttttttccctacgtttaggctcttgctggtcctgcggatctataccgacctactatactttcagctctgttacatgacaagttcgtatattaatccatcagtcatatgtatcaatctgtagtgactaaattcatcttgattttttactctttagggatcaggatactttgaaattgaaagatcttccctcccttgaggtttcttccaaacagctcgcgacggtcttacgtatccgttccaagacccatactcaaagtcatcatgcttcgtccattgatctacttgtccgatctatcttcgatgtaagtattgttgtgaagtgtttctcctatgatagctgccgtatacactactaatcatacacttcattctacctgcaggtctgcgaggcttttgctacttcctacccggagaagctctgggagactttgcagaaagcatccatgccgagcacggccgatgagattgagaatttcgttgcatccctcttatcgacaagccactctcaacttcgagttgctcttcagcagcatgttgttcctaatgttgaatcacttttcagacgcactcaagataattcttccgacatgcaacttcttggtcaagcttgggttggcctctcgattgccactcttcagctctacgtccccgctattcctattgatcccgcagctgctcatggatccgagcttcgacttcttcagtatcaagaaacacagtacgaggcagaactcgtttctcatcgacgtgctgagcttgaagttaccggaaactcttctaacttcaagatcgcttccaagagcgagcttctttggagagtccaacaggctatcgttggactaggggccctccgagtagaccgagaaactaacgtggctttgctgaatacaatgttccacgagattcatcaatttttagcccaagtgattgatggatcgagagtggatgctctgattgccaacattgccagttcgagtgcaggcaaggcagctctggaagaagattctctccaaagcaacattcgtgggttcttacggcgaatggatcagatgtatcatctcttctccgatattactcgaccaattggcgttgccttgatgcagcttcgaaccgggttccgcattctcgcccgagacgcagagatgcaatcggctcttcaagcgactcagcttgagtcgactctcgtgactactcttactgctttccccacgtctctcggaatcaagaatcttcgtcgatctgaacttcctattcgcttcaagtctaaattccctgttgttcctacttcaaaacttttactcttggaggtagcctccgttgcgtatgatctttctttgggcatctcgcttgataaccaggttgtaggggctttatttgggctcttcgaccaactctctcatctttggatgatggatcgtgagcgagaattacaggcccaacaagaggctgagagtctttaccgtcagcgcaaggttgatgaggagattctttcagacattgagctggaggagaaggagttcaaagagcttttcccacaatacggagatatcctggatgacgatgaggccatccagcccacttctgccacttcacaaaacaagtctgctttcattcagactgaacaactgaaacaaattggtcgattgcacagtaagtcgcttcttcgaatatatctcatctaccacgcaaggaagtaagcagcaatctgacatgtaaatacaaattactgtattctctagttgccatcttttccaccgctccgaatcaagactgcaatcacatctaccagtctcaaagagacgatgttattaaagacgttttcgacaaagccctcaattcactcgacgattctattgatgatgccctcgcctatcaaatccggtcgttgtgccaagaatcttctaagcgaacctcggttcctaccttccaggagcgaccttacgacttttattcggacgccaacccttacgagatgaacaaggccgtccagctcctcaaccggcttcttgtccgtctggaagatacattgagggagtggcctgatcagatggttctgcatcacctcattgatcgatgcaacgctatcttatctctttccctcggaagtccaattgttcgggtgatagctgccatggagcaacttctccttcataccgccgattgggaatcttttgcaaaccgagaaaactctctcaaacagttccaaaatgagattggaggactcatagtcagctggcgacagcttgagctatcttgttggtctcagcttctcgagactcaggctgtgtcatatgctgaagaagcttcaacctggtggtttaagctctacgaagttcttatccagggaggtaaagccgcttatctcgaagacattcagaatgaaacgtctgttgccgtcgaaaaccatatccgtggaatagtgactctgcttgatcagtacatagcctctagctctcttggccagtactccgccagacttcacctcctgcgctgctttacccggtttatgtcgcttctttcccaatcaactggtaacttccccggactgaaaagaatttcccgaactttggagagcatcactgaacgatttagtcttgccgaaatcaatatctcgtcgtctcttcgaacacagcgggctaagattgagggaagcgtccgagatttcatcaagcttgccagctggaaggacatcaacgttcacgctctcaaagccagtgctcagcatactcatagacaacttcatagaagcattcggaagtttagagaggttcttcgtcaaccctgcgctcctcttttgggagctccagacatgcttccttcttcacaaggaccttctaccatcgcggctgtttcaacttgggcctctgtcgagattggccaagcttcagagctcgcacttccttctcatttgaaaagcaatgcgtcgcatcttgtcaatctatcctctacgttttccaagttccgaggaatctttggaaccactattcgaccagcgttatcttcgaccaagtcggcaaccattgatgaacttacttccgagattctttctactgccaaatctttggccgatgagacccctggagttgccaacgaggagaattctagattaatcaaaaatcttctcactcgaaaacgacgagcttatggagatttgctcaaagaactaagacgaatcggtctttcctctaatctgaggtctgatgtcatgtctcgacaaacgtctatctccactctgcattcgttgccaacactctccaaatctcttgtcgtctcggaggctttgactcaaatgacctgtcgagttgacaattaccatttccgactggtcgtttccatggtttctcttcgagactctttgcgaacccacagtcctgacattactactcgagatcttcagagaggtatcggttttgtggagagtgtgctttctgtagctttggatcaccgtattcggtaagtcatgatcatagaacaccattccctatacattgctaatttgttttattatatattttgtagacttgcttcggctttggaagaagtcaacgagttgaagagctgcgtcggtcgactatctgatatcggtgcttctgactcgtctgaagctatcgcttgtttcgataaagtctctattcccacgctttcttctgactacgacaccatatgtcgaaccatagacgctctacaagagaccttggagagccgaaacgattatggaacaactgtcgctccgacctccaggggaacttcgactgaggttgcatcgagaactcttctgagcgcctgcttgcaacaggccactcgcatcaaagaagttcttggagatgtcttgacgaccgttaaggccactcctttcgcaattttcctcaaaagtacgtgctatcttctctatcaagtgacaatcatggccgttgatcacactctactttgatctgctcagaggatttacacgttattgaatcttgccgagaattcaaacaaaatactgtggacgtgcttaatcagctatccttcgatgaacctcacttccgacaactatacattggaacgctgagcctggtggacatgctctccctccctactccctcatcatttgcaactgctcctcaggctgatgctatcctgcttgagaaaggagacaaacttcttaactccctcttggttgttgctcaagaacttcaaactgtccgcaatgtgatcactgaagaggatgcagatgccgatcggttccttactgaagagtcgtctcttcaaacaaaggcttctcgaactttgcgtctgccagagattcttcaacaactcagagatcttttcacccaaccggccgatctctccacttcctacctcctcgttcagcgtatccgacctttcctcgtcgagtatgctactgcagcagaatgtcatttgaacgctctagcttcatggaccggggctaacttcaagcttactcatgtgctggttcaaatcatctccaacttagctttgaaaggattctgctcccctcctgaagctgaagatgctggtgctggcgagggggattctggtcagactatggagggatctgggatgggtgaaggaacgggtaatgagaatgtcagcgagcagatcgaagatgaaagtcaagttgagggtcttcagggtgaggataacgagccccagccaaaagacaaggagcgcaacgatggtggcgctatcgagatgagcgaggatttcggaggtgagatggaagatgtttcagcagatggttcagacgaagaagacgatgatggttcggacgaggaggaacaaaccccggatgagcaaattggtgatgttgaccctctagacgagaatgcagttgatgagaaactttggggtgatgaaaagggcgaggatgactctaaacaggatgaacacttggatcaagatcggtctactgagcagacacaagtacgttgtctgcacattaccaccgaactttggcaattcgctgacattttaacttctcgccttacagaattccgatttggtcgctaaggatgacgaaaaacctcgtcaagagcctggacaggagaaacctgaaggcgatgctcaagattctgaggatcagtccgaaggagaagaagcccctgaacctgaaatggatggggaagacgaagatggtgcagctgaggacagtcgagacaagggagagaagatgcctgacaatgttcccgaagccgaaacacttgatcttcctgactcactcgatctcggggatgaggaagggggagatgatgaggagactcagcctgagggtatcgatgacgatcccatggacgatatgccggaggatcaaccacctatgccagacgatccttcttctgcccaaaaatcttccactgaagacgaccctgcgcagcctgaaaacgtggacgagggagaagaaactacccttcctgagcctggggctgacgataccgaaatccctgacgaggacgaagatgcgcctcctgaatctgccgaccaggctcaggccgaagctggagaagaagacgcgccggagggcgcggaggaggatcaacaggttgctaagcctaaagttgaagacggcgctgataactcgaatagcgctcaagctcctgatgaacctggagatgaggctggtcaagatgacgctccccaagatcaagaggatggtaccaagaacgatgttggaaagcaagcccagtctacggccgctgatcagatggatgaatccggagacaccgagaacgcgtaagtcaatcagcgttcaaatctcagagttctttaacgttaagcttacatcatacgtatgtatattctacagcgacagctccactcaacctcctccgactgctggcgagtctcaaggcgggcaaggagaggctgttccgcttgacgagagtcaagccaacgaacaagagatgcctcaacgtggcgaagaacctaacccgatgaagaatcttggggacactatgaaggagatccgacgtcgacttgatgaaatcagtgaagcaaaggagaatgagaacgacactaataccgagaataagcctgaagccgaggaggcctctatggaaactggtgagattgaatatgctaaagaagatgatgatgaagacatgcaggccctcggacccgctccagaagatcagacccagaatctgtcagatctgcggatcgccgacgaccaacaagaaagcaccgagatttctcatcaaatggatattgatgaggaggacctgcccaaacccgagcagcctctcgttatcgagcagcctcctgagcttgatcaatcggctgacaaggccctcacggagtccgaagtgcgacaacgtgggcaccaagaccagccgcccttggatattgagcctcgatctcaactggaagaagaggaggatgttgcaccgttgaccgaagaggaagccaaaatgctcgatcagcaagttgagctgatcaacactcagtggctcaactcggaccgatcatctacttccgcggaggagatgtggagattatatacctccctcacacacgatctttcgcactccctttgtgagcagcttcggctgattctggaacccaccctggcaactcgacttaagggtgactatcgatcaggaaagcgactcaacatgaagaagattatcccttatgttgcttccgagttcactaaagacaagatctggctgcgacgaactcgaccaagctcgagagaatatcaagttctgctcgccctcgacgattctcggtcgatggccgaatctcactctgttcatcttgcatacgaaaccctagcactcgtatctcaagcaatgaccaaactcgaggttggtgacatcggaattgcaaagttcggagaggcctttgaacttctacacgggttcgaagagaccaacctatcggacgataagggtgctcaagtgatgtccagattcaagtttgatcagaaagcgacgaatgtactttcccttgtcgagcgtagtcttcaagttctcgctgatgcgagagatcgacgatctaccacgtcttcgacagccgccgacatctggcagctcgagctcatcatctcggatggaatctgtcaggaccatgagaaactccgaactttattgaggaaagcagctgaacagcgagtgatgattgtgttcattattgttgactcgttgcaccgatcgacggcaaacccttttgcgcctgcaggttctgtccctgaacctgcatctcagcagcgaaactcgattctctctatgaagactgccacatacgagactggaccaagcggtcatatggagctcaagatggagagatatttggataccttccccttcgaattctacgtcgtccttagagacgtcgaagcgctcccagaagttctcagcggcacgttgcggcagtggatggagaggtacgtgtctctaagttctatcagagagatgaagcgatcgaatgactaacgcgaacttgaaaattcatgatcaacagagtcagcgaggagtagaaggtgatcctactgtagtaggcagagttttcttcctctttcgaggtttgtcacgttccgtctatttctctaacattcaaacatgaactaatctacttctcccaatatttatagaatgttattttgctccttttttcttccaagcgtttcaaattgatacttttgtcacttcatttatcttctcttatttcccctctcaaactggtattcagttgtagaaccatctgtacttcaatataaaccttcaaacaagattagaaatctcataaggccctcccggacaccatatctggttttctttttcccgtcgtcccattgcttcattaagaatatacaactttcaagcttgacagcgcattgacgtatgttcatgtagatttttcatcagtttcttcaggaaggaaaaagacactaggatcaatagacaattcatgaaccacctaaccaagcggtatcgatttcgatcccagcatagctcttgaactttctaccagcgcgatctccactacgaaaacagaactgagaaccatagatgtcaaactcaagttgaattggtggcattggtgatgttgatgttgatgttgatgctgatgctgatgctggtgacaaagatggcgacggtggtatcggtagaggagacgctgagacagcggaaggagcagattgaagggtgtcgatcacgatagttgctggaggaagggatattcggaacgtgaaaattccgtttcgtttaggaacaactttcacacaacaggggcgtaaagattagattctgaaatctaatggggtcaagaaagaaggaaggaagagaaaaaagaaaggatcaatagcttacctttcaacttgtcttttggggttataattttgaaagtgttttctgtttcgtggattacaatcccttctacgcctaccagatctttgtttgaagataccttgactacaaacggccaaagacaaagggtagaagagcgataatagatcgtaagcctgatatcttatgagaaaaagcactattaatttaaacagcttgacatacctgtaagaaaacatcccgtaaattccgctttagcaatc

SEQ ID NO: 288 - DNA, 24299 bp, Xanthophyllomyces dendrorhous
ttagcaatcttgttctgcaatgcctctgcatttccggcccacttccctcccaacccggttttaacatttggcttcgtgcctcccattcctagcagctgaaccatgtactcttcccagacggtccggagccctgtaaacagttcaaatcgacattcccgtggttttggcacccaaacgctcttccttttggcttcttttctgctcaacaaaccaatggtgccagcccggataccgtcctgctttctacgggcctgtcctgcttgtttcttagtagctgcagctgagagacgctgaggattgacaagaggaatcgactttgcatgaagcttggtcgcatatgttgcggccgatgactgtatagaaggaaggaggagactaggcagtgagtcaaatgtaacgggttgagggatcggatcggatggtgctgatgaagtaaagagcaatctgttcgactggatgtgtatagagaccaaccgaaagcaaaggatcagtgcatgccaagttcagacccggaatcgaagatcctaccttagtgtgagccggaagctctctaaacacatcgatctcttttgggggcattctggatagctgaaggaataatagagcagaagaacgaaggtaagaggatggtaaatgagttgaatagtaaagaatcaggcaagtcgaaaatccagacacgcattgggttaaaataaattaacccgcaatacaagcaaaacttttatgtcgcgcttgaaccagatttatagcccatcgcaggttaatatttcgacccgcctttctttccatcgtcttgttcctgacacgtcttggcccatctataacgacggacgaacgaacacgttcaacttcgacttcaccttccctctccctctcttcactctcatacctttcttgcctatcgttgtcatatacataatcttgtttgtcgctgtcggcataatacatcgagatgtcggccccatctagagagagtcattctcgtaggcatggtagcacgtcttctatggcaagttcatccggtggaagaagaccttcagtacgtctctctattcttctttttcatgaagatgatgagcaaactacctactttgtatgattgatctgactccggtctctttgttttactctataattgtcattctatgaatcatgttcgtttaggagaaaactcgtatgttttcttgtaccgagatgggactcgcttgcccttctcaagctcagtttattcgccaacctcgtcctgatcgcttttctttctatctggtttctgttgtatgatttttcgattctaccactttggtgatctgcaactcagacatggagtcaggtaagttgaatttcgcttcgaaagatcagtgctgtaatcggttctccactgatataggatgtaccgatatagctgttacaaagctgctggtttccactagacagcttctctcagccctaacagattggtcactgggtaaaatcactgaggtcgatgtgggttctacttccacactcctataaactggcgtcatatgattctaagatgttgtcgcgtgtaggtttcggatttttatgttcgtctaggaaatgatttcaacacggccgtttccgccttctctgatctagaaatcaatatgaggtacgggtgacagccttttcataatcccgtttcacttcgttctgttgagctcacgcactgctccttgactttagtgatctactggaagtgccaaaccggttacgaaactgcctcgaacgatgcatcaaccaagacccctctcctcaaaatcttgagcattacctgccagaaattcgacagactattgtctccttactccagggtctcaaagcaaaacaggcgttgtacaaatctcgaaaagatgatgaaaagcgagctagaatagtagcagcagagcgagaacgaacagagtaccttcgacagcaagaacaggaagccaggcaacccatctcacgtgtcgaccctgccgttagagaaacaggacaagatcctgatgaacgagcgctttttaccgaagacaatcgatgggtaccaccaatctcccagaccaatcaacgttatcaggctgcactaccccgtcctcagctttctgggtcttctcgttcccttccgttaccagaggcatcacaacggcctccatctatctccagtagacctacacaaaacccttctttacccagatcgtcatttgatatagcaccgagccaatttcattcccaacaccaacagcatcacgtccctagctcttccacactcaactacgtccctcatgagtcaacatcgagtactagtcgccccatttctcctacatcagcatctgaatctgtttccatccattcgcagagttccagacggccccatatctcatctagacatagagacggacctctcccggcacctcctccagatgcatttaagccaaccagatcaagatcaggtgcttctccttcagacgaaagaaatttcagtgggccgacagaagaaatgataggtcctcctttgagagtttcgaccacgtccctcccacccactcacgcaggtgcaggggaaccaccgagtcgaaataaccgtagttcccatcgaacgtccaactctgctgtcaattcatcaacgatggacccatcacgatcaagatatcagcagccgcctctcgtttcagagaccgatatctctaatacagacacgacatcttccttttccagaccagccttgcgacattcactttctgacccacccgtttcgcctaactttgccacctctttcacagaatctgttcttgtcgaacttccagtgcctccaacgatcaccgcccaatctgactctaccctggatctgccatcctcattttctaacgattcgaccgacaaattgtcaccccttcctatactcgctccggtggttattgagcctcttgcaggtccatctccttccagtcctcctaatgcggtttccatagctgatcaaacattgtccaatttgcgaggatcgggtaatgggatctctcgacgggcaagtcaacgatactcaagttaccagatcaacaaaatcatggatgctggaggattgggagcaatctccaatggagacaatattggtggaaatgagggaacatcgggaggggggcccggtcgatcaaaatcttcccgaagactttcaggaattccagatgagagttccttggagggcaagtcgtccaagcttagtcctgcccgttcgccccgtagcgtacgaataggacctccgcctgttcctgctcttccagaaggaattggagctacccctcgtcgaccactgaacacagaacgattgttcgttccccctgctgaagatactggggtcgaagtccgaatagaggctgacccagatagtgattcacccgtggcaacaataaacggaggatctgttgtcaggtccccatccgcgttcttgtcggctcaaagatcaaaaccaccttccctgatgtcattgtctgaggaagatcagtcgaaagaacaggagtcactgcatgtagcttcatcagatcgacccattggtgaagtggtcaaacctgcgggtgggcgagctcgagagttagcaaccgaagccgtaaatcaggtggaggaagagactgaacaagactcggcagcttctgactctacacggtcgatcacggttttcttagtgtataatagggaatgtaagaaatgcgtggttgaggcaactcctacaatcccggcacttaggttgctctttatggaaaagttttcgtacactgccgagacggaggagtttccagcaatctatattcaggacccaaagaccgaatggaggtacgagtgggaggaaggagacaaactgggtgatggggcaatgctgagtttaaacatcgagcgtaagttctcatctctcttctttcaattggttgatcgagggcctgtatactgatgagcaagactcgaaacgaaactgaattttcaaactatcagcgttggaccaagtgaagcaacatattgacagccagatcagcggtctatctcgaaagttagaggacttgattagagaatctgtcggaccgctctcctcccaatttgccacacttcaagctagcaacctacaatctcaccggttatcggccggactttcattagctaccgccacgcaagcccggtcctcgtcatcgacaaggtcgccctcacagaacataaaatcaggacacgaaggctcgttacctaaggtcattcgaacagcaattctctcagactctgcctctccttccgcgacgatcaaggatcagtccggttcggtcatcaatgccgtcaatatgacctcgtcacaagccagcacatctccaacaattgatctgatatcaaccttggttcaaccgtctatcgctactagccttaccgccttgacagttcctgcagacatccaccaaacactacgagctcagctagacgagattcaagcgttacgtcgagatctcggtgtagccaggcaggtgcatacagatggtatggccgtcatgaaggaaattttcactcgtgttcggaaggagaatcaacggctccgagaagttgcagcatcttcattgaacaccggccgggctttcgtcaacgcaagtaaatccaagattgacatccagtctcaggagacgcttcgtcgaatggaagaccttcaggacgtagttgaagaactttatcaagacgtaacagaacggatggtcgttcctaagccaatggtcatgcgttcattgaaaaaggaccttgagcaggctgaaggtcagctgaaagaactcctttcaacgaccaaggcggcaacgaccacatggcgagcgacatgggccgacgaaatggaaaatgtgatgacggaggaaaaacatctcaaatatcatctcgcgcttacaaacgacattgaggcagactacaacgagtgtaaacgagtgtttgatcagatcacgctttacgccgcccagcgaggggtcggtggttctcatggggggtcaattggtcgctctggcggaagcaactcatacagacagctagggcttccgacggaggatcctcagtcatcgttatcgacagttatgtttcaaattcaaggagctacggtcgatcccgaaaaacggcttcgggcaatcgagaacgcagcccggatgagacaaagggagatggacgggcagaaggaagggaatgagctgacgagtcaactgagtgagttcgttgacggaagaaaacttcgaaaaacaggtggggttgaagagacggaacggttaagacagaaaaagaatgagttggcgctcaagggagtgatagggggaggagtaggtgtcttgaaatcggttccctcattgacaactgtcaaatcggcagagacgacaccggcatcatcgtcatcacctatacctacggtgacagtggagccgagcgaaagcataggctctttatcataagtttcagatttgaccaccaaagaacaaacaccgatagacactagaatccttgacgaaagtcgtactgaggcaggatcaggagattcagcaaaggcaaccgagattaagacattcccgtcttcaaatactgtagatacatcctagtttcctagatctgttctgtccataattctgtctgcttcttgtcttcccggtttgattatctattgtcaatgcggcgagccccaccctcgatacgctgctaccttcttcgccttctcctcgtggtgatttagttgtaaacaaaaaaaaatgtatcaccccttatacatatcttgctaattagtttaataatgcaagatctttatgatgttctgacatgacatacggtgactaacccggacgctaacaaagtcaagagacacaatccatcaacagaccaaaccaaaccaatccttccttcaaccatgtcccagtatgtgcacacctttgtttccttcttgccatcctcgctgctgtaactactcttgctgattgatgccgataaactatcagaagcatcgaaatccctttccaagctccgttcctgcgctggtctccatacgcggacggaccagccacaggcggatggtcacctaacggtctagggtatggcactacacagccgaattcaaccggagcctttcgatggacacagggtgtcggaagcactctagaattacaatttaacggtcagctacatgtgtctttaattccttatgtgactttagtgtgtatttactgtgaaagctgagaggatggcttgggctctttggaatgtatattgtcgatcacaggtacggcggcctatgtatgtgtctcttcctataagaagccaataaactgtatgatgttaaaccgtatcggtcaagagctcaccaaatcttttcttgggatgcctcgcagatttatggctcagtctatggctcgccttcttacactgttacattagacgattcaacgacgtctcctgcggtcgacaacaccgaacttggctcatttactggtttatcagcatcctctgaacatcaattgatcttgaatgtcactgaggccggaacagatgactggttggctctcaacaaggttgttagtgagtccttttctcaaccgatcttcgttgtctgcttgcatatgggacaattgtttctgactggggctattgaacgaatgagaaatgcagtctcagtaccaagaaatggtcaagcaaactatacattcgacgacgcagatacggatcacttctcttactcgtgagtcaaatattatgacaaacccgtccagaaaggggtatatgaagacattgctcatgctgattgtggcgggtatcggcacgtctgtttggagctgctttgtacagaggagtttgggggtaagcagacgtttcttcatgaactcagatgaatcaagacaccgtttattaacgtaacgttcctatcgctgaagagctggggctgcagcctctcaggtaagttttctgaattgataccttttactgaaaacatatatgaaactgagcctgctattgtcttcaatctccatcctatagggaacatacaaacaaactacaacatacacccaggctaagaatgcatacgcgacggttaattttacagggtctagtatctatatgttcgggtacgtcttacgttgttcagtaatctgagaggaagatcaagatataattataagctactgttgacgttgtacctcttgctcttattcgtgatagctctattcagccggatcacggactgtattctgtttcggtagatggacagccggcgacgactttcaacgggagttctcgcgctggtcttacgcaacaacttctcttctttgggtcaggatacgacgcgtccaagacacatatcatcaccgtaacggatgctgatggcagtaagcttgatatggactatattgtcacatgggcagctccagagtaagccgcgtccagttcttctgagatcaaccaatagtcctatacatttctttggtggagttgtcgtttatggaaaaaacacaaagaatactgattgctcgatatcgttcattttggattcaaagtactacacgacaaagacagatagccgggatcagtgtaggagccattgtagcggcgatcatcgtgatcggtgagttcacttgagcataggctcgtttcttctgaagtcaggcgacgctgatgattgattatctatcaggtgttgtcttatggatctggaggacggagagaaagtatgtttgatatacagttgtttttgatagtgtcaacatgtgattgactattttgcatgttacttctctcgggttttatagcggtcgaagaaaactcaatacctatgtaggccgacacttgccatatctttacatgtcttgaaacacaattatggactcactcagattacccttctttgctttgacagattcgggagtatgtggagaaatctcagcaggttcggttgcattaaatctgctacccgatgtccttcaaccctgtacatgtgtcttttgcctgttttattatatgtttggtttgatgtgtcacttcgtttgtgttgatgagggtgtactgtatatcgacaatgcttgaatgaacccacgtttgaaatcttacgttcactgttaaggttaaagaaagttctgcatagatcaaatatgtgtctcggatggaagacaaatgaagttcgacgaagattaccaagctaggtcttgaaaccttgtattgcttttggtcggtgccaccggtctgtaagcggacatttgaacgaaacttacaataagaataggtagagaaagaaagaaaggatgaagaacgacatcaaatggaagattctaagatggtagacaagggggtatgagttggcgagggaagactataagacgagttgacgttttttctaccagatcttcatcgcgctacacggatgaatgtacgaaagaaccaacgctgctctgactgattctctttcagtgagaaaccctagctctagcttatcaaatggttcatgctgatagcagaatcatgactatcgtgcacatgatggataacgcaagatgaagcgtgcatctgcgagactgaattcaatcaagtgaataagttgtgtaatattcctgcttaaccgagttcctacgaattcagttagtcactcgcttaaggttgtcatccctcaacatccattctcacatccatcctccaaggctgtataatcttcaaacggaccatgccagcctccaaacgaggtatagacaaggcgaatctgtcctcagacgagattctcgctaatcagcgagagagaaatcggaaaaaacaagccgctttacgagcgagacgagctcagaagttactcgaccttgaacaggagatcgcccgattgggtgggaaccaccacccttctgcaaccaacgggaccggtgcacactttggatcttctctagtgggaagccagttgatggatggatcttctcagggctcagtacatcttgatgggcagagagaaatcaggaagttgagcgttgtcataggcagattggttggaaagctcaaggagtttggcgtggatgatgaggagatccgatctatgacggaggacggattggaggaagagcttggggaacaaggtatcgtagagaatctgatgcaggctgaggacatcgaacgggatgggaccgaaaaatcagaaagagaagctcaggaaggtacagaacatgaattgatttcctcaattgtttcacatcactcaaggtcccttggttgatccatccattatacccgggaggggaaactttcttgaaatactcccttcgtatttatacagctcaatacgcagactacatccgtttatcaggaggtgacaagacatcatcattatcctctggacagacagtaccctatccgactaactggccatccccacctcgagtcgacccaaatggccattcagatcctcccgcttctaccacctcctctggtgaccctctaggaccctaccctgtatcccagccttcttctggcacctctgtagccggaggtacgaatatgatcggaattgacggactcctcacagattcttcgtcgaacggaatccaggctagaaagccatcgtcagacaatctaataggaaatccatcgcccaatactccgcctggctctgcttttccttttgctttcgtacgttcaacgggatcccttatttcttggcattctacttgtctcttttggtcttagatggctgtggattcatggttgatccttttctttccttttctttccttactaatcatgcgcaatcgcgtcttttgtttgtaccggatgtgaaatcctccatccagctcttctccggtccaggtccagcgggatcgatactccctcaacacgagcttcaacaacaacaatcattcatacgctcattgagtaccgatggtggtctatcgtccgaaatgatatctcgagaacctggtcaagacatgcctgtagaaggtgaaggcgagtcgacaggggaaggcataggtgcaggagtggaacaagctgagggtgaggaagttagggatgagactcagggtgcaggaggagaagccgacggggtcagtacgaacgaagggtttctagtggagggacaaatgccgtccccagaatcagggcacatgcctcctccggagtcggtggatgttgaaccagttcgtcttactttcgtctgttgatccctgtgttcctgaatatacgcgacttgtcgtgtataatattgatagacctgacccggactttaattgcaatcttttcattcgtttgttaaacgcctgatcgcgttattgtttgacattctcttcttcttcagacatacgatcatcccgaataaaccagggatcaggaagattttttctttctttctttcttatctttttcttctttgggtttgtactagagacatgtacaatggcgacttttaacagaacaattaatatggcttgctcgtggttcttgtacaaacacgacgcttatcgatgaagagtggagtacaacacatgtattatgaagcctttcacaagtgacaaagctgggaaaaccagagtacaaaagaataaaattgcaggacagaaagatattacaacgagagatgctagcatgaaacaaagaaaaatgagcccaagaagtacaagaacgtctacaacgggtatcggaaaccggcttggatctgagcagccgttgggccgtgggttccagtgtcctctccgttttcgagcctgacgttttgtttagagagatagattcgagtggcaacagcgaacaagatggcgaccacagcggcggccaagttgacacagaaagcgctgaggtatcgtggaccggatgtgtagaggtaagaggtgaacacattaggagtattggaaacagtattgatcaaggcgaggacgagagctcgcttgatgcttggtccgttggtggaaccagagatccaagaaagagtaacgatactggaactgtagaatgaagcgggcatcatcatcatggccacatatcgggcagcggtgttgagggttgagacagcgatgatgttcgccaacatggtcaacatcagcgggcacacgatgtgaaggaatcgctcttgggtcttatcagagtgccatccgttgatcatgatgcagaccacacaaagcaggtagggaggagcggtcagacagtaggtgatgtttcgagagtatttgagggttgcgaccacactggggaagaaattggtgacagcggcggcgacataggtcgagaacaagatacccataagcaaccaggtcttggggtcggacacggtcatcttgaaagcctgaagggtggaaaattcttccgagttgtccttctgtcctcggtcgacctggagagtgtactcgaggaaatccttttcggtgtccgaataccatcgagcagatcgaatggtgtctgtttagtagcagcagaatgatcacaaaaagattcgagccgatcaaagcatgagaggatattgtcaataatttagtacacatattgtagaaggagtgatgaagaggatagccttactaggaaggatgagggcacagcaaagggcacatccgacggtcgccacaccctcaacgatgctgattgatttgaacaaacaccaactgttagtcagtatatttgcatcacacaaagcgaagatcgacaatagtcatagtgaaaatgagcgaaacatacaagagccattgccagccctcgattccgtgcttgccactcagtttgagaatagcaatgcacagcaaaccaccgaaagcgtttccaagttgagagccagagtacaggatggctgttcgcaaagccatctgcttcttggtgtagcagcaactgaggtagaagatagcaccggggaagaaggcagcttcggtgactccaaggaggactcggcaggcaagaagctggtcgtagctcttaactacaccagtgcatccagaaacgactccccaaagagcgcaagcaagacagatgtagttattggacgttgaaggcacaaatgtgtcaaccagagtaagagacagtcgacagattaaccggcaagaacagatagactcactaggcaggcttcttgattcgaccgatgaccatgttactgggaacctggaaagcgatatctatatgtatgttacagaaatttcgtgagctcaagatcgtgtttcttgacgaacgaaaagagaacgagcgtacatcctgcgaagagaacactgatgacggtcgagtattgttgtgccgagagctgtataaagttgtagggataaatcagattcagggttcatcagcgcaaaccgagatgatcggaaagaagcgggacctacatgaagatcggtgctaatcccagcgagtttcgcactagatcgggtaattttcaaacgaaattgatatcgtgagcagtcggcatgaatatgcatacgcgggaaacgaaccggagacctacctggccatgttttgacgatcaaggtagttaaggatgtatagcaagagcatgacctaaggatcgagcggagtagaattgtttgtcaaagtgctttcatcaagatagataccagaaaagacgggaaagggtacgaacaggcatgaccgaaaggtcgagcttcctggtcgccttcttctggagggcaatcaattcttcctcggacaagttctcgatacttgccggcttctggatcttgtgcgggtcgaaggcttcgtccttccagttctcggtgtgaacggcttcggccttcatgtcctcatcgaacgagtcgacgcgagctaagtcgtgtttggtgtccatgatggtagtgagtggtggtggtggtggatgttgggtataactgggcggaaacgagaactagttgttgggtattgatggagattcggtgtagaaggccagattggtgagggagaagaagaaacacagggacaggatgaagattgatctctctcgtccttttatgttgttgccttccatcggtctcaagacacctgcacacaaattaaggatcccgaaggtgaattttctggtgaggacgaccaacaccagacaggtgaagctcggccataccagaaccgcgaaatctaccggtcggcccgagttcagagatgttagtggctgaagtcagcgaaggcaaaagacggctatcggtctctcgacacaaacatactcggtggattgactgcgcagtaggttttaggcacgtgatcgatgcaccccaagctatagtagcccgctcatctatgcgtgccttgtttcccaatccgttggcctgccggctcatgcagggccgtcgggtggtaacattagacacttcttcaagctgtcattgccgtatttaattcgatcaaggctaacggcggctgtacaaggattgaggttggccctttggatgtaagtcccaagtgttccgaggatcgatgtccgcagataggctttgtcccaagacaaagagatcgccaacacatacgctgttttcctgagtgattattctgagggacccaaggaaaagaaaagatcagacaatacacgataaagtgcagtacgttgtatgcctgatttccaacttgaaaaagaagaaaagagagaaaaaaattacttccggccacctcggtgagatctttaggaccgacgagtcgtcgccgaccatatgtaatttatcaacgaaaccgtgtatcagatccatggccgaggcttgactagatgcatattaagtcgatcgactcgtcaacgtgttgcacagactccctagagacccggataagagagcttgataggtcaaccagacaagcaagtcggtaacgaacgttcaacagttttgtttcgggtccagctcatcgactggcgcacacaaagcagaaccgtctcagccggtgtccttatcaagataatcttctgcgcgcatcgattgtttgaccaggtgctatcaatctcaggtgaagactgagtaggcgaagctagccgatgacgacttcgatgacgacgaagaacggatcacccaaaatgaccaggaccacaggtcaggtctacttcgtagagaacgagtagtccaccataccacctttaagccgaggtagagccaaatacctgacatgtatcaatcaaatagtattgtcaaatagtagaagaatctctcttcgtcgttttggaaccatgtatcacaatagcatagtacactatcttgaatccaacgatcgattcagcatcgcggaagagaaacatgctatcaggagaaggtcaaacttggtcacaatattcacccacgacagaaacgagacacaagcttggggtaaagattggctccctgtcaactttccatctcatcagagacgtcgagcagatctcgagtcacaactttgagacaatgagaatttagcgcctttagagcaaggcaaaatcgatcctagacgacaataacaacgcaggagaaagttggggttggggtcaagaggcagcgacaaagtaccgagttagtatcatctctttgcacgatcgagtgtcggaagtaatttctcccaaccctggtctccactattctggccgacattgtgttacgcatggatccaagaataggcgtgcggattggaccatgttctcccactttgtcgaggtggaaaacacgtatagtatgccaatgggagcagctgtatatttcgtttcaagattcccaaccgtccaagaggacgctacataacctcgaatggaacaagatcaagtagacatacccgaaagaagctgttaacaggagtgtgaatagaccattccaaggatttggttgatagcaataggtggcatcaaattatgaagtacgtcagtgcgatgaacaagcgagatctacacgacgcagctgatcatgcagccaaagtgagtagaggactagatgacacctattaagaggttgaatagggtgtttcgtccttgcacacgccccgctcagtccagatgataggtaaccgtactttcaatgtcagcagtctgtcgggaacgatctcattcctgatcaacgatatttctcgccatctccatctggcctctgcagaccctctatttggtttgatttttatactttatatcccggataccgcgatggtttcaacaaaacggccactacgctctctccccccagattacttccttccccttcaagccggtttcttcgaaatacgttcggcgtatttacaaatctttctttacccgctcggcctcccgttgagccttctcatccatcaatcgctgctccctctcctcggtcttccgagcgtactcctgtccggcctgcataccgatggtaccgatgaggcactatcaacgttgagagcagagacgaaaacaaaagaggaaagaataaagttgtaagatgacatgaccgtgcatataggagtgacatgaatgacgcgcgtaggtgaagagaaaagacacagagtgggagtgaacatgcaatgtatatcgcgtcgtcctcggcagcttttgcggacaaagaagaacgcggcacgataaatgaggatatatacgcacgatagccaccaaagcgtttccagcggccaaaactcggacggcatcggctctatctccagcactaggaggaacctcgggaacgacagccggagggaggaatgaccacgttccggctggagcgggaggcgaaggggggacttagatcgcaagggatgcaaaaaagaaagggatgtcgttggtcgataaaagaagagaagatagaaggaagaaatcaagcgcaacgataagtaatcacggattgcaaataagtagattgatagctgtactcacggaaagttcgaagggaaggaatgtggactgtcaagtagaggataagggttgcgacttgtaggactagttggttgaatatgatcgcacgaaagagtgggtagtgtgagcaattggtcgaatcagaaacgctttgaatgttcacatacccaaggcacttccatcgaagaagatggcgctctccgtccaggcgttcaacttgagaattaacgccaacacaggcgagacggcgagaacatgtagaagtgctttgacaccaacaggggcatcccaccaggtctggtaatagacgtaagctttctcgatggaagcctcagtgagctgagaatagagcagatcataatcgacctttgaaaagagtgtgtatttgattggacgagcgataagatgtaagtctgacttttcatcactgggaaagttgagtaggagagaaaaggatggacgagtaactcacaatctggttgacaagaacaactccaaggaggaatgccgagcacgtgtagacgacggaagacagaaaggcgggcatgctgggtcgtgaggatgatggttggtgtccttttttcctcctttcccatgcaaacttttggcaagaatgggtcgaacaagcccaagaggttaaacaggttcatgaggcggctaaatatcacgtggcgttcagaagctgtgctcgcacatgtccgaagcaaccttgccttctctctgccatccgtcatcacaacaaacagtgaatagacatccatcctcgttcaattctctactatggatcgcgcgcaaaccactccattccctacacgacctcgtctcaacctgcctcttccatctgtgctttctcagcggacacctgatgagcttcgtcgactggaaggcgtctggcgagcattacgacagaccgagctatcggcgagacctacgactgtttggaaaggcaaacagaaagaattccgtccgtacgatgggccgaacgagtctgaatctgaggtaaacgcaaggactttgtatgaaggaaaagagaatgaatggaccccagacgtggtcagacaaggtgttcgattaacgaggagacagacttcttggcctgagaggaaggtctctaggtcaacgatcatgaccggttcctcgacttctctcgccggtcatagttccgtccaaggatctagagtggaccgcagtggtcaaaggtacccttctgcagcgtcaatcgtcagttcgtctcgtccatctcggcatgtgtcatatctggatgagtttcagtcgcgtccgccatcatcgctgtacccaatttcaagagtaccctcggtgtatccttcagggcctactgttgccagttctgaaagatacgcgtccgatcccactcgaaaatcatcccactcaagcagtcgatcaggaaaacaccagggctctccttctcttcctccgctgccatcgccagctctttctccttctacctcctcacctcggcagccctcttcatgtacaaaatcccacaatgccgaattaaaatcggatcagaagccaaagcttcaaaaccttccattacgacaaagaaataacgatcgatcaccaaatcgaagtcaattaaaaacacgatccgagtctgccgcacatctctttcaagcgcatcccatgaggactaaccgatacgatcgaccctgtccaaccacctcatcgacgatatcctccgagcttgacgtttcaattcaaccgatatacgaccagcatcctgctctcaatccattgagtacggttcatcttccggggaaagagcaagggctgaaacatggattcgtcagaatcgtccaagcgggtcggagcgaagccgagggagagagtagagtagaactctggctgagaggtgagatgtgggtgttgactggggatggacttcaggtgagttttctttcttgcagcaaatgtgtgtctttttgtgcgcgattttgctaagacattggctgagcggacatttatctagttgagcttttggagcgcatcctctctgattttgcccacctcggttgaagagtcagcccaagaagtccaataccttcctctccctgacgtcacgtgggatgctccgttcgagaagaaattggttcacgcccggccaggcgggtcgaccagtaaacatcgaaagcgactacggttcctcgagaaatggattaccgcggagagagaacgaacggtgtttgtacgtcctatcttccgatatgctggtgtggatgtgttgcgtgagcgtttgcgcgaatcgaatgaagggacaacctgctgaccgaacgatatttcatccgatgcacaactcggcatcaacgatgacgacgataaaacatgaagtctaagcttacactcccccctccagaatatccacctcacacatcactgactatctactcgaacccacctcacccatctctcaagctatacgttcgatttccatcttcttctcgccgttcatcgtaccgcactgaatcccgatcctctgcaggcgcatgcgccggaactaggattgaagaactttcgatccatcttgatttttcttcggaaacactatcgatcgaacgtcggtccaaaggactgtatgttcataaacgggtactcgtctccgaaacggaaacgaccggctcgttggtcggtcctgagattgaagggtgggagttgatgaggtctgtcgttcggcaaaagattggcgaggctgtttggaagggtgttttgaatcgatgagggaaggcaatctttggtcttatctttctcatttctcatcttgacaggaattgaaatttgtgagcatatggagggaggaaacagagatgatttgccaagagtgaaagaagtttttccttagtaaacataatctatagaatccacagaggtttggaaagatatcaagacctaaaagtgggaaggtacgaagaagaacgaaaaaacgaagtaacgaaaaaagcaatgaagaggaagaaataacgaaaaatagtccgtgcttttacaagagaaggagagagagatacgaaagaaacaatacacctttgttaagaaaaagactgcaacaaaaccacatagaccgttgacattaaggcaaggaaagagattgtccgttgaaagggctgaagagggaaaaatttgaagaatcgaatgaagattgagtaaggagaaacactcatcgcgcgataagccacacaatgaaccgaaataatattctttaaaaaaaagtaaggaaaaataacttgagaaaaccgtatcgatgtaaaaaaaactcttgaaagagagaagaggaaagctagaaaaaatagcctttaaaaacatgcaggttgcaaaaaaggagaaggttatggctaactcagatctggcaagtccgtttttggaggttgtgtcttttctggcgaacccttgatccggtgctccatcgagctcgtcagtccacccatcggtgtcttttcctccatgagaccaaactcccactcgccctctcgttccgcaccctttggggatagcccaaggccgctgagtgaccacggccacggccctgtgcccgttcctgatccgaggccctgtccgagggtggctcccgatccggcgctgatggggtacatggaagacattccgcccgagggtgtgaacggagggaatcctgttggtggaccaccccacagaccacccgatatggaatgaccataggccgagatgggggatggacctgggatatgcaagctcgtcgcgtcgttcgtctgtgagcggagagaagcgtgttccgtttgggatcgatccggatcggcgttgttggccgggatgagagggggaggggcaccgagaaatgacgtctgaaggtgaggtaggcttgtcagccgagctttcgacatggactgagtgtcagatagagtaggcgaggtcacctggacggtgagcttgtcgttgacagagtctgccgatggaggggggagaggaacgagaggtgtgtgccgaggggacaaagacgatacgtttggagaagaacgtccggtcgggtcagacattacgctagcgcgggaaatgcttgttcgagcgggcgagtatggaagccaaccatctgagtttctcttcgtcataggggctgaggctacgttggaagattcttgtccttctgctagtttctctgactgtggtctcagatggggagggaataggtgagtcgggacggatggtcggccagtggcaaagacatttggataagactctgcctgcgagtagaacgggggttgtgcttgatatggattgtatgggtagtgatagggagcggagttatacagagagtgagactggatgaagttagacgaaaaggaaaagagaatgtatacgtgtggatatagattggttagattgggtattttctttgtattcacaatggactaaactggcatactgacagacagatgagagcttccctggggattgaacggaatatgatttgggaacatttggttcaagaaagtagattcttggccaacccgagatcctggatggaagactttggacgggatgccctcttctgggacggtcgttgtcggttgaggttgctgagtggcggattccttcatgacccaacccgacgagacggctggtattgggactgatgacgaggctgatggatgggaatctagttgaacgtcagatgaagaccaaccggcagcgtggtcgcattctgattctgctgtggatgtcttggttgagtgtgagtcaggaggtgtattgagagtgccctgggtattcacaaaaacggtggccatgatggaacggagccggttgatctccccttcaagtagccggatcaccgtgcgttgctcgcgatcccgtctgagaagcacgagaaggcagatgagtagagcgagtaagagaatgaataagcagatgagcatagtaatcagagatggttaaccggagaaacaaaagaagaactggattacctctcggcttctctgatcattccttcgtaagcaactctctgagactctgaggcagcgagcagagcagagtttgtggagagttcgaactgaagctgggagaccagccgatcactaaagtctttctgtgccttcaggtcggtcagctcggacacctgagattctaacgtggacaagtggagtgcccgacgctctctaaagaaagagatgaaaggtcggttagagaaaaaaggtgggaggggaggaatcagagggaggacggggagagtaaaaggaggaagttgaagataccggtgagccctctgcttaagcctgtttctcgtcttgaggctgagtttccttttaggaaccccgctgtattctgtcaaatctatcccttccccgtccgatacagcgacgtctgggtcgtcatcttccaatccgccgtcgtcgtcgtcatctttcgaatccgtgctgttctttggacgtttcgagcctttggccttagtgggaggtgcggggtgtttcgaaagatgatgagcaggatgactaggatgggatgctgatggttgttgagagagtgagagtgagagctggaaggcagaaaatggaatgtcctggtcgacgtgttctggcttgacagccggcatggcgaccgacttgatgcctggaggaagtgatgaacgggatgaacctggcgaccagtttgaagaacaggaggaagaggaagaagacattgagccaggttgactccaccgaggatatgactggtcgtttgtcaggaccgaaggaaaattgttggccggaaaacgatctgcagtcgcggaccttgctggttcttctacttcttgctgctgtgtgattgccatccagggggatcgactgcaaaagatgaaagaagaaagccaataggattatagaaaggagacagaaggggagagagaagattagtcaagacgatgacaacgttgagagtttaagaagatattgttcgttctttctttctttttttttccttttgcttcttcctttagcggaccggcggcggatttgaggaaggacggacagagaaggatgcagagggttgaggggagagagacagagagaagcccgagcagagctgtagaatgtggcaggggaagtatagggtgaggatcagacggtcggtagagacacggaaagtatacagtagaaacagagagagagaagtagagatagaacacagcactcacacacacacaaacacacacgcacacgcaccgaaaatgaagaaggtaggaattccaacgggcacactctgaaggcgacacgacccgttaaacagaaccgaatgaaagggtgagaagatgactagagtacggatcgctctcggttcgggcatgaaagatattttggccggcaagagagcgggcggtgacaaacttcgggaggtcggcctcgcttgtagatggaaataaatgccaagagctcgagatgcggcgagaaaaggagagatagcgggttagagcgagaatcagggcaagacagaaatttgatcgctcttgatcaccacagacacaacccacgcggtcgaacggcgctctacgtcatctcggcctgatccatcccgggtcggagatcgactgccgagattccattacctcttgttcctgatttaccttgttcctaatcgggctgccctcgtcttcttcctcctcgtcctcgtctctttttccctcgtctctgtcatcctgaccgaccagactttgctccgccttccgaccgattctcagtccctctcttccacagcctttttaatcgtcttttttactcttgtttaacaatggcttggaaatgttcggccagttccaatgccgatgtaagtaatgagcgataaacagtcgattgcccgccgtctctttgttacacatattcgccctgaccgtacctggcatacacacatggaagctcgtggcgaatctgtggtcacatcgcttggtgcttaccccacaagtcgcaaaggcgatgaccgctgtggacagagcgtgttacatcccatttcggctagatccatatgaagattctcctcagtgagtatccgcgcatcaaccctcaccgatgcctatgttgtgctcttgctcaaacgcgttcgactagacctattgggttctctgctagtatgttcattgtatctcggctatctgatggccgtcaacgagagccagcttctcgctcacctgtctgcctattcacatgcagctatctctgctcctcatatgcaagtcttagccttttttttcgtctttttttttctttttttttctttttctatctttcaacagtttgtcaatagaaaccgttcacttaaatagggattttttcttcttctttccaattatcattattctcatctccgcttgacatttgcacccgtccttggtccatgttgcctcttccttctctctaggcatgtaagtctttctcaagactttcactatctaaacgttcagatctagcttgatctaacgctccgtcctatcgccccgcggacatgaaaggcgtatgcactcgaaaacacattccccttcatcaagccaaactcaaaaatactcgacgttggctctggatctggctacttatgcgccgtctttcatgagattcttctccaggcagcaggtggtgacaaacgacatccactctccaaagtcgtcggcgtagatcatctctcccgttggttttcctctatgattcatttctctctttcctaaagcccctttcttttcgtgttgtttcaaagtcatcttttcttgtttttcttggatcaactttttttttcttcttgttcttactcatgcctcccttctgctcaattgtcatcggtaagaactcgcgttactctcaaaagggaatctccaacgggacggttatgcgtctctcctcgaacaaggatctatacagattgaatgtgctgacggaagacagggtgagtgatgggctcacttgattgtttgtttgtttttcttgccaagtctcttcttttctatcggacgcgcatctcgtgtactgatcagtatgagtctgaaatctcaccgtcttctctcctcaggctggcctgcagaaggtgagcgtcagattcgagagcggaaacagagtcattaagaggaaaatcaaaacaaattctccttctggctgagattactcatttccccggatttgcaaaatctgattgaaccaaaaccaccctgacatgttgctcttccgcgccccttcttttgaaccatgttcgaagctcctttcgatgtgatccatgtcggagcagccgctgcctcaatgccacaagctctggtcgatcaagtaagttagttgaccccaaccctctaatcccaaaccttcaacccttgacctgttcgcttgcctaacgacccttgttttcgtcacgttttatttctgacaaataaccaatcgatcctgacggaaagctcgcttgtcctggtcgcatgttcattcctgtagggacgaccacccaacgtacgtctccctgcggtttttttccttgctgatcgctttctctctgcgcgatcaatgcgaattccgatctttcctgcttgctcctctttctttttctcttttctttttttttcttttcttttttaatatagaaatttatgaggtcacaaaatcag

SEQ ID NO: 289 - DNA, 6478 bp, Xanthophyllomyces dendrorhous
cacaaaatcagagactggacaagtaacgattaccaaactcagtcagttctcattctctttctttctgtccgttctttgcctgacctcttttgattttctcttctctttccttaacttactttcgccctttttctcctcttcccttaaaccttcttggactttccgccatgttacaatgacaaaaaaattatagtgggcgttcaagtaagttgtctctcgtgtaccgatcaaaacaccgatacaccccgtccggggctatcgcattcgtctttcagtctaaaaaagagggaaatcgtcaattgagatatttataaaccgatccacgaatttgtaaagtacatcccgctttgtgatgccaccgtccaatggaccgaagacgataatctttagggaatcgttctattcgtcgttttccttttcttttctttttttctctctctctcttttcctttggattctctagtccaccatatgcatttttagttctcctctctcggcaagcccactgatcacccagattcaatgtggcctgggttcaatcccgcaagtaacaaaagcataaccagatagagagattttctagatgttttcaatagcaaagaaagaggaaggaaagtaaggaaagtagaaacacggatgaccggagaccttgggaacccttaaagacaaaggaaaagatgatggaaaaagaaaagggaaaaaaaagagaaaacagaagagtgaacacctaggtctggtttcgtctctttcccctttctccttaacataagagagatatgaagaaaatgttcagagatttatataagagatttgggtggaatgagtgaatagagaaggggtgaactgtgaaaaagagtgctccctatacgcgcacacacacacacacacacacgcaaaaaacacaagcacaccaagagagaattctagtgatctttgatcagaccaagcactgaatttcatcagagttcacacacaacgacagacaagaaagagaaatccagggtcagaaacttgtactgctcgatgttcggattcaaatacttcatcttggaaagatcctcaccttaaggtctccgtcaagcatggcgagtcccgctcccaacgcccaaccgagctcgactcctctgagctgctttccaacgatgatatctcgatcggactcaatctcgtatccgagacccaacaacgcatgcatgaacgtcaaatccaagcagtactcgctcctttcctccaactctgccaacgctcccttgtttcctgcaaacttcttttgccagacggcctcggacgagcaagccgtctgggccagctgcttgacgtacccaagatcgaacgctttggtctcggcctcgtcgggggcgaagagcggtcggattcgatcatagaagtaggagagcgcgaggaaagaccccttggggaaggtgtcgagtagagaaggctggtacaccccgttgaaagagcatggcttgacctcacaaatcctattgttgtccgttcgtttgggtcagttgatggtgccaaaagccaaaggagatccgtgtctctcacggacatagaaaaaaacacttacgcgtcctttgccatgaccaactcaacgactcgcttgcaagattcataccctccagagccaccgaccatagtgacgttgactggcgacctgcccggaggatccaacgtaaccttcttgcttcttccggctcccaaacaagggctaacgatcttagtggattccgacatgtcctcccacaacgtatcctccttgccgaacgagtaggtgaaagcgacgaggttgtgcacgctccgtcgggctcgcatgagaccgtagccgaggtacgagtgctggtacagagtgaacgtttggccaccaaacatgagctcgtacttgtggtccccctcggcaaaggcagactcattcttgaacgttggttcaaacacaatctgggtggatgctccaccgaggtccatcaccgccagagtatccgtggcatctgatccctcgccgatcttcccgagcaagtaattcgcagtgatccaagcgtagacacctaaagaaaatgtgtttgaagttgagtcgattagtgggatgagaaagaaagagagtgggaaatgagaaaaccaaccttcatcttttccgtccatgatgacgaccggatcagttgggatcagcgggaatgggaagtctgacttgagatggtgctcaacctcggccaagatcgcgttgctctgcttcgctcccaataatcgaagtccagcagtcgccttgacggccaaaggcgaacatttttgcagactctccggcacaaccctgagagcttcgtcgatcaaagggttcaaactgccagctgcttcggttggagaatctttaaatgacgaaagtcctggttgaatagacttgaatgtctcgtactccaacatgggcgaagcgttgcagtagttgaacttgtatacgtggattcgggaaccagtcgagccagcgtcaatcatgagagcgtactggacgagcttcttgcctttgaaagcctttttgcaatacgtggtgcctaacggatccggatcggtctcgaatgaggtcgggcctttaggaacagcaacttcgtaagaggtagactcctttttgggagcatcaacctcgggcgtttccaccgttggctttgaaggtttcgtcggcttgttcgcgccagcctttggaggaatcaacggatgcttctcatgaacaccctcgccttccttctgagcggaaggttcgtcttcctcgtcttcaaagtcaatattgctaatcggcttggtggagctggaaccgcctttgaccggtttgtgtgggtaagacacatcctctttagaggcgggccaagaaccctctagctcgggtctagtgactgtaaaaggaggtttggaatgcgaagataagaaccggaaccaggaagatgaagaaaaaggataacttgtaggccctcgtgcagaagaaggcttgacgacaagaaaccttggacgaaccttcgtcatattgaagctcatccgaggtagatccggtcaatactcgtcctctgccactggcgacgaataacaacaatgcgatggcaacaccacccaacacggcatacttcttccaactagctccacccgccctccttcctcctgacccagatcgaggtccacctcgaccacccgtttcggcgtcgtaccggtttacgggtgtatatcgtctgttactgcctccgaacatgggactagcgactgccgaggatgatgcccttcggtgtttgatagagcttgaggaaagtggggatgaaggagaacgagtgtatgcttcagagtgagagagtgagacagagggaaggtctgtatggttgttttgggagaaaagagaaggaccaagaaaagaggcgagcccgacagatagataataaaaagagagagagatcccgagatgaattagcttccaaaagctaaaatatgaaataaacagatctatccatttccaagttacatacgctgagtatcaactgaaaatccgggccgtagggcagaaggcagattcgacagagacagtgtgggagaagacagcttgattatggctcaagaaagaagagaaggagacagagcccagaaggaaaaagaaacagaaagtgatagggtcgcttgaacaaaccgaaggaagtgtttgtcagaggaaggagtggcaaagaatgcaaacctggaaggcatgcacacttagataagccgggctgcgcgcacagaccgttcgggacgtttgaccttccatctctttccaagaattctttcaacactgtgtctggataaagcaagaaaccggtggaatgtacggctacaaaggcatattataatcggtgaacagattgaaaccccatcttgttttttttttctttcgattagaaggaaataaaggaaaccaaaagctatgcttgcgaagagtaacatcaagtaaagaacacacaacgaaagaatatagaaaggagagtacaaaatacgcggtctctctagacttggatcagatagaaaccggaggaatagatagacaactctggtgaaccaggttaagcgccttgatcgagtcacactggttgatgacacaactgatgttgatctcagaggctccctgagagatcatctcaatgttgattccaccctcggcgagtgtagtgaacattcgacccgagattcctaccatgttttgtagacgaccgacgagcgaaaggatggccatgtctcgctggacggtgatggaaccgatcttcttgagctccttgacaaccctgtcggtatctcgcttggtaagctctggaatagccatggagacatggacctcactcgtactgatgagatcgacaatgactccgaaccgatcgagcgttccaaagattctcgcaaggaacccgtgtgagatcgttttcctattcgagtgaatgttgatgatgacgatgctgtccttgatggtgaccgccgtgggaagatgttgcggccaccgtttgacaggaacggctggaaagactctttctgattcagagccgtcttgggcggctggagtatcagattgagggtagatcaccgaccctccacccgtcgggttctcaacgtttttgattcggataggaatagaggcccggatgacctgctccatggtaaagggatggataacttcggaaccgtagtatgtcaactcggccgcttcatctggggtaatgatggggatcaatcgggcggtcggcactttccgaggatcggcggaaaagataccatcgacctccttccaaacctgaagctcgcttgcattgagaccgacggcgcatagcgcagcacacagatcagtgtatcctcgaccaacctgcttgagaagagatccaggcacgcatccaaagtaacctgtgaggagtgtaaaggagggaatgaatgtttagaaaagttgtcaaaaataaaaaggataaggatgagggaaatagaagcaagagacttgccagtgacaacgggtactcgagtgccacactctttcagccgttcacccatctttttggcaagtttgttataaaagtcttgatcgaggctgaactcgccatcggcagcagcatccgagtcatcgatcttgtcgtcgtcgtcgtcagagtaggtggcctgaacgatgtgttcaaacgaaacaaactccgagtcgactccgttgtctctcaacgcagcagcaacgatcttgcaagataaacgctcgccaattccgatgatggaatctttggatcgatctgagatctcatcgatgatctgtataaagacgaaatccaatcagtctttcacgcaaaggaaaaacgttcggctcaaccacaagatctcggccagactcacctgagcagcgtaaaggaaagactttaggccatcgcagtctctttcgatctcctcgcagaggtctgcgaggagatcctggtctttgatagcctcactggcagccttcaaatgatcatccctgatctgatcaacagtggtctcgaatgtcgaagccgggggaggcggaggggcgtcgggtaagctcgacaccgaggaatcgagcgagttacaagaggacaggggctggaaaggactaggggagccagctctggacctggagccctgctgagattggcttcggagccttggtggaaccgcaccattcgggggaggcgtcgcagcagactcagatagagagagcgaattattggcgaaaaagccagatggatttcgggagagatcacctctgggggtcatggggaaaccggtgttgctggactgagctggtgcgcgagtctgagtggctgccttgatgagcaggttggtagtaccggtagactttgtggtgccggatcgggccgaacacacgacggccactctgtgctgagagagatatgagctgaaattatggggaaaaggtgtcggtaatggatatgggtaaatgtccataggaattggaagaacagtagtcaaacacatggcctcgttgtgttttcttcgaaaactgagaaaggaagtgacaagaggcagggataagaggatgaggacctacgggatgatagtttccgtgatgtcctgtagatttcagcaggacaaggtaatagaataacgaagatggattacaaggatcagacaacaggtctcagtcatgttttgatacggtatgaccatttgcaaccgagctttttttttctcgttggccatgctggaataaaaaaaaaagaaaagaaaagaaaagaaaagaaaagaaaaaaggcaacacgaccaagaaaaaggaggacctacacgtaaaaactttcctacgctcgttccaccatacttctgaacgacccaaccagcctcggccggattgccggcaagcgaaggtgctgaagaagatgatgaagaagaaacgtctgaagaggacatgaccgacaaaagagggacacgcggtaatcagagagcgagcttgaacgcaaatgagatcgtggttataatgagatgatgaccggat

SEQ ID NO: 290 - DNA, 7497 bp, Xanthophyllomyces dendrorhous
gtcttcggatatatttgaataaatgttaaatcgcttatcagcggacagttcctgatagattgtgtcatcgtgtatgcaatgcaggctaagtattaactttgcaaagtctgttgaaatgctaccccgccatgctcgctaatgttctaccgagtcatgcactgtaatgaattctgtttccaacaggcaaacactcaacactcgaagactctcatctctcctcgctctcgctctcgctctccgtctctgtatccctgaacccctcgtgttatctcttgtgtcgtctctttctctcttttatcatttcgctattcgacaatgtcttcagagttcgatgatgtcctcctcaataatagtatagtaatcgataacgttggtttggtgtttctctctctacctgactcaaacagtgcctttcaattgcttacccttggctcttgctcgcttgtcccgccctttcaaccgcctgactcgaaccccttcacacatcacctcacagggcacaggcagcatcaaagctggttttgcaggtcaaagtcatcctaaatgtttctttccgacctggtatgaattccttctcttcaagcctcatcatccgttccaggtattgttgtaactgagatatcacccacaaccgtattcaaatataaagtgttggcagaccgaaacaccctagggtcatggcaggtgccatctctggagatacgttcatcggaaagaaaacacaagagctcagagggcttttgaaactaaactggccgatggagggcggggtcgtaagtgttatgtctctctgttttatgcatcaattccttagactctaaaatctgtcaacactggcaggctccaatcatcagacacacaaacttactgatccaattaaaacacaggtcaaggactgggaagatatggaacgtatttggaaatgggtgtattctgaggaactaggtactttatccgaggaggtatgtcatcgatacgcgtctacctatgatccttccccgatgatgacttgatgccaaccagagcgaaacctttgctttctccttatagcacccggtactattgacagaagctccgctcaatcctcgccaaaatcgagacattgctgctcagatctttttcgaaaccttcaatgtccctgctttattcacatctgttcaagctgtcctcgccttgtgagtcctttcgtttttctcatggtgtatccttccctttacttttacaagttcatcgtgcgcagaaaggatagacgttgactctgtttcaactctcatcttttccataaaccttggcgactttctcagatattcatcaggccgtacaacaggtatcgttttagattcaggtgatggagtcacacacgctgtgcccgtctacgaggggttctctatgccccatgctattagacggattgacatagccggaaggtattgttaccaatctttctctctctcgcattctatctttctggtctcggtgaaggatgctggcctgctgactctattgcttgttatctcatacagggatgtaacgaatcaacttcagcttcttctacgaaaatctggatcaaacctatctacctcggctgagctggagaccgtacggacgatcaaagagaaatgttgttatatcgcgctcaacccgtccaaggaggataaagagcttctattagctgctagctcagctggaggaaagagtggaaaggtgaatgatggaagaaaaaaagcaggggaggatttcatcttaccagatggaagaaagattcaagtgcgtccgctcatgattttcttcagccgtatacagagctatatttgccaaccaatcgtttgctgttgatcaaatagcttggatccgaacggttccgcgcaccggagattttgttcaacccagaactcgtcggtcaagaattcgttggagttcaccaactcttagtagactcgatcagtagaacagataccgacctgagacgaagtctgttctcaaacatcgtacttagcggaggaaccactctatgcagaggttcgtgtggcttcgtcaccctatctgtgagagacaagctcagaacacgaatagatgaactgatccgtatgggagccttgaactttatctcgtttgcggaatcaggattcggagacagattattaacagaagtcaaaaagatcgcgcttaaagacatcaagatcaagatttacgcacctcctgagcgaaaggtacggcttgttattgatgtactagcatacaggaatagcaaatcgtttgcgaagacggtcaagagatactgattgactcgttttcctgtttgactatccatggaacagtactcgacatggatcggaggatctatcttggccaacctcgcgacctttagaaaagtaagttgattggcgttcagtcctgccgtacgttttgctaatctgacagatcttgttctttctctcgctgtctttagatgtgggtgtcagcagaagagtaccaagaagatccggatatcattcacaagaaaaacttttaggcaatctttcccgtctacatccttctcttgatttcgccctgtcttcgccgttctcattcagagcattttgaacgcttccgtagatgtgtatctcctctctctctctgctcccgcatcccgctctttttccgtccatccctctcctggtttgaaacgtctccgtcaaccaggttgtttgcttacgcgctctgctcttctcaaaactcttgctcgtcatataccctcccttgctgctcgactccatgttatgtttcctttaaagacgatagatctgatagattacaacctatcatgtgtataaatacatatacgttccaaaatctggaagtgtttgatcgaaccgatcttggaaaattgggatagagggcaagatctctatcgctgaacaatggttgtatgcgacgcagaattagctacgctggatacggctcgaacaagatatacacaacagcgtacctcttgttggctctaggagggattttacccatctttcttgacaactgattacgtacccttggttctgatatgtttccggggaatagagaacgtgatatataatcgggaggagagagagagagggagccagcgcaggtttgagtctgatgttctcctttcttttttgtgctctattttctgaatctccgccagacttttccgaggggaaggataaatatgcgcgcaaatgatggactgagatagaaagatgctgcgatcctgacgggagcgagtgcctgtaattgtaaaatggtgagcttctctttgctcatactaaaccatcgaaggagcagagacgaaggacaaagcacgaaccttgacgacagcataagcagccacgccattgaccatatcaccagcaactccatccagtcctcctggcgtgctcgacttgggatctcgactatccagaatgctctgcgcaacgggagtcgtccgatctcgcttctcgaaccctaggataccatacctttcaccaactttgacaaccttggttcttccctgttcgatccactcatccactgtccctatatattcttccccagaagttgattcacccagtcggctcctcacgtcgtgctcaagatctctaagagatgaaacgacggcaggtcctcctccgaaagaccggaatgcatagaacaggccgacgacagggactaaagcggtgatctcgtgaagaaccccaaaagagatcaggagagaaggcaatggtatctgaggatggaggagatgtatctttttgagagcaggaaatcgatcgagcagcttggattgtagaggagaaccaggagtcgacatccttattggtcaacgagtcgaggaatgatagacagaagaagttgagttgaaagaacgacctcaaaagcatgctgatgtttcaatttaaccctaacatttggtgacgcgatcagcctgtggtcgatactctcgttcatcggtccaatcgatccatctgttcatcaccagccatgtctaacaacgattctcgtccattgccagagggtatgtccaaatacatttgctcggcattagactaagagaatagtgactgatcggtttgttaaactcccttcccttccaaataatccttatcaatcaaacccaggatgggtcgcccagtacgtatgatactcgctcttccgattcaagctgagagtcaagattgttctgagatatctggttcaacagatttgattccaactacaacgctccattctgggtcgacactcggaaggtttgtgaatgtttatgctcttattcttgtgaaatcagtttatataggctcattcttaagaaactgcttttctacagacgccacccgaggtgagactgctccccaagacgcttaactatatacatgaagccgttgtcatctaacctcttcctcatctcacctcttgaacaaaaacataacgtactagtcatcttgggctcagtaagttcttctccatttgaatgtcttgcccctagactataatcttattgagcattctccttaatagcccgctagatatcaatcctcctgcccagccatacgcaccaccggtcggaccgcctccatctcaatcttactcgtcgccacagtatcagtctgaaaagccaaaccagtatgattcgacccgaagcaactacccctctcaacagaatagctatcagcccaacggaggaggatacccagtctcccaacctggctatcaaatccagccgcctcctcagcaaccatactatcaggagcctcagaagaagaagggattctttagttcactaatgggaggtggatcaaggccacaacagcagccaatgatgtatggacagcaacagaatcaaccctattaccaacaatcgccttacggaaattctggtcggatgggaggaggaagaatgggtaagtccgctcttgtgtgtctgcttcatacgacgtatgcttccagaatggctcatgccttcatatctcaatcatttccctgatactatcaggtggaggaggtggaatgggaatgggaggtatggctttggcgtgagtgttcatcgctttatcttggcaagtcgggagctgccaagcgcatgactttgctaactgaccactgatgttttctaacatttaccctcacgtagtggaggagctggtcttatgggaggaatgctactggccgatgcaatcgacgaccgggaagatgtacgtttcttcttgcctctatactgttgcctataagtgtctatgtaactcatcatatcctgcactgtttttctttacaaccctctctccttcaggaggcctacgaccagggctacgatgacgggggaggaggtgatgacggaggtgatttctagacgcatatcactcgctcttccacaaagagcgttctcatttgctttctgatatactgtacgatgatgttcttgaagattttcttgcaaggtttctgggctcttgtttctttctacacatatattgtcatctcccattgcttggcataatcgccaagtatactgcaagatcaaaagctgtgttgcacgtgatccgttatcgtcctgattcattcaaaccgataaaccaaccattacgcgtacaatttcattcgatccagttcgattcagttcaattcattcaacactcgaccatgtttcgtgaatttctatcactccttgtcctcgcgatgttcgttggtgcgaccgagcaagacttcctgtcagcacaaaccatcaacttgggctgcccgtcgatgacgatccgatgcgtcaaggatggaaaatggccatccgggattgtaggtgatatcgggaagaaagaattttgtttctctggtttccgatgtaaccaatgcgagtaagtgatcctgcttggatgcttggcctgcgggaacgcttctcgcagaaccatgattgtaatcttgtttaatcaatcgtttggattgtgctggttcgaattcatagggaacaagcaaacacggacgaatgcaacttgacattcccgatcgagtgcgaggaggcctgccaggctttcgcgccaattcccttttgaatcatgacttgtcatttgtagcttctatctttccatctgaaatgccatccatataagaaaagaagaaggaaagagagcatttgctattgaagattaaccgaaactccaagttagacatcgagtgactaaccctatatgtcagaaatctcccgctcaacttgccagacaatattgtagattctcacatcatctacctgttcttcactttctcctctttcaagtcgatactacgatgctagccagaaagacaatccttaaccaactcgctcagcgatctgccgttcgattctacagctcggcacccacgtcagctatcagggatctcttgaaggatgaattcaagaaggctatgaaagccaaaaacatgaatgatatcaatatcgtcaaggtatgtcctttaaatctgacgtatcgctttcctcggaatgtgcttggaaaaagcagtccaagaagagactcgttcttatactgccttgcctagatacaactaacgaacgatttcgtattctcctctttccctctgcacatggctcacggcgtttttatcgactcggaaaccctacttttctttcaatgaaaccctgggatcaaaagagcatcatggctgacatcacgtaccacgagaaatccttctcgcctccaaagccggcggatgacgagtctgtgtatgccgtcattcaaaaagctatcaaccgacgagtccgttcccttttctcttcccaatcatttctccttccctctctttttcctggccttgtctgcgagaagggtcggcgaatctgatcctattcaatccctcctttgttatccggatgggatgaaacgggtgaacagaaagagtcagcagctcagttccaaagcggaaacaggactgatctagctgacaaggagacgctcgaggcagagtttatccagaagttcttgcctgcggccctctcgaacgatgaggtattgtcttttctctttaatcctactccttgggctttgtcgcgtactgttgacacttaataagcgaataaggttcactgacggtttttttcgatgggcaaaaacaaatgaaacccgtatcaacagatcaaggtcattctcgaacgacttcttaaagaactagcagtaccccaaggagacatcaaatccgtcggaaagctcttgaaagcgttctggtcagagatcgctcggtcgaaagcggatggaacattggttgccaagatcgcgaaggaactcttgggtacaaagtaaaacaaattggcaagagagaaaagaagtagaagtagaataagaaggaaaagaagaaaaggatatacatgtcttggttatatagtaccctaaagagaaatcgcctcaagtacaccaaagtgtcatcccttgtcttatcttgtcatctctttgctaggcaggcggatagaaccctgcccagagaacgatagagactgggatccaaaagaccaaccaaccgagatagacc

SEQ ID NO: 291 - DNA, 27319 bp, Xanthophyllomyces dendrorhous
cccattcccatttcaaagtccttcccatcctggtttctatcacgcctaccaatcgagcgctgtcggcccgagacgagcgctgccgctccccaccagaccacagggtttgtctgtgctagacgaagaatgatctggacgtgagatgtgaagaatagaatggcagaccagacgattgaatgaatcacatatggcatgatccaacgttcttggattattgagcttggccgattgagcgcgagaaacacacttctaggcatgaaaggtatgggaaggactaatgaagggaggctcgagaagtgggtatagacaaggagtatataaatcggggctgaaaggagaaagttgggaatctgagggagtgtaaagtagcggaggaagcctacattcctgtttgttgcccgtattcatgataagctgatcaatcacaacaaagatctaagagggtagatgaagagagtgagcggcaacagagggacaaacgaaccagtacttctcctgaacataggtgtacaccacgggcattcggcgggcacaccactccggggttaaattgagagaagggacgtccaaacagaattgttggtatagttgaatctgggaaaaaacaaaaggagcaaagaccgctggtgcagagagcgcaaacagacatgctaagaggaatctctggaaatcaacgaagtaacgttgcgacggcacaagaaaaagaaacagatatgagcataaccggatgcaaggatcaatagagaaaataaagaaaagaacacaccttcctccacgttactggctgtatatagagagggcggacgatgagctcccagccgaggtagccaacattcatgacacctaacggtctaacagcggtagcgcccgcgaaacaacctacggcaaccaatcctttcacggcttccttccaacgtatactgtctactgctgctctttgcatggccagagaagcgtgggaaggagcgagaaggagcataccggagaaggagaggagagcatacatgggctcggtatagggtgagatagacggaccaggggaaggcgagaggatgtataacatccaagttaatttagcgaactgcctagaggccgtcagacgaagcgtcaacctattgagcgcatgagcagaaagagaaagacaatggaagaaaggtcaacaaatcgagaggaagtagcaaagatacggacgaggaatagacccacaggtaaagaacgagaccggctaaaatcccggccgtccatgaacagatgacgccggctgtgacgacatgatgaatctcaacttggccttgtagaggttttgttcctgagagccaaccaagaagtttcccaccaacacgcatgacccatatccagccccatccaaaagcagtctcctgctcgacggcataataacctcgacgagcgacgggaatgaaccagaggacatcccacctaagaaaggagtgcagattggaggatgccgagagtaagagatcgggcgatcgatcaaagagtggaagacagcatgaagatatatagaggagggcaagggtggcgagccggaaagctaacgagcacgcaaggaacggagcgacatcatcaaggcgtgtggacatgaggctcgactcatggagagtgagcgactgaagatgaaggatgaaagatgaaaaaagctgaaggcgcccaaaaagattagatattctggtatcagccaaggtctcgctactgaccataaactggatgactgataactctttcaaattctgtaacaatttagttgtgcatgtgttttcgttttcttctttcgattttctttctcgttttctctctctaattattgcaattggacgtccagatgcgaagacagaagaatcgaggaaaacctcatggatagagaatcgagacaggaaacaaaaaaatgtttactacagagaaaaacggaaaggaatgaagaacaaaggtcaatttggaacgactcagaaaaaacgaagcgaccgaggcaaacttaccctggcgacgataccgtcgaatcgggacttgaaccaggagataacgtcctcaggcttgaccttgtgctgggcaccgattcgggccttctgctgctttcgctcggcgactcgcataccgggtcggcccatgacgacgtagaagtccattccgaaaataccgattccgggatcgtacttgataccgagatcgatgtgctcctggataccgaaaccgaagtttccggtggcggagaagttcctcttcctcaactcgtactccttgaccttgagtcctcgctcgaggatctcctcggccttagggcctcggatggtgacgtggcaagcgatcttttcgtttcgtcggataccgaaggttcggacggtgtatcgagccttggaggtgacgggggtctgaccagtcaactgctcgagaaccttggaggctcgggtaagtcgatcaccagactctccgacggagatgtctatagtgattatacaaatgtaaccgattagtctggcgcacgagaagaaaacaacctaagaaatacctactgagaacgagcttctggatcttgagctccttcatggagttggtagcggtcttggtctcggcctgaggcgaagagagcataggatggggaggaccaatcagtatgaccgaactgaccaaggctctaagtccttgtcgcctttttttgctattctagaaatgcggatgtttccatccacattgtttattactacacaccattttgctggaaagaaagaagaaagtaggaacaagcagacgttagtctacatatacgttgtaaatcatccagacaaagctaacacttgtacgtacagaggattcctaggagttcttgaagggaagggactggagaaaagagaaaaaaaaagaaacgagcagagaaaaacttgacgacgagcttgaccaggcgaacagagcacaagcgtgacgagtaatatttaaactccgggcacgtgatttacttgctgggtaactcgccgcttcttctccggtgatttatcgagcgcataatctccatctgctgaacttgtgtcctatggggtctatctgcgttgctcattctcttcctcacagagtaaatgaggtaaaagtacaactggtctagatccgaatcaagagtgcgctctcaaacaagccagatgccagggatctaactgggtggctaacattttatgctagtgtatacaaccctgattgtatgtgttccttacctttccgctttcgatatctgtatgcactcgtttcgtcttacttccatgttcgagcgaaaagaagatacgagtgctttatcgcttccagtttttccatagttcattttttccctcctctctcttttctctcgagttttgattctgtcatcttcgttcaaagcacccttcgtcctatgtacaatcatgcctatgcatatatcagtagcatttccatagtcagtcgagagcctgagcctatgaaattatcctaacaacttgacaaccggagtcaaccaaaccaaacacaaggatgcttaatctccgtttcagtccaaacatagtggttgccgtgcccttctgcccttacactaggcaaaagggtgatttccagcgatcgtaaccaagtcgtcgtaaccattggaacgtagctcatatttctgaccctgattagataagctaacggatgtaaaagaatctaggccctagctatgacgtgccaagaaacatttaacgggagccgagaaagagaaagagaaagaaacaaagagccggatgaaggatgatggacgggtgttgatgaggagaagagccaaatgctgtagatgatgttggtcctgaagaaaagaacatgccaggtcaacagagagataacagagagcgcattgaaaggaaggcccatgagggaatggtaggtgagagggaacggcgaaagagcgaaagattaagccatcctcactttatttcagcgcagtatacaacttgtacccaagagaaagcggagccatcaagccaaccaagaccaacgaggttttctccttctatccacatcccgaacatccttcgctcttcgttctctcttgtcttgatatacacagatacattcacatactcacacacccgcactcgtacttactcacccgttcgctcagtccccctttgaccagctgtctgcctcggctgactactcggtagcccgtccattcgcccgttcgctcgcttgtttgattccttcttttttccgccttgacgatgcgccatccaatctattctctacttgctctcggctcgatctctgtggtctcggcgatcgatcctctgtctgatactgtcctagacagagttatctctctcgccatttctagtagtatctacaggtctgtcccgatttctttcttgttcccgatttttctctctcggtttcttctacctgggctgaatgtttattcgtcattctttcttcgcctcattcgttattgttgccatgtgcgaccagctgggaaaatggtacactcgccagggcacttacagagtactatgttccgtccatatcgccctttactgaaaacttcctcacaaacgatcccaatccgtccaactcgactattacctcccaacttatcctcatcgcccagtccacattagcccataagcaagcctcgttcggacagtcttccacctctggtaactggactctctctgctggtaaatctttgagtcttctggacgacgattcggcagccgatccggccagcctaggagaggtcgtctcttggtacaatcaaactcagtctgacacccaagcctatggggtcgcccttgaacaagaggcacgtttcctctctctcgcacatttagacttcacctatcctccctctcactctcttctcgcttgactgactagatccattcgttctttcctctctgtatctcaggtagcgtacctgttgcaagtcgttcccagatccagtacgggcgcaatcagtcaccgcgccgatcagtttcaatattggagcgatttcgcttacatggtccctccttttgtatgctttccttgtttcctatctctctcttctgcttgtctcttcaatacctcttgacaacctttctttttctcttatctcccagttggcatacatgggcgcactcgagaataaccagaccctcgtaacggaggcttataaccagctcggtttgtacagaggcgtgtgtccgatgctttgtgtttgaatcgtttaatcctttttttcttctacctctcttcttactgaattgccataatcttacttcacaggccctcaagcaatcaaacggactctggaaacgtacgtctcgagcgctatcagaaagatacagcgccttttttgctcatcttaacaccccaacggtttcttccgcttcctctttcttttctcgatcggtagatattcagcaggggtcaggatcaatcgacaacggcgcatggacaaccggtaatggttgggcggccgctggtatgctcagagtcatagctagtgagttgactgttttgctcttctcaatctcttctactcgaaaaccatcagaaattgtcgctcaacggtggatattgggcggtcccttggttgaaatcagtcatccagaacagtgggatggcaaattcgttcactaatcagatcgcagatctaaaatcatggatcagtgagattcttacgggagcttatgcccacgaggttcgtctgttcttcttacactcctctcttttcctccttgatacgcttccctcggatgattgaacaccgccactctccatctatcctcaacatctacagctcacaactggtctgttacataactatgctgacaactcgagtacattcatcgactccaccggagcgatcatcctcgcatccgtggcgtaccgtttatctgccatgggaatcacctccgtctgggttccgttcgccgagcggacgtatgcaaacgtatccgctggggtggccagttccgatggctgggttgcgccggtagtgaattcgttggactggagtaaacagggacaaacttcgccggaagcacagagcttcgtcatcttgatggagacaggaaggagagcctgggtgagcgcaggaagtacgaacgcatcaggtagtgctggaacaggggaaaatcccaaccagtcaacggcgacaagggggatgttcgttcctgcgctctctgtatcacggggactactatttgggttgatctttgtcatcctttcggctatctagggctttacgtacaatacgatggatcggatctcggaagtttatctatagactatctcatctctacattgaatgattgcgcatcaagatatttatcttttctttctggtatcttcttctctctgcttctatcggtatatgcacttgacgtacgcttctgcctcctggtcctttcttgcttgagaccgtacaggtctacttttcaataaattcacgaccaatcttgtcataacctgctcattttgttatagcgcatactctctctctcttgaagaggggttcagcctccgtatttactcaaacggctttgtttgtactcgtttctgttcatcttatgacggtcttgttctcttgttcatccggatgatatattagatcgctcttatcgtctatactcagcttctattcgtttttttttctttctaccatgaggttttgttttactgtcttgacacggtgatgcgcttcctttcttctcttatcagatcgagaaagatctcgaatctgcttatttgtttcaatatctttctttcttgtgcgagccaagaccagacaagacgatgcagttgaaaggtgtaaagacatgtgaatccgggtcaagagtgctcgtgatgtgcgtaagaaaaaggaaagaaggttaagctacataggacgcctttaaatttgaatgagaaaaagaaagtctagtttttatttgagaaaaagaaggaagaatcataaaagacccggaaagtagtatcgatgaattatttcgtatttaactagagttggcgttcgaggtaagctcggcctgtgtgaggagagctcggggggcgtcatctcggggcatcatgacctcgatcaagttcaagacgtttcctgactggaactccttgttgttcaacaaggcatcgagctcatctcgagtggcgaccttgtggaacttgtgcttgagagcctgtccctccttgggaggtccagcgaagaggtcgaggatgagcgagtggttgtagggctggatgtcgttgtagacagccttgacaccgtggatctgtcgctcaatttcgtatccgtcgttgttgaggacaaagatgtagggagaaagtcctcgtcggagcatggtaccaatctcctggatcgtcaactgaagggatccatctccaacgaagaggatcgttcgtcggtcaggctgggccgactctcgagcggcagcggcggctcccaaggtggctccaacagaccatccgatagctccccaaaggacctgggcgagggcgacggcgttcttagggtagggaatatcaagaacaccgaaggcagaggtaccggtctcagcgatcacgacatcgtactcctggaggaactttccgagtcggggccagaggtgcttctgggtgatggtagtcttgccaaacctcttgtcgtcctcgctatcgtcggtggtgttgggcacctcgacggcctccttcctctgctcagcagcctcaccctcagccttgttggcagcgtcagatcccttcttggcagggaactgtccaagcttctcgatcaagtgtgggagcacgtctcggaaagagattccagggtaggtagcgtatccgatcttgacgtggtcagagtgaagctcgacgactcggctggagtccaaagagtaggagaacgatccggtgttgaagtcactgagcaaagcacccatggagaggacgagatcggccttctcgacgagctgtcgaacggagggaagggagttggctccgatgtagcatcctccgtagttagggtgggtctcatccatagtggccttacccatgggagtctcgtagaaggtcatgtcggtcttctcaacaagctcctgaacggcgcgctccattccgaatcgggaagcacaggcgtcgacgaggacgatgggatcgacactgtccttgtacatctggacgaccttgttgaggacatcctcgacagccggggtggtcttgatcgtgtccagaggggggcagacgaagggagcggagagaggagtgggctgtgaaggcaatgtcatatttgattagtttgaaatcgtcgcgattacatgtagacagtgagcaaaggtttgacttacgagctcagtgttgagagccgcggaggagatcttgacgtggaagagatcggtggggaaggtcaagtaaacaggtcggcactctcgaagggcaaccttgatgagatcgtcgatgatctgaccggcgttctcggctcgagtaagcttgccggtgtgagcagagatcttggcgctcatgtcctcgaactcgttgaatcctccgtcaccaagggtgtctattcaaagagaagtttaagatgtgagatagaattcgatcgggtaacatgttagagatgaaacgtacggtgaagaagagccttctgggactggagcttgttgttgggaactccgacaatatggagaaggggaagtcgctcggacatcctgtgaatggaagaagaggtcagtcaactgttgacaatagcgcgatgtggcaagagggaacgcacattccggcgactccacagagagcactgagctctccgacaccgaaggtggtgacgaggacggcaagtcccttggagactcgagcgtaaccatcggcggcgtaagaggcgttcaactcattggcgtttccggcctgtatgaggagacatatgaagagaaaaccccatatggtaagcaaagagatgcaggaaaaaagaaagagggtaagggaaagagagaactcacccaggtgaaatcgggggaagcctcgatgtagtcgaggaactcgaggttgaaatctccggggacaccgaagatggtcttgaccttgagctggttgagtctggttgtcggcaaaagatgggaagcaagggaacagagcaagagagaaaaggggaaaggaacaccgatgagctttaaggcacaaggaacgaatgagaggaacgatgacgtaccgggcgagcaagtactcggagatggagatctgatcagggtaggcggcaggcatatctgaacgaggaagctaaagcggttagagtggtagagatgagttggtggatgatagagtagaagtgattgtcgtctgtttgtatgagatgaaggagaggaagggaaagtggatgatgttagcagacttgggtgtcttatatatctctttttttctatcttctttttcttgccgccccgatgggagaaggatattcttccgattgggagaagaacttgaaacttcagacgctgcagagcggaaacaatcagaaggcccgggaaagagtgcggccgtggggagatcttgttctgtctgccactcacagacagcgcacggtgacgtggtatggtccgttcgggtttccgcacccacccggccaaatggggcctccactcggcagcggacggcgcacagcagatcaggcactatggtacgcggagagtcggggaccgaacgtcacgtgattagcacacgaagcttcaggaacaaacttccgacgatcatcttccatttaaccctacggtggcgaatattccggaagaagaccgaccatctcttgcattcagcctatttcttttttccctttcttctctgtttcttcctttcgccagttctctttgcctaattgcgatgctcaatatcgagtttatttcttgtgcgcataaccctacatactattcttatcactcgaacaaaagaccgttcatatgtcataatatacaaatcatccgaccgagaaggacaacttagtcgaaagcaaaacccaagagaaaatgctgatgtatgccaaaaacgaaacacgttaacaacctggagatacgttggcctcggaaggctgtctctaaagcagacaaggcatggaaacaggagaagagacttgccttgtacaacgacattatcttggccacgctgtcgattggaggaagatgaggaccaagagaggaagtttcgttaatgcaacagtcaaggaagatcgatcctgtctctcgtctagtcgatacatatgaagaaatacacttgcaatgcctcaagatgatagatttttttgctccctgcacgcattcgaagctcctgagagagagagaagggttcccgagagaacaagtgaattattcgacacgcactcaatcagtcttgttgtcctttcaaacctcgctttgaagaagacacacttacataaaacgcagcccagtgaatgatctcgggctttagactctcatccactctctcgaccatccgttcagtcatcgtctttaaagcaaaaataaaataaaatgagagaagggatacatgttaatcagagtgaccagatgagtatcacgcaagcagccaaacagacagaggaaacgtgccttcagaacgagcacaggcggaatgcagtgactcaaaagctcatacaacctggatcgaacctcgagcaaccgttccggatcttgtttctccaatatggagtccgccacctttgcacagtacacctcccaatccggtttggccgtctctagagacggtgaacttagatcaggcctgtccatcatgaaaatttcactccaaaaatggttagcatttcttggtgagttctgtctcatgcaaagagagagagagagagagaagtaaatacacgcacgactgcatctttaaagcttcaaacacaagaatcgccttcctcaagtttccgtcactctcatcgataattttctgagcaaccgacgaaggtaaatgaaacttttccttctttgccacatgattcaacactgtcgtcatctgttcgtacaagcagttaggccactgttcatcactcatgtacgccacgcatccagatcagcgaaaagaggagaaagaagaaaccaacctcttcctcagaaggtgctcccacacgaacgagcagacatctactacggattggaccgatgatctgactggtcgattccgcgcatagaattattcttaggttgcccatgtacttttccatcgtccgacgaagtgccgcctgtgcatccctgctcagcgaatcggcagagttgatgatgaccactgtagtcaaagagccagaatttgaatactagagttttgtcgacgaagagcaagaacaaaaaagatactgccgtacccttaaacttctgttttgcattcagatctacctgctgagtctgagcgatctccttaagaatatcagagatcaccacccggtcgtactgtccaacatctctgcgaagttcgttcgttcgttagttcattttcagtttagaatcgagagtgaaaagaaagacgtcgttggacagaaacatagaagataacataatgaatatcaaaaggagacacaagaaagacctacgacggagtcaactcgatatgatagttggattgaacgacattgacgtctagttttctcttcgaaggcgtgatgaacactcgctgatcgatcttcaactgtgatccctcagcacataatgagtttaggagaaccatcagagagtaggtcgaaagtaagttgagggttcagacaaagtacacttctcactgtcacccgacagagggcaaaacaatggttaaagaaaaaaaaggaacgaaatggaaagaaagcaagaaaacgatgacttgctttttcgacacccgatccaaacagctctctaagaacacacataattcgggtttttttccctgctccggaaggcccatagaacagtatgtgcggaaagtcactcgatccagccagggaagacagccgatcagacagagcagaatgatagtgaagatcggccagctgccgtggtcggtatttatccacccagagactcattgatgattaagaatatagatctatttgaacaagtgagctattgaaagagtgatgagctggatagaacgggtgtgagcgggctggggagactagttctgttaagatggttgtcgtttttcgagtgaaaaggaagttgattgaccatccgagctcgtttgttcgctcatttacgatgacgcgtcaagaacgcgacgcgtctttactcttcactaacacacacacacagaggcgagatatataaaggacattctaaaaaacgagttcaaggtataaacatatataaccactcgatgtatgatcaagcagcagcaacagtggctgtagggactgtcatcgttgagaccggtaatgccaatgacgcgttacccgacatcgccttttcctcctccataaagctttttagatcgtcaggatctagtcgacttctcctaccatcgtctggttttctaaaccctccaaagaagccttcgatcgttacaggttcttcctctctctgttgttcccgccgctgtccgctgcgctcccctttgtcgtcattgccaatgtcgacatcgtctctgagacccttttcttcttctccttcttccccctcactctcagctaccaaatctcttaggaagccctccagcccaacgtctcctaagctcgctcttaatcttcctcggtcgttcactaattcacccgtcaaaagatcaatctcatcgtcctcttccatcggaatccctttgtacttgttgacaatttcctcccagctgtcaagtaaacggagtgaagcgttgtaccgtttcgaagccagatcctcgtccgtcaacgcctgctcacgaggtgtatttgatgaagaaggatcagatccaagagaagaatcaccccatcgcgatcgtcgacgtttgtaaggccggcgaaccaggggaggaggctggaaggcaacttgaggtttaaggaatcgagctaacgtagaaggtgtcggcggttgagagtcttcaggtgggaactcggatagtggatcgtactcttcttcctcttctctgtcatctccttccttttcatcatcatcatcatcatcatcatcctcctccacaccatccacatttaagctttcgctcgtgtctgcatcgccttcctcctgatcagaggaactgggcggagcttcagacacaagtctagtgaacaatctcttaaacataggctctatccgaatcagtctcctcggatgatctcgataagtcgaagtaaatgcagaaatgacagaagctggaatgggcgaaggtatggtctgtgatgatgtacgctcatagaacgtacggctcctccgaggcgtaagctctccttgaccatctaccgacagatcagctgtctcgtccagcatcctctctacttcgtctgtcgcccgtgcagccggcgacgatgaaaaaatcccaatcgatgaacgtctagacattctggacgtgcaaggcgtagaaggtccatcacgggtcggaaaggaaagcaaagttctagtcgatccttcgatagttcggccatatcttggccttgttgtcggagataccggttcacgccggaacgataatgacttagaggtgccagccagatccgacaaaggtttgtgccgcgcatatctcggttcggatagttcatagcggcatcggccagggagcgagatcgatgaatcgacagaggggatagggggacttgaacatgtgtcaagaagagaggactgatagctaggctttctcgatgatacaggcaaggttgtggaaggaataataattattgatgacgatgatgatgatggcgaagaagagctcgaaacacgctttcgtttgaaagcagctggcgatttagatggggacacagaaggcacaggagagcgacatggaagaggcgacgattcacccggagaggaagatgaagaggagtcgatgacgatgggagatcttcgacttgtcggtctcactggaaccagagcgcgtctcttaccctttgcaattgtagaaagctgcacgatctcgctctcggtttcgctcgtactcgagcttgcagtatctgaacaatcttcgtcccggaggtccgaagaaatatctgagataacgcgggattgatagcgcggtcgagcgagccgattggcagtaacccgggagctaatcgtatgttgaggactgaaggcgtaacgaggactggtggcatatcgtggtctggatggggatgagtaacgtggggttgaaccgagggaaatggctgtggttgtgcggtcccgggcatataatggatacggacatgaatgcagcggatacgacatggtggcggacgaagaagggtacaatatcgaatgggataaatctgtacaacagcaaggtaaggcaaggtgagtatagctcaaagtttatttagatgaacaattccaacctttaggtgagaaatgttgaggaatgtcggaccatgagcgtaccgggaaagaagcactcaagcttggcgaatctacctaacgattcaaccaaaatgggttgagaaaagcacaaacatgaacttgttgaccacaggaagaagagtccctacttttgggtaacccaacagatggatgatggtaggtaggtgatgctagaatatgcctcaacaatttaattgcgcttacaaaacacgcccaaagccgaaaaactggagttcgtttacgtctatatatctgactgtctcttcttcactcttagaatcatactggttgtgcattgtctattcggccttttgtctaattgcggtcatagaaattctctatatgacctcctactcaccatcactacatgtgccgataaagatcgacgatgaccacgagtggttgaagatggacaagagacacacataccgccagtctcaaatttctgacgcgcgggcgagcgattgcaggtggtcaacatcctcttgaatctctcgctcactccgtcttcgatcaatctgagaaatctcattctgcattgccttgttcaaactttatacttgaacacctatctgttgaccgcatggacgttgataatgacatagcatcgactacgctctcaagctcgacgcccgctgcagtcgttaccggggctcccatcacgcagaaaacaaaatctcaactcagacatgagaaggagaagagagctttggccagagaactaagtggaagaagaaaagacggagaagagctcgaagtatgctcagtcggctggtatggcatttttagtcattttgtacatgccgtactaacacctctttgtcatgttctcccttgccctcctggatttgtgcaaattgattctggataaaccaatagacccgtgagaatgtagacatcgccccagaaattgttccgaatgaggagcgggaagtttcccaactaagggtatgttctctttaaaccctaaagttcttggttatcgatctctgttctcatcgtctagtcatttcgtctagatcaatcccgttcgaaacttcaatcgagtccgatattctagatatcaaatcgatactggcttcttctcaccttatcctctgtcgacagccgaagaatcagctctttcgagcggtccgtctccttctacatcatcgtcgacaggaaagttacgtgagatttcaaacgtagcagcagctgttgctgttcaaccacaatcgaacacgtccagaacggtagatactgaagtgccttctatatctagcgagtcaaggaccaccctgagagcccatgggcgtacgtcagatctcatttgggctggggggacaggatctttaaggccaggtggaagaggagatttgtttgtatgtgatgtgagtactaacctgctttccaaatttaccctgtctccatatatcgatatacactgctcactcacaaacggatggaaaccacgattcttttctctctagggatgtttcaaatactgccttgattttgatgcctatgatattcatcatgtccgtcattcctcaaaacctagcgaattgactttgaagagagagcgcagagcattgacctatcggctcactttttcaacccattgacaaaatagagatcatgtacaaggatgcatcctcctggaataaaagtttacacaagagggaaccaatcaatatgggaagtagatggggagaaagaaacggtgcggtcatagtccctcctcttcttctcttcgcatcagccaaaaattaagagagaaggttgctctgttcttctctacccatgtgcttgtgacatcgcagctgtattgccagttcttgagtcttttcggaaaactgttcatagattctaaaggagtcttctatagcgttagtcttgtgtcacgtctaatccaatcgtgccgatctatttgagtatcttctgatcttctttgagtatatttcgcggatatacaagacaggtcggtgagtgtgtttgagccagactgctgtcaaggtatatcgtagtactaacagcgattttggtctgaatatcgatttggcgatatagatacctttatgttctatgtcctgacagatactgaccggaagaaggactctgtcataggcttcttctcaaaagtatggtatcttacttggctcgatctgaccgatttgatttgcgattggcctgctcatgccctcttctctccggatctatcatcaaattaaaggaaaaacactcactagaagacttcaatgtcgcttgtataatcgtcttgcctccatggcaaagcttagggtacggccgtctgatgatcgagttcagtgcgtatcgatctcaacttaccccatcctcattcccggttgatgattcgtcttttcgtattacatcttctgactctggcttgtgggtcaataatgtcaggttatgagttgactcggtcgtctcctacgcccgggacgccagagcgcccgttatctgcactaggattaagagggtatatctcttattgggcctcggagattgctagggtttattctgataggttgacagaaatggaaaattcaaaaggtactgtcttcaccccttctacttatgagacttgagtaaacttaagcacgctaaagtggagagattgggaggtgtcggaaggaaaggtgcccaacagatattaacacatcggttttttttgctctagatccgacatcgttgtctactatgtcgattcaagagctagcagttgctgctcatatccgtttggaagaccttgtgcttgctctacaagaatgcgcgtttgatcattacgttagacgaccaataagaggagcaaaagaggaatacatcataatatctcgagagattcttgacgaggcaagtctagagcttctttccctttcatacgatccagtactctttaccatactttcgtaaacttaccaggtcgaataaaatcataacttttgtgaaaacttctttttctcttgccaacaaatagtttgtgattgctcgtcgtgtacgccctcgaatattgagcagagaccccgcgcacctcctcctgccgtgagacgagaatcgttgtatattagaacgaattatatggcttggttcggtgattaaatagaaagaatattttcgagatgacaagacaagacagaccagaaaagatagcggccacataacgttttttttctttgtcgagagtgcgaaagagccaaaagaactagtgcaagagattagacaatctgtttgttatttacgaggatgtttacaagaacactagcgatagggatgaaagaagatttatacaggattgacacgtccgtcaggcaaaagtgtgtatatatgtgcatacgtgtagagaccaaagaactagatggatatactggtaatggagagtgagacatatgaataaaacaaatggcaaaagacaaaagagacaccaacaaacatcctaccagaggtatctaggaggagcttcagcttcctcttcaataacatccctgctcctcgttcctcgatttgttctcgagtttccttcggcctctttcgagatgctttgttggcctttctcctgttgttccggaatccatgacgatgattctgaacctgggcgcatgaggtgtttgaccgaagatgaggaagatggaggccctgcatgagttgacgtccaattcggatggctggttgtcggggtggtgttagaaagatactcgatttggctgttcgtcgagcttatactgtattgggatgactgccgtcggtcgaacagaggaggggactgagggaagtaagattgtagtgactggtgggattgttgagagtgaaaagagtggctagaatgaagagaacgaggagatgaaggagattgaggcgaatgaagagaacgagaagaatagtaggatttcggtgaaagaggagcgaccaaaggaactggtgcattgtaggccgaggtctcacgcaaatctataggtcaagacaacaacaagacccagcgagtgtgtcaattaagcgcaacaagtaggaagggttagaagataagactaacaaagatttgccggactgttctggaaattatcttcatccactctaggaagataccctgatagacgtctgcccgtttgattgtcttcgacatgtccctcccgatcagctctagctccaactccaccactgtgactactagctgcacttgcggtgctctcagtatgccacactgcggcctcgtcggaaaaatcaaaactgagcgcagtcggaccagcgtcacctgaagcagcatcgataactgatgacgagtctttttcgctgtggtgaccaggctggaagatgtctttacccgagaacacttggctcgagagcttttgcttgcgacggaggagcaacaaaagagctatagcggccagtgcgacgacctaaacaaaggatgaatctaccatcagatggttgtatcggagataatcagggaagcagatgaaaaaaaaaaacgaacgactattccaccaacaaccccacctgctattgcggcggtattactcgcaggtccaaccgctacagctgtctgcgaactatactgttgctaaatgatccaagtagtttgataacagttatcagtttcgaagattgttcagatcaaatcaagtcttgaggaaatattgctaccacaagacaagaaagagataaggaaagtgcaacgtactgcactttcaactccgttatttgtcactgtacttgtaaaatagacggtccgataactcgtactctgatgagcatttgtgtttgagccattgacaacattctgaacctctgtcgctgcaatgttgacgccagaggtagtcgttcgcatggacgatctcggtaaggttgaggaagaagatgatgacaaggatgtcggttgaacgattaagctggagaaggaagaggaggtcgttcgaactgatacaaagctgctggtaatggatgaggatgctgcaatggaggatgaagaggtcggtatcgaagggcaggaagtagagaccaaagtagtgtacgccagagacctaagttccgaggtaaataaaaattagaataaaaaaataaaaaaggacgacagagggtgagcaagaattgtgaaaagcagagccaggtttcagccgtgcggtttgacgaatcatcgggtcggaaattctgatgacttgccttgtttctgtcactggcaaacttgatgtaacgaccaccggaacatttgtcgtctgtacaatcggcgtggttcgagtgatctgatcgactaaggttgatccgttcactatggtagaatcgatttcaactgatatggatagcgaggtcgcataaattgaagaagccgtggtgaccaaagtgggaacaacggatgttccgataaccgtggaaaatagagtcgcggtggggatgacggactaatcaaatgattttcaagaacgggtgcgcgattgaagggaacatacagggaaagagaagaaagcaagatgagaaagagcattgaatcaaaatatcagaaacccatctgatgatacttctcctcttcccttcttagtgcaggacgaagggaagctggtagacgtgcgatcataagagagaagcaagaggacactcacacatgccgcctcgttcgccatgatcaatttgacagcctagaacaagctgaaggaatgataaagataggaaggaaaagaaggagagagagaaaaaagaaagaagtgcggtcgattgaacaacggaagtgaagcgactgaaggagttttgacccggtatggttcagagagtcgttcggttattcgatctgcgtatgagtgtggattaaccaatcaataaagcaagcgatgtatatgaaggtacgaatctcggtgtcagttggactgtttatcaggagcatgagagtgcggacccacagaaagatagagtgtgggggcggatgtgttgcatggtgatcggcatggttatacatacccttttgaagcgcagcaggcacatctcgagtgcatgcacttgttcgcgactgccggctgccgatgaagccaggcgttcttgcttcgctcgggttcggtcgggcgtggctggccgatcgctttttttaaattacttagaattcattcaatttcaaaggtagacagtgccaacgctcggccaaaatgctgatggatcattcaacggtagtcaaaaaatacaggtgaagaaatagacacagcaaacccagcatgtcgtccccgcatgaagacatacacacagtcaggtatacaaaccaatatatatttatctatctatccgcctatctttatttcttttcgaacgcagtttcaagccatggtgcgacctttcgagcaatgatctctccgtgcgctgaatgaatatcggatccaaatcggacgaccagcagtaagcacgtttcattcaccgccacgttcattgacttgttctctcaacttcaaaatgcaaaaagcatgtctccacctgaactgggcagtttataagtcagaaggacaaacctagacaaaacgcatgtggaatagactctacaccatgccagatctatagagtgcaagatttcaataaaataaaatataaataagataaaacatgcattattagaaacatcaagatcgttcatggcaggtcatctgtcgcatgctgtatgcaaggaaaggagccaagaacagacgcagacaaaccttctgatcgagtgtctcttgtggctctacttgcacctcagtgatcgtttgttccagcacatctcgaatctcatttccgtgaccaactccgacccaaccatcggattctccccagtagccccatattctatgcctattggcttttagaaacgctagatcaggttcttgaacaagatccatctcggatcgacccaatattaacgctgcacggatcacgtggaaactttggacgagagcgattgtaggcgccggaagaacatagctcagaagtccacgcgggataagcttcgtcaaaagagatgctcgtggcagaatatatatcaaaggagagcgaaaaataggctggttggacagaaggatgcacattcaatgacactggctagtgttagacgtgtttctttgcctttaactcgagctggaacagaaggaggcgcacctgaagttgctttccattaggagattgggcgatgtgagaaagtgtaggaaacaagagcatcgcagatgagatctgaggtctctgttcgagaatctgatggatcaaaagttcaagaagaatcattgtcaagaggtctggccaaaattgatcttatgagaccgggaacaccaacttgtatactcatccaggaccctaccgaatggccagagattcctacgtttacgtcttttccgagaatcctccagacttcatccaagatctcgagcttggcttcgacctgacccggtagctcgaccggattcatgccggagggtataggtgggaggtggggagcatgaccggcttggccgatggctagaatgccaatatgagatgggatgagtgtgtagagcgtttggaggaaagagtcataatattctaagaggcctggattgcctagtgatgttttgtaaataatgtattgatcgaaccgttagtcacgtcgactcaacgcaaagagacatggaagggcaagatatacctggtaggtagacccagagagctcggggttgtgtgtcaaggtttcttggaggaaagtagtagagatctgatcgatgatgggatgcaagaggacaagaatgttgaaaggttgatcgatgaaaaagcttatcagtatttgccagtctgacacgaagaagatctgctagaggcgtagttgacattttgtgtagatgcaatatgccagacaagagacagaacgaaactgtggtggatcataaatcagagaagtcaagatgaatgacgatagtcacgtgacgagcggtaaacgctcacttttcgattacacttgaatgttttctgtggctgattggtcgaccagatggtggttacacacccggcacaaaggtaccaatttgcccgctcgaacacaagccacacaacgtcatcgtcattgacaaacttaaacagaaaatattaaactggtgagtgctctcttggtgcgcctgtcctgttccttattgggaaagcaaaagaaataaaggtgcgtaatggcattgggacaagagggttagttttagtcagtgcaagtacatctcgtcaccgataattattcaatctccaactatcaccatcaataccacgtccgatcatacacttactaatccaatcaatccatctcgcatgtccccagactctaaaccgcatccagtgttgcctcacgacgactacgagaaggcgtgtaaaggtcagttttgcccataatgaaagattctcattttgaacggtcttcttttttgtcctgtcaacactttctatctgttggagtggcagtcttgaatacgagcctgcgatctttaagttgccgcatcgcctcgtcctctcacatctttttcattcttgtgaaagaaaaaaaaaactgattcgtcttatgtctctccttcctttctttttctctttgtcctactctatcaacttgttcccttatatttgtcgttgataattgcccatcctaaattcatacctctcttcttcaaaaatcaacttggttttgttcaaccttggtcttgttctatccaggtggacccactagacgcttctcgcagttcgtcttttctgattcttgtccaatatctggccttcatctctggctacatgtctctgtcaggttctgtagctatcagctatcgttctaacattttctttcatttcttatcgtcattcagagacggccagcaagtgaccaacccaatagacaccaaatctcctcttccgatggaaactcctgcttcccaaaatccaccgtcctccataggaaaggctgattacctcaagccagataacagtccgaacgccaagagtcaagacatcaccgttgctgatggatctgatactggtggagtacgttggctttcacagagcattgtccaagattaatgctcttcttttatccttccatctagtactgatgagacatgttttccctctcaggcactgaaccgccacccccagccggctgcctcggcgctcctctctaccatccctgcagctccgacatcagcctcgaacgatcccatctctgcgctccctacattccgagttggagtgtccgaagaccgtaacaagcgatgcagaaggagcatggaagatgcccattctttcatctatgattttggaggagttgaaggtcaaggatactttgctgtgtttgagtgcgtaaatttgatcgcaaccgttgcaccccataatgtcattttcttttctgctgacgatccaaatcgtttctcagtggacacgcgggaaaacatgctgcagaatggtgtggggctcattttcacgaggtacgctcctttgctccgtacttatggtgccaaacgttcgaacataatctttgaacaatattcattttctcttcatgtacagtgtttacttgaaaaactttcttccgatgggtcctccctttctgtacccgacatactcaaccaaactttccttgcggttgactctgaactctctaaactcgcccaagaagaaaagacacattcgggttgtactgctgtagtggccttcctaagggtggatgaacctgccgccgagtcggatggaacgatcactgaatctctgggagctatctcgcctgagcccgtcaattcgactgaaaacagcacggatccggaagaagagaagagcagattgactcgcatgaaaggggttttcggaaagatcacgggtgggtctggaaacgggggcggcctgttctcttccaaaaaaggtgatagttctggtttggcatctggagcacctgtgatcaggaagagtggagcaaagaggacgcttttcactgccaacgtcggcgacgccagagctgtgatatcgttcgtctcatcttcgcgcttggtctatcatctgcacttcatttgactttgtttctgtcgtgggtattctcgttcatggccggctacagccgacgaggcaaagccgtccgcctgacatatgaccataagggctcggacgaacaagaagccaagcgaattaccgatgctggtggatttgtaatgaacaatcgagttaatggtcagtatcctttgatgatgtatcctatttattcgagtagttctactgtctgactacgacaataaacccaggcgtgcttgctgtgactcgagcgctcggagatgcttcggtcaaggagtttgtcgtcggcaatccgtatacaacagagacccggctggacgaaggggacgaattccttattgttgcttgcgatggagtgagtagtttgtttctaccaagagtttcctttggcgatgtttgtactcatcttccatcgtttgaattgtttttcctattcgtagctttgggatgtgactgaggatcagcaggcggtggatttgattgccaacgtagaggatcctcaggaggcttctaagatcttgctggatcatgcattggagagctatactaccgacaacctgagtggtaagcgttctgtgaacattcatgagatcatcatggatcacatactgacatatgtacatcataccggggtttcttctcattcagttcttgttattcggctgaacccgaccaatgtttgagcacaaaaagtccctttttcttttactacatcagacgccctgcctcagcctattcttccttctgtatttcccttcttgcgagaatgtttctttgtgcaagcaaattttcttgtaaacttagtatgctttgatttatctactcgacatcgatgactagctgagctgtgaactgtgctcagtcgcttccttctcgagtctcgagcaggcatagcatcgtgctatctgttgtcccgaaaacctggtcaacgttactttgtacctctctcgcacgctctgctgatttttgccacacaacatcatgattgaaaccaagagaactacagccaccttggtctctgttgctagaccaaaccgagcgacgggaagcgatcgatgagtcacgagagtcgtcacagggaacctgcaggtcgcggcccagttggcgtgtcaggcgttgagtgaggtacaaccttagattgaagtggttactctagcctgtggccgaggtgcgatgacggatacagttgttgcggatacagtctggttcgtggatgggatgggatagaacaaggtagaaccatgtggaaagatccatcttgatggagtaatatgtagacagtcgataagctcggcagtcagcatccggccagtcgcggcccagtcggcgcttgatactgccacactctgagccggatgcccgaagagattgaattactttataagacggctctccatccttcttgatctttgccacatccctctcattctctttccagttcgccaccttactgtcaatttgccaccttcaagactctcttcctcgcatccctgatcaaacgtactccaaagatatacagatagactagtcacaccatgtctacaccaacttttaacgagccaaggcggttcaaagtcacccatcctgctgaacaggtacgtccatcttctgttgttctcttctatccttttgtcatactatgctttcattctgacaagcatggtcctttcatatttatctccacgtttcagcttgcccggcggttccggtttcctaatccccccacctacgcagctcttgtagagaagattctgtcctactggtcgtcgacctcgctcaacccaaagaccatctcattctcttacatcgacgctcagggggatagatgtgtgcttagctcggaagaggaacttcaggacctctatgaagaactcaatgatgttggcacagctcaggaagtcttaaagatgaaggtcgtcatccttggagggcctgtggggattgatggtgaggctgatgtagaattagaggttgagggcttgatttccgaggttagtcgctttctttcttttcatttccttattcctcttttctgacacaatgtgactaactatgtatttggttcgatgctctcgctcgtgcttgcctgaattatacagatttcccagacggacttggccgacgatgccgagactgagatgggcgacagatccaccttttctactgccactccctctgttgaagacgctacctctgtttacggtgatgctcatcagaacagctcggttccttctgttgagtctcaggagaataccgcggaccccgaggaggtcttcccaccccaggttgagcctgttgccaaccctctttcgctcctttcggatcttgccacccttctctctagcatttctgccaacccggccttgtctacaatcttgtctcgagcagctcaaggtgcttacactcctgagttggctgctcatgtaggaactcaaagagacagagttgagactgagcttaataaagccaaggatgaagtcaacaaagggtttggtcaggccgcgcagggttggaaggacttggagaccgtcttggctggttttggcaagagtgctgccgaaggattaaaggaagcggaagagattagatctcgacgaatgcacgagaagcggtcccgtgaacaccacgacgggttccaccgaggtcctggcttccaccatcgacaccatcctcgacacccctcgccttcttcttttgaaactcgggataaccgacctgactctcctcctcctcctggtccttcgtcgccaggccgtgaacgatcgagacatggcagtcctcctggatctttccgccaccatcctttccacggctctcaacgctcccatcctcaccaccgccgccgtggaaagtcggccgagaggggtgttcctggagagtttgatactaaaggtgaaaaaccccatcgacgattcaac

SEQ ID NO: 292 - DNA, 23008 bp, Xanthophyllomyces dendrorhous
ttggagattcatttgaccgagacgactctgtcggagatcgtccagatcactttcatcgacgagggtggggcaatcatcatggtgggccccgaggacatacctaccgacacgaaggacacgggtacccgcatggtgacttctttggcagattccctttcttcgtccatccctcggctctcgaccattccgaggcccatcggggctggtggcagatgatgaatgacggcccttccgagatgaaggttgatggagtgccttacgaccctcagactggagagcccacctcgcagaacgagaagcctgaagagaagtcaaaggaataggctctatattgtggcctgttgcgctcccttgctattcgacatctgttgaatacattgttcctctgtctatagtttattttcctctcttacgtctccgatgacctttatatacacgaccttgatgattatgaccaattgtacattttgtggaggaaatctgtttatgtttgtgaaatggagacccaacggtcctgtttcgccctgtcgctctttcttgaatcaggaaagcacctagcggggatagaccaagatgctcaaagacgatggccgtagatgaagaacgatgcagaagtgtcaatgaccctctatggtaagtgcttctcacgtcaacctctcaagctgccttgccgatcacaaagattgagatttacccgaggaccgatacgcgtggcggtgtgttagggttagcaaatgaagtgcaccagagaacatgagatttcttattaaaccatctacctccttgtttctttttcatccctttacccgacgaataacgacaactatcatcaggttcattgacagagctgtggtcgtcatcttaacttgatctgatctccggaagacagccaagacagccttggagttgtttcttttcgaaataagacgaaaaacgaacaaacgacaaatataacaagaataaaataaagctcttcagtctgagctcttggcaatcatataccaatcaccagttgtatcgatataatcgaccttttctcctttatctacccataattctgagattttgatcggccgaacaactgcctaccacatacaccaatggacacgaaacactctctttcttttacatctcatcctcgtcgaagttcgtttcttagcccttcgtcttcaaatggcttacacaccactggatctcatccgggtcgaatgcagcctcgtcgaagatcatacctgtcctttctggtgcctcggtccaagatccgttgtctctttgtgctcataacgctttttaccaccgttgtggtggtcggtctatctttctcgattttcacgttcgacattcctccgttgaatgaatacgatgtcgaacagacaccaagagtcaatatctcacggtccttcgaggaacccgatttcgctcttctctccggtgcccagccgcatacaatcggttgtcctcagaaagattcatcgagtgcaccgttgctgttgcttggaatcttttctgctccagatgatcctgcaggggaggacacaaaaagattgaacagacgaaatctgatcagaaggaaggttatgcctgattggcctgctcaggtcgaacttcggtttattcttggaagacccaagacggcagcaatcaggaggatgctttcggcagaacaagagttgtttggggatattgctatcgttgatggagtcgaagatgttgatttcggaaagacccatgcgttctttaaatgggtcgcacagaagagggtaggagaaaacccaaagtttgtaatgtacgctctcgttccttccttcaactcgtacggtgcccaagtttgagctcacagacgcacgggcatctacgtgccaagagacgcgtagaattcatttactgacaacatatgtggaatgtggttccaatctgtcttgacaggaaaatcgatgacgatgtaagcattcatgttattatctacaactctgttctctccccctgcttcccccctatctctttctgttgtgaaaatttatctcgactagtccatgttcattaaataacgagtgcaatctgataaacagacgttcctggtcatgccaaatgcgatcgctagcttcgaagcgcttgattgctcgaaaaacatctattggggaacctcggcaggaatgagttaccactttggattctacctgcgaggtcttgggtatgctgttagctggccattggttcgtgataccttactaccagatgagatcatcttactttctcgttcagaaagtttgttataaacaaaacctatcgagaaatttgctaactagtgttgggtacttgtaggcttcttggataggttcggcagatatgtacgtgtgcaatatgaggtctattctgagatgaccaatccaaagtagcacccgtaaatatattgatcttctctgagaataacaccgagttcttttgtgcttgttttgacctatcagttcgaccgcgcatatctgcaaatacgaagatgcacgaacaggacagtggcttcgaaacctggatcctgtgactgatccaattcatgttgtggacaacggttggacaatgggagactacaaccagctagacgttggcgtggagagtgtagctttacgtacgttccgtttctcaacccatttcttaacctatcgcgtattcctggaaaggaaaagtgtaggaattatgatcaagcgagccaagaacgaagctgactggtttgtttcatgatgatttcatgtcattcagactggctcaagtttgacggttggtacgaggagcaggtcgaccgtgtcaaggagatctggagtaaagcaggccgtcagtgggcggctgatggtggagtcgacccgaagcagtcgatagattttggaaagaagttgcccagtgccgctcaggcagaaaaagatcgtcagaaatcgttaggctgggatgtatgaatctgagttcgatccagttgaatcacggacattctgagcatgtttacaacgtctgcgatccgaacaagtaaaagtctgtgactgaaaacgaaagagaaacaaaagaagggcgaacgagaagggttgtcagcttgatcgtgtgtttttgtttgctccggccatcctggctgtgtaaactgatcgcgttcggttaccgtttttttcccttccctttcgtcttctcgacgacgacgacgacaactaatagcattgcagatcctctcccaatatcccactccatcttcatctcatttctcctccatcctatctcttgttctttgattagattggtattcagcctatttttccaacctcaacccactagcttggatggatcgacggcctttaggtcctagggatcatcgaggggaaccccctagcagagaccaagcattcactgagatctttggccgacgcaatacccatcatgcccatacccaacctcaacttggcgggcctcgatacccaaaccaacagggaacttcctacgcacccgttcacccagcccgtcatttttcgccttcacagcaggtgtaccagtcatctgttggagtcggtagaccgaccccatccgggccagggacctacgatggatacgccggatcccttggtattgggcctccgcctaccggtccagatgggtcttatccaacctacagttaccctgtaagtcatgtctatagcttgcctccagctatctccatcgctagtgtctgtatcctctctctagtatccatccatcttgcttgttcttctcggcctcctcggccggccactccttggcgggtccggcatctctccatgctccttcatcatctccttgttgtttcttcttcttctttcttctccgattattataaccttctatctctcaggactcagtttaatgttgtttcgctattcacgaggcaagtgctcctttcgttgaccctgttcattcttttgtactttcctctgtggcccagtacaagccatcggttcctaacggaccaagtgctcagttcgaccggcgatcttcattcaacccttctgttcattcgaatcatgtatcctctgctcagtcgacctactcacaagtaactcatccggtctccggaccaccagtcccggcaaattcggtgtactatttagttccgaatcaacaaagtacatcctctatcaatctgccgacatcaaatcctggtctgcaacaatatcggactcaaggcagccaacgctcttctgtgcaagcactataccaaggcgttcaggctgcatacccttacccagcggggggatatgctagtgatcctactgttctacctgaacagaacggtagaacaggtggtttgaccccagcccaagcctaccaagctcaagtaggaggtgatggcttggcggatttaaaagcgaacacgagcgatcaaccgtctactgaggtttatccatcatcgatcccttttccaacctctcctgccccccagtccaatacgcattcatacagtcatccggcctctcatgggtcttccctatccacgggtccctcgacccaaacaactcagtccgccggaccccggggacctcgattagctccacctcggttgccggacctctcatccatcatgggaaatggtggacttgggttgaatgctatatctctggaaccctggaatgaagtagcactaggagcgaccacaccacgaccgccaacggctgacgagactgagctcggatacctttctactggactctcacctggcgaggcctcaggttcgcacaatgtgttcttattttgttccactcatctatcctcactactctatgcggagccttggactgacagattgctcactttatatatggatatctgaatgaactgcctccatctataacaggcgcatcttctgtatactcaccgtcatctagccgacctggatccgttaactcgaaacatgtcagaacgccttccgagtcatcgaagcgctctcttggtctgtttgaccagaaccgccctacatttgctcgttagtcgaaacagttttaatgcattcaactatgctgtttatcaagaactgatcttctgacattgcactatgtgtgcaaacgcccaccgtgatttgaatgtagctctcacccgaattgatactactcccaatcttcgccagacaatctctcgacctctttcatctcctacttctacatttgaacaagacgcatttcgtcgtcaacctagtgctcgggatagtgtagagagctttcgtagcgtgcctgcaccgtcatctcctaaccttcccgagactcatgacggccgatccatgagcttctccagcgcttcatctgtcaccagagcagaagttgtatcctccttacggcacaccccctccagatcctccacccatggtcaatacccttctggccctgtgtcgctgtatcctctatcatcttcatcttcgtctgtaggaggcatcaagagaccagcgacgggatcgattacccagatgactcgaaagtatacgaaagtgtaccctgctctgctttctcgagtagcagaggtcttccaagccaatatctttctttctgagcgggtaaaggatgggctggcgtacaatgacgcgttcaccggtcgagaggctgtggatcttatctgcgagattattcaaacaacagatcgaaatcttgcccttcttctcggtcgatcgctggattcccagaagttcttccacgatgtcacatacgatcatcggctcagggacaacgccaacgaactctatcagttcaagcagaaagcccttccgagctcgacttcctttccctcgacagccttccacccagaatctgaaaatcctcttgatgacgaagcttcggtcatcacacaggacggtccctggccatctcatcatgccaaacagttgacttcgctcacttcttcgtcaactatcattgagtcgtcatctggtctccattcgcctcacagccccaatttccgccgttcgatatcaacctcacaaagcaacgggttaccaccgtcacctaattctcatcctgttcccgaagaaaacaatttgcccacgggagtgcttgtgattcttttggactgctactctcccacctgcagcgataactccttatgctactcgagcatgtgtccacgtcgaacagaacaggctcaagcactcaatctaaagaatcagccggggttgcctgtcttgaagaagcaacccagtgtggaaagtttgaaggacgctgaaggatccggaggcgaattatgggctacatcggtgtcccaggccgtcttggactccgttagcgaaactgagagaaaacgacaagaggcgatcaacgagctcatcgctacagaacgacactttgtcaaagatctagaatacttgcgtgatgttagtgacttctgtgctattcgcctcatcccaggcaacatgctaacttctccttggttactaccttcgcctcaagttttggataaagcctcttagggtgtcagaggtcatccgaccagcggaaagaagagacccgttcgtcactcaggtgttctggaatatttccgccatccaaaacaacaacgccgctctctcagacgcattaacgaagcgacaacgagcgcagcctgtcatcgaaactattggtgacattcttcttcaacacattcctctgtttcaaccatttgttgagtacggtactcaccaggcttatggaaagctcgagttcgaacgggagaaagccgaaaatgctcagttcgtgaagtttgtagatgaggttgaacggaagccagaatcaagaaagatcgagttgaatgggttcttgacgaagcctactacgagattaggtcgttacccacttctcctcaaagccattctgaaggtcacggatgagaagaacccagaccaaaagtggatacctgaatcaatcactttgctggaaggctggttgaagagggttaacgctggagctgggaaaacgcagaatcgattggatctcgcccatctcgagcaacaactacgtggtgacaaagatctacctgtatgtacaagatataattggttgttctgtcggttcaaatatctgtctaggtatcagatgctcacgaagataccgttatcattttaaacagaaactccggttgttagatgaaaaccgagagttgattcataaaggtcaactaaagcgtcgtggcggagcccaaaatgagacggcagacttggatgtttaccttctggacaatatgatccttctcaccagaactaagtattcgaacaaagtggagaaaaccggtatctatcgaaaggttcgttagaacggtagcattttccttagtcaagcatatctgatattcttttttgttcaattatagccaataccacttcagctgcttgtgttggcaacccctgatgaacaatacaatctttcgaaacacggtatccgacccaaatctctactatctcgaacttccacaagcaaatccaccacatcgtcaacaagtgcaaaaccagagaaggagggaaaatatggttattcgatcactctcaccagtctaggaaaagacgcatattccgtcacgttgtggtcagagtcacatatccaacgcaaaaactggctggagaagattgatcaacaacagacgcttattcgggatcgacatcgcaaactagacactcaagttctggaaactgtgtttactggtcagctaaaggtcaactgtgctgccccctacggtacgctattttttcctcctcaacaatctttcgaataaatttctaaactgcttccacggacgggttgtttattgtaccagacgcggggcgtcggatgatctatggcacagataacggtgtttatttttcgaacttgacggaaccagaccgccccccagtgatggtccttcaactgatggatgtgacccaggttgatgtgctagaacaattccaactcctcatcgtactttcgggtaggtgccgttgtatagcaattatctgctcttagtttatccactaacttttcatgtaaatcttgtcatttgaagagcgatccgttcaaacctttcctctggattcactcgaccctaaagatccaacggctgctcttaagcgcggcaaacgaatatcatctcataccacattcttcaaagccggaatctgtgttgggaagatgcttgtctgcatcgtcaagtcgagtcctctctcaaccaccatcaaaattatggacccaattgaaactcctatacgtaaaaagcaacagggtgcggcgttcagcaagcttattcccagccggcacgatacgcttaaggtcttcaaagttagtacccgcttataccgttcgacttttcacccaattgttgactctttttacttttttctacaattctaataggagttctatattcccaccgagtcaagctccatccactttcttaaaaccaaactctgtgtgggatgcacaaaaggattcgagattgtcgatctggaaactcttgacacacagggcctcctggatccggatgacccgaatttggctcttgttcaccgagccttcaataatgctgcccggattccgaagcctattgccatctatcggatcgaaagcgacttcctgctttgctatgatggtaagcttcctgacgcagtctgatgctgattattctcttcgctgcaaatgatgtactcacaaagctactattgcttgttcgaatgaaatcttcttaattgctcggctgggtagattttgcgttctacgtaaataagaatggctggcgggttggacctccgagaaacaaatcggacagggaatggcgaatggactggcaaggatctccgacaaactttggtgagccaactgaaagtagttgaaaatatgtttgataacactcgaaggatgaataattgatttgctctcgaatttatgtgcgattttaaagctcttcactatccttatatcctcgcgttcgatccttcgttcgtcgaaattctggatgtgaacaccggtgctttccttcaagtcattcaaggaagtcatattcgtctcctattcacggatactcctccttcgacagtccactcagctgcccagcttcatcaacttcagctgcagcaacaacaacgtttggcttatggccgaggcggtacgccttataattcctctgatcatgcatccggctggcgacctcccccgcctcggttgcctcctcctcctcctgtcaatcctagaaacaagatcgtcttcaccattgatgacaaggtggtcgagattcaaccaatctctctccgatgaccaagacgatcttagtgtttcttttgttcttcatcgtttcactccaactctcctctatctgggaattaagcattattcattgtacacattgtcatgttgtttcaatatactattctaccaatcaagcctatgccttaggcatggtgacagtaatctcaaccgatggcagtcgatacatggcccttctggacttgagtgccctcagaccgcaaaccatcaagatatcaggaatgcgaccgaagtgttatatgcatgacacacatttctaagcttgtgttactaccgcaaactgtgcttcccttctgttttttgttgttgggattctggcagtcttaacatggtttagctgtattgcgctgtttcctccttgaggcaacatctttagatcttgcgcgagttctcgaatctttctcagagtcacaaaacctgctagctcttctccgttgtccctctttctcgatccatcccactgtggcgcctggatggtgagcatatgacgtctggaaagccagtggagactcggtcgggaacaggcgccagaataaaaagtccgttttcacctttgtgaagattattactgaaataaaagggtgaaaatggacttttcgctctggcacttgttcccaatcaagtcctcactggtttcctaaaccatatacacactacccaggtgtttcagtaaaatggattgagaaaccaggaaaacaggagggaacccgctagaaaatttatagctcttcggaaagagaggcttgggactccgcgcagaaggaggtcggaagatgatgtctcaagagttaataacaaaaaacagatgaaattgtgtcaagattgctaaagtcccaacaccttgtcaatcaaaacgattgttataagtgtgtttgaacggtttaacatcaacggtgaagtggccgagtggtctaaggcgctgtgttcaggttgaataacctagtttcgcagtcattcgtggcgcgagttcgaatctcgtcttcatcatgatatttttattttttgaagctgatacctatacttcatcttctctgattggcagtgaaggtgctagagtgcacaccatctaggtggttcaggagactgattaaagaaccagagaagagagatcagacagaaaacctcatatgttcaaacgcttttaatgattgattattccataagacggccaatctattacagctgagattatgtctcaactacttaatcccattttgatttggagctgctgagactagacccgagaattactaggatgacggacggacgggtgggtgttttaagttctcacaaactacctctctgattgaaatcatcgaagatctctctacttttttttcgatctgtttatcaatttccatacttttcacacttgagaacaaatgtgatggttgagcagaaaatgcacgcacctcaaccctgtctgaagcggatatctcttgacctacttcatcagatctcccacccacaagcactttcttgctccctcttgagtctcctccttacactcatctctctattcttgacatgtctgatgtaatgtcttggtctccttgatacacccatcttctacatgttgccgcgagaatcatagattctaggttgtagaccacttggactcataatatctcaaacaacagggcagaaaaaacatgcataaaataacatctaaagtaaagcagacgaggacactatttacacagtttaggagctgtcatcaagatagcagtagtcggcgtagttgacaggattaagcgcccagttgggcatggcgacggtggtaccgtttccagcaccgaataaagcgaacgtcgtaataaacacgaatacctgcattccagcatcgagagcggcagacatgatgtagttgtacctacagcaaattgagattacatcgaataacgggttaagcgggttctattctcgagaatgtcatttattctcaaggttataggatgaacgtactttcgaaaccaggtcggtcggtaaattcgtaaatatccttgagtaaggagggcctgaaaaagaaaatcactcggaggattaggctaaagctcgaagcataattcaactgtcaactcataaggactaacagtaacgacactcataaagatggtagagttgataccagctgctaagtaaccgagagtgtaacagaatagcggagtgatgaacaggtccattcggagcttaggatagtatcgatggatgatccacgggatgatcggcacaccaaagccaacgaggaccgacaacggaatcatatcgtatgttgatcctgggctgtacatgtcctgcaggaagcacaaaaacgcaagcagacagacaggcacatacagttagacgtttgaaacaatcaaagtagcaaaacagccagcgagggataagattggcggttcgattttaataggcaacgaaccttagcgagcgcaccccaagttacggcctgagagttaaatgactggacgttttgaccagacctacacaagagaaggaaaaaaataattcagtcgagttcctgattgacggcaactacttaagaaaagatgaagcgagcgattaagactgaccagatgttgtttcctgcggggtcaagaaggatatctcggtgggagccaatgatctgcttcgagataacgatctgcaatattcctcccagaacggtacctaaagactgaacccaaagcgtagttcggggaggaagctttgtgtattgggcaatcttgagatcggacgcgaaagcaattccctgagtagccgcatttgatccgtacaaaccaaagtacttgattcatcaagagtaaaaggtggcaacgaccagcagggtacgttaacggacaactagaaatgaacaggtctatagtgaacaacaatctcggaaggcttaccatattggcttgcgcattacctggaacgacagcggagccaagcatgagcaccaaggtctgaatactgacttgccaaccggtgatagccgggactagggttcaaatgtatcacgattatcgatcataactaaatgtgagtcaattgcaaactggagcataaacagtccaaataatttaaacgcacagattgagacgaagggaaagaggacgattgcaatgatgaaggcgacgatgactccgtaccaaggcaaatgtgagtgaccggtatctgtttcctcagaggttgccatgtcaaagtgatgaagaacagatgagaaagtgttaaaaaccatcgaagagatgacatggaagaaagttacgtacaacaagtggccatggccatcgcaaaggatgagactacgatagcaccgtacgcccacattggcacctccttgtactcaagcatcttcctgtagtgtgcatcatcggtcgatcgagaacggaaagcagtggcagcctccttaacgggttcccagtaccagagcaagcagtgagtgattgtggctccaattgacagattcaagccgagatagtatatagctgttatgactcgagactcaatcagtatctttcagtctaaccaagtgagaacatggtatgaacaacgtacccatcgaggtggcaaaccatggaagaccttgctcttcgagtaatgttcggttgagcgagtagtctgcgttgaggatcaaagactggtcgtatgaagaacctgaacagcacgtgaatgcacccatcattgtcaacacacgattcacaaataaaaattcggagggccagagaacataccattctcgtaaaacaagtcttgagccatgaaggggaagttctgagcctgccagacattacctgcgtatgcggtgagtagaagggtcgccgagacagcgactctgagttgccaaggggacaaaagtttcaacgaatggatagtgaattcagcgagtgacgagcagaaaataagacaggggaagaatacatgcagagattagacttaccctgcgtacaaactcatctgagtagccaaaggtgtgtatagcgaactagccccggaaagataagctgttttggagataatcatgtcagtttaaggaacgcattggtatacgactgagagcaagaatccttaccccagtcctattgttcgtcaaagcgaaccaagtcaataataataaaataaatagcgacagtatgtaccgatacgatgatctagaattaacttacaagacagacggagaacaacgccatgccttcgttgggataacttccgccaaagatccgagtcacccagacgctgtcacgcttagccagacagaagatcgatactcccgtcaaagtaggtgcgatgaattctgaagtagatttgaccatatacatgtcagactgagcaagtgaggaccgaagaagcccaatggtgaaaactaacctgggaaccattcccaaataaagattccgagggcaacgagcaagaagaacttcattcgctttcgctgaccagcaatatccttatcgttgtgtaacagttggaagagctgcacagtggggatagtggctggccagacggcatatgacgggtaaacctgattgagagaagcatcgcaacagatcactcggaatttagcagtgaaagaacagatcatagatgattgagacaccgatttacggtgcggagttgagaaaccggacttaccactactgctcgcatgagtccggcctgcaagaaacaaaacgtcagcgttcgtattgaacatcctgagaacaaacgtgaatggataaaacttacgataccatatcccaggaactgagaagcaatcagcgtaaagatcgagatcccgtagttggggttaagatcgtagtagactgcagagaaagaacaattttatgtttggtcgaaggtgaacgcgcatgatctacaattaaatcaactcacgctcatcagcagcgaacacagagattgcctgagcactgctaaaagcagttgtactcatgataagagtgctgagaaagtcggaaggtttgtgtagctttagtagggcgcacacgtgaagaacaagacgtaagaagagtgtgcgtacgcggtgtgctccttcaagttgaattcgcacgggtttatgaacgtccaaatcggtcgtcggtactcggtagggaaaaacctttgtgtaagacgctcgagcgcgttaaataacatataccatagtcgtccgagcatgtcggcaatgacaacgataaagagcgaggagacggtcaaagatgaaggcctaattgtgacgcaggaaatacaactattagtttcataggtacgttcactttggagcgcaagctgaaccctacctgaagtagaagatctgtccgaggaccgcggcgaaggaggtgagaccgagtcctaatgaagcatgtgatagaaaatactgagttccggccggttgatggacagatatgaagagacattgttgtgaacataccaagcacatacatccgtaacgtatggattggcatgttaacatcgtcgacggtagcaataagtcgagtactaaaatcgacggccgtcttcagaaagagagtaattgattcagctcggagtttcgtcagctactgtgtcttctttcttcttttcccttcagaaacatggggcttacttcgatgggcctctcctgaccgttactgagcagattggcaggatcaagctcatcaactcctagcgctgaaggatcgatggccttcctctcgtggtagtgagcgtcgttgttcctctccaatggaaccttcttgtccagtcccactccagagagttcatgctcctcttcttcctcgtcatctttgcttccgggtgaattctttaatgaaggggtcgtatcgattggggcatgaatagaatcctgtctcttgaagggctttctcagttgagacaacattttggcataaattttcaggcagtcaatctggccctgattagtgatgagtgggtgatcaagaaaggcgtgaagaggaagaagaaaggagcagagaaaaattaaccatggtctttcaagggtttcgacgactcatctctcatcatcaatttggacgaaaaaatatcgggtgtcagataaatcggccaatcagataaatcgataggccgagcgcgcggtcaataaatttcaatcaaaccgcacaaaccttatgaacggcgtcccgccgtaatgtgctgggtttatacactccctttcaagggcttgcgtgtttttttttttgtttacttccccgaaccggacaaattgaaagggttgttctgatatctgagtatgccgattaaggctgaggatcgacacctcattaacaaagcctcagcaaccttccataaagtcgagaagatgaccatccaggaatagaaaagaagaggagaccacaaattatccgtcctcgaatcggaagagaaaaaaatctgatggtctactgaagttcggctcggccccatacgcgtcccttcgttcttccggctcagtcaggaggagcattggtttactgatgagacattgtggtgctctgaaactccatcttctgctccacttaaggtggtgttcgcccccagaagcaattttgattggctgtgaaggactcgttaccgagcatctttgactatcgatatatatgaaccatcggagatagtatcatcctataggtgtgtggtatggatgtcacaaatgattgctcgtcagtcataacgaaggtcttcagtgtatcctatctggataccatagtgatcgtactactctcactctttctcattcctttgagccaacacttttcttgttttactcttcttgtggtaactacaagagtagttatcgtccatgcgacatgagatttatgtggttacgtttatcacgcaccgcgtgacacgtgattgagctcacatatcgtgcgattaactgtgaacgatctagtttgctatccacacttacacctccagttcaaagaaacacttgtctgtttttcttgaatccttcccttctctgaagtctcttctatacagacagaaggactagcacatgctgtggaaagcaaggcagtcaagggtcttgcctacattctccctccgtatgtgtctatctgccttgggggtttgttatttgtctggctttcattcacctgaatgttctgctctcgaccgtgtctcgttctcatagccatatcaaagcaacccttttctatcactgtctgtcgtcctgctatttctcggagcgagccttgggtattgtcccgtccatcaaatctatctcttcgtctcgagtgttcgtcgatctatatctccaactcagcctgaacttatttctcatattctcgatcatgtgtctaatctcatactctcctctcacaatccaccattcataacgaccatatagcattggtattcacccgcccatccttcaatcgctgtagactgagcaggtccgcttcttcctcgccctcttttcatataccagtttcggaacaacttccagtcaatactggacgtgtctatggacaggccctcttgtccggtgatcgtgcgtatgtttctcagttatcggtggcccaagaaggacatcacttgatatgtttaggcacataaagaattgtccttctgtttgctaatgtattttttgggcaacacttcagcggccgctccttttcgtaagaacccagttggaatccaattgctgagtgcctacacgcggcggcaagtctgcccgaatccttccctgcccgacgtcaacccagaaaatattaatattgcccgaggtaacttgacgaaaaaaggtctccttagtaaactgcctgagccccaagaacccattaacatcgatttacccaagctacaagggcaaaacattgccgagcacttccataatttgggtgtagaggtcagtgcagatcaataggtgaagcgttagtcgcagtgtcaggctagctttctaactgttgttctgatccttttggattgtcattaactggaatacagcaatcagaaccgtttctttctctcgccgaaacgctctctcaatcaactgtacttgccgttccatcgcattttccagtcgtttcaggatggtccaagtacgatgcagagaaaaacacttggtcgcaagtctcgtatccagagggagagcatatgctggtgtttgatgtggaggttctctataagatacacccttaccctgttttggccaccgctgtatctcccaccgcatggtactcatggatctcgccatggcttcttcaggagtctgagaagaaggagcatcttatctctctcggtccgcacacaacgccaagggtgatagttggccacaacatcagttatgatcgggcaaggatattggaggagtatcaactccgaggtagccagaaccgatttctcgacactatgagtcttcattgtgcctctcaaggtgtatcggccccgcaacgtggtctctggaagcagcatcagtccagggtggccaccgagaacaccgctcggaaggagagaagagagtggttggtcaaaacgatcaaagaaactgaggaaagaatcgcaaacggggagatagtaggcgtagttgagcacgaaccagcgttggaaggagctgagcagtttttggcaactcctgtagaaggaacagtcaaggaaaccctaaatctgccacagttcctggctgagcttcggttcgaactcgatgatgctcctatccccgctagtacatctaccggacagaggctctctccagaggctctcggcgattcatctgaggaggacggttctctctcgcatggctggcaggatgtaacctcgatgaacgcgcttgaccaagtgttcaaacttcactttcccgacgagtctatggacaaagaccaaagagcagctttctcttcgactgatcctcaaacgatccgagacaatcttcaggccctgattcgctactgtgctacagatgtgcacgcgactcaacgaatctttaacatcgctttccctcgattcagacggctctgtccatcgcctgtgtccttcgctggccagctcatcatgggcagctccttccttcctatcaataagacatggtcaagctatatcataaactctgatgccaaatggtccgagttggacatgaaagtcaaattccagcttgctgctttggcagaggagtctagggaacaatggatcgagccacctgaagattggactcctggattactgaccctggagactgcccgcgctctttcttgtccgaaagaatttcagaatgacccggatctatcgcaactagattggactcctcgccctgctaagcacatccggtggagagccctcgctctaaaacaagctcttcttgaggatgagaagataaatggcgaatatctaggcgagctgggtgaagactctatcagcgttgccacgacaatcgaatcaccacctggtgttcaaaagcgcacaaggaagagaatcatagacgggcggaccatgcctgatggcgtcgatagccttcgccgaagcaaatttattcccagactgctcggtttgacttatcacaacaaaccgattcattactcggaagagcatgggtttgtgtacgaaattgaagagaccaaagacaccaacaccgaatccactgaaatagattccagtgagccacttatcttcaaccatcccaacaaggatgtctatttttccaaaagagtctctcaaggggcagtcttccgacagatgccaagctcaggaaaaaaagcgactagtattctagggattacgtcaatgcggtcttcggcgatgtctagcgcgcttcatggaaccgatggggcggagaaggtcctagaggccctagacagtaaagccagatgggaaaccgtaaggaagaccttgatagcagcgttggattcgagaggagtagacgtcgtcgactatgatcgtatgtatctcctctctctatacctccagttcactactcatatactcatatcagcgcaatatgacctgcttgttctcttctttgtttaatgaagccatggtcaaccttccggagtttgatcccgctcaagcgatttacgatgttgaaagtacgttatgctcttttccttaatacaatactagattagttgagcatgcgttctaacgtttgtaaccggggaatatcatttataacctcctttgatattctctttcaattttaatagccggggctaaacagcgagaacaagcattcaaagcggaagaggaggatggtgatgaagaagttgtcgtcaccaacgaagatctccatatcccaccttcggcttccgctcttaacgccaactggtggccagcttggtactggaaactctttgttccaaaacaaggaaagccgtcgaacaatatgaacatcaccgtccgtagtcaaatcgcctcgcatatgcttcgacttagttggaagaagcatgcactatatcggtcaaaggagcacggatgggtctatcgagtccctaacgatggaactattccggaagatgatccgatgagaggtcgtgcattgtatttctccgctggcgagtcagcctactaccagcaaagagcggacgaagaggcccggattgccgagaacagaccgtacaagacgacggccgtcatcaacccagacgtcgctctgtacgaaattactcgagcgaccaaagaccttttcttcaaagttccccatcctcaaggagaaacccatcgacttggccgattaatcactaaaggctcggctaagtttttcgaggatgagacgctgacgagtgaccttgcattggcgaaggaggccattcagatggacatggcttgtagttattggatcagcgtgagagagcgagtgaaagaacaactagcgatcaaggagtcggacgacgtaccgatggggttcccactggagacgaaggacaacccagatgagctaggaatgattataccacagatggtagtgatgggaactgtgacgcgacgagcagtagagaagacatggctggtgagtgagcttgtgactatatatagagcttgtcgccgagattgatttctgatgtctttacttgctcctatcttagactgcttctaatgccaagaaaaataggattggttctgagctcaaggctatggtccaagctcctcccggctactcaatagtcggagccgatgttgattccgaagagctttggatagcaagtttgctaggagacgctcaactcggtttgcacggtgggtcccccattggatggatgactcttgaaggtaccaaatcgcagggcacggacgtccactcaaaaaccgcgttcattgtcaacgttacccgagatggagcgaaagtatttaactattcccgaatctatggtgctgggatcaagcatgcaactcgtttgctcatggaaggtcaagccgttcaggacgaagaagccgcaacgaaagcggccgaagctttatacgcatccaccaaagggttacgggttgcgtttaataacgccgactttcaccgattctggtttggtggaacggagagctacttattcaactcaattgaaagtgttgctcgaagtaagctccctcaaactccggctctcaagtgtggtatcactgccgctctgcgtggagcgtttttggaaaaaccgtcagatcacatgacatcccgaatcaattgggtggttcaatcttctggagtcgattatcttcacttgctcattgtcgctgtcaaccatatctgtgctcattacaacatcgatgctcgctttctaatttctgtgcatgatgaaattcgatacttggtgaaggacgaagataaataccgagcgacttatgccctccaggttgccaacctgtggacgagaatgctttttgccttccagtgtggaatggaggatcttccccaaggttgcgcctttttctcagcggtcgatgttgacaaggtcctgcgcaaggaggtcgacatgccctgcgttaccccttcaaatcctatacctataccttcaggagaggcactccatatcactaagactttggagcttacaaatgggagtcttcatgcagatggacagcctatgtcgatatggccctccccgccgtcgtctcttccgagccctgtgcctattcctgacaggccatacgttcaacctgtctctagagttaagaatcaggattctatctggaaatcattctatgttaacagtcaggcctgtgagagcgaagaagaagtctacgatctctggcagcgaatgggctcgccgatcgatcctgtcaaagtccaactagaacgcgctttccggacgacacggaacacggccggcccaaaaaactcagatagttctgattggaatcgtagaacggcgttctcaaagagctccaaaggaaatttctctaattggaagcggaacgctccgtctttctcgggatcgaagcctgccacgccaagtccccctttgcggctggtccgcgagactcgttcggagcaggatatcttgatggaaggatatgactactggatctctacccagaagagctatgccaatccttcagcttcgccactgccactatcatcctcagagtcgtcatcggcatcagcgacactcaaaccccctctgatgtcttttgccaatcgacagcgaaaaccatcatctgccgagtatgcggcggcaaattcgaaacgatcatgtagccaacgaaacgggggttggaaagaataatcctctgtctttcacggcctggttaagtgaaaagaaaaagaccctgatcttgctcacatgggatatatctgatagcatcttgcctcatgctcttctccatctttctttacaattttttatctttgccatgctccgcgtttcgctatcaaaagtatataggtatcattgtcggctccgttgtttacataagtattctttgatcattaacgatagggggttttggattttgactgtttatgtttgacccattcattgtatatgtattagcttttccttctttcttgatcttacaggatgtctgaccctcataggtctctatatatggaatttcaatgccaattctttaatcgttctttacgagagtgtcctgcctgatagttgtttgcttatcgataggaatttccattgacggagaaacccgaaggagaactatgggattgttcgtttatataactcatctatttccatgtattcagcccacccgattgtctctataactcttgtttctctccgccttcctcaagcgacgatcacgcacgcatatatctacctacataatgacttctactacaaagcaaccgctggagattctactagttggcttcggagcggtaggcgtagtgtacgcttacatgtttgaaaaggtatggcaatcatccatcttttcttttcttttcttaccgattttctttttcttcgtttcgttgaatgctgacaacagtagcttatcctgatctatggctcgttctcgtcttttagagtgctcaagctaaggtcacagctgtagctcggtcaaactttgagttgattaaccagaaaggaatccatatcgagtcaccgtcgaaatttggatcaatccctggctggaaaccttctcgatgtatgttttatcaaacatcttcgcatatccagcatcactggagaagctttaaaacaatctgcttggtctttaaatagtggtccattcggtagaagatgcgttggacagagagtatgattacgtagtagtcactacaaagtctttacccgatgtctatccggtcgaacggatattggaaccgatcatcaaggcccgaaaaacgaagacgtttgtgttgatccaggtgagtagttcccttagtatacaaacaaaatttgatgtttctgatgacttctttccaattc

SEQ ID NO: 293 - DNA, 22626 bp, Xanthophyllomyces dendrorhous
tttcctcatatgttgccttgtcgagaaagaacggactgggtatcgaggaagggctctatgctgcttctagagagatcgatgcgaccatccttacctcagtttgctacatttcgacaaagtgagaagcaaaccctgcatctgctctttctgaatacccgccatgaatcatattttcatcttcctactaaatcttcgttctctgcctttttccttcttaccctacatcagtcttcacaataatcgagacgaagttttatttgagaacacagagcgtttggagattggagtctaccacccaccttcgatcgaccggccgtcggccgagtcgtacaaagcgccatcgtcgaccgagtctcagctcgcggatctgaacagatttgtggagatgcttaaatcaggcgaaggaaatgtcaagatcgaggacgatatggagctcatccggttcaagaaggtcaggtcgtttgtctcctgcaggtgttggaccgatcttcgattccttaaattctgattctggttggctttcttgtctgatttgatttaaaataaaaaaaaataaaaaataaaaacagaacgtatggaactgttgctgggcaagtttagcttgtttggcccgtgctcctcttatggatttcattggggagaacgagatcgacttgatcggaccttctgtgctagaatttgtcagttctttcttttcctatcacatgtttcttccttttatttctcggtaactttgtgttgattacgcaaatctacatttatacgaattctgagtagtgtaacgaagtcgccgctatcggatacaaggcaaggttgcctctgccagaaaactttggacagttcatctacgatggcacggtatcgttccgtcgagagaagggaggaaagcacaagccttcggcgcttgtcgatctagagaccggccgacctctcgaaattgaggtcaccgtaggaaacgtgttgaaaatggctcgacgattgaacatcaaagatgaggagatcaagattctcagattagtttatggtctgggcagagttttgcagaagaaagctctagagaattagctagttttcacaggaatgctagggaagatgtagaatgaagtgcaatttgatgtttttctccctatctgatattttggatttaagctcttgtgcaattctatatgacccactccagatagaatatacctggctgtggaaaatgactggaggcgagaaaacaaaagtgaatatgataaaaagaaaacgaagtagacaggattcgaacctgcgcgcccatagggcacttcctggacttgctaatatagcagggaagcatcgtaaccacttgattactactcctttgatgtttatctagcctcgggcagccataaaatctcgctggcatctgtctctcgtcgaggacactgaccatacagtaaagccgacgggcgagaacggcaccctttcgttctggcgcttgttcccggcccagtccccactggcttgccaaaccatatgcgcaccaaccaggtgtcacagtgagatggatcgagaaagaagaagaaccgggaggagctagcaggtctggtgactgcacggagagaaatgcttggggtctggcgcaagatctgagggtgttgcctcgaagaagaacatggcagatcacaaccgaagccatgtcaagacggccaaaatgatgatgtcttcacccggccatcaatcaagtcagggagtcctttgtgctggtcaatctggaaggttcacttggactcaattctaatcctctcaatgtcgagttctttcaacaactgattcctgaatcctctaatttatccaaacgagtatacacaccaacaaaagatgtagatgagatgttcgagagaaccagaaagggatacatggaaaccctagctactgtttgaaagagatcacaaaagatgacaaggcaagagaaaagaatagaaaagatagaccagtttcgtccttagtcacctagactgttacatctgagacctttcctcgctttcttttcttcttccaaatactacaagtctccctccgacttctagttttgcctttaatctcatctctcgctatctctacaactcacagggcttctcaagctatcctttctctcgcctgttacgcttgtctccgttccgctttaaatttcaagacctcccctcgataattttctgtctttctcatatcttttcgggtttgttttctcacaccggagcggtgtctcatcattcggactcataaataatctgaacgtctcatgtttctctcagagcagagctcctatctcaacgtcagtaatcatccgcaggttcgagttccgacgacgcgaacactcatctcttggaccttttctcagaggagaatgaaatcaaactgctacctatggcttatgttgtttattctgggatcacaaacagttgtatgtacatcagacaagatgattataggcatgaatacccacaaaggagagcagttaccccaaggtagagtggtcacgtcatctgaggaagcagcgtctcacggtttgcgagcgttgtacctctacgagtccggaatggtattgatatcgataaaagacaaactggcttattctatatggcccgatggccacaaaagggacaacggcgcggtggcgtggcatcattcgggatctctgtctgcaggacgaatcaacgggatgttcgagagcgagaacgacgtgaacactgtacgaaccacaagcgcgccaaaacatgatggtaaatctcagcatgacaacgcgcaaagcccaaagcgacgtcacaaatggcttgcaggcaaaactgttggtgcgggaccttctataaaggtagtaccgacgtgtagcgtcgattgtgacgcgctgagtatacaggggacgagcgtgggtgcgcacgactatatacgaacaagcacaatgtccataacagctcgttctcaagccatggacgatgaagggctgtgtaccgtagaattgtgtcaacagcaggagtcgctgacgatgtcgctaggcatgatccatgatgattccgcagaccatacacatacggccggagagtcttcgagcactgctggagataactatccactctacggcgcggtaagctcgacaaacaagatgaacagcttcattataagagtcatataaaggcagcacaggtagatgtcagggatgtaatttgagttacacatgatctataagtcctccacttgtataactttctcgctctgatatttcaacgcgctatacttacagcgcattcaatcggtattcgtagggtctgagaatcataaataagccggacgttctcgataacttgcagatgaaacgccaaagcctggattctttgttaccttctacttctttccttcctcgttctcctatccttgtttcctagcgattctataaatcttgtttctctattacaaaagccttctcttcctcatgaaaacctaagactccttatcccatgacctaagaggtttgggtggtttgtggtctgaaaacgcgccggttgaaaagagtcacgtatcaatcgtcatcggtagcagccaaagccatacaatctctgattctagtcaagtacccaaagcggacagaatcgctgcctgctacagacatttgttgctctctgaacgttcactgttctcccatgaggaccatcaggcttctactgatctgttcaacagccgttttgacgcgcgctcgctcctgaggtttgtctgggacgcgcgcaagaaatctggtgaacttgtctgggtgatacctgtatcaagaaatcatcggactcaacaagccaggattggttcaaatctctagaacgagagatgaagaaagataggagaagatctagaatttgatacggaccgacgaatcccttccctcaaaatgtctttcctctttctttttcgctcgtcctccgtcaggcccttccagccgacctggccgcccaacagaaattctcgcacagattcttcaatccagccttcatcatctcccccgatgcctaagtttttcccactcttgagatgaaacatcggccacgggatctccttgaatctaagtgggggagcatctgtccctatggaatctgggctactctcgagcaacatcttcttccaccgatcgtcatattgcgcccgttgagtctcttttaacacggccgcctcttcgtcgcgaacgtatctccatttttcgaattctttgattcgcgctcgttccaaccgatcgttctccacccgggttcgttccagtcgagcagccgtcgcggctgcttctcttgcgagagcttcctgacgctgccatgcgcccgaacgctcggcttgtcgacgagagattcctgatcggatgctggatccagtttccgtatatgtaagtagtggatatcagtggctcttccgatgcagtagggttacactttaaccccatgtaagacacacctttcaacccactcttcttcgcccatcaactctgtcacaagatcgccttgatcccacaagttgtcgctctctctaccttgccacctctttgggattcttgtttgaccaccgaaagcctcgtccccccatccaagacctgttccatatcctccgcctatctcccagtcccagagagatgaagctggtccctcgtcctgagcttctaaatcacgcagatgagcatcgaacgtttcttgaaatgcatcgggaccagaattagaggtatgatacgacgaggaagaaggagatgaacccgatcggtgtggtctagaacttctactctggcgaggaggagatgttgagtcgggtcggtatggacgaggaggagatgctggatagggatgggagggatcaagtgttggcgaaggcttctgttttcgagctcttctgagagcctttctatatgccttttcttctcgcttggctctctctttagctgaatctttccttgaagtacattaagacaatatgttagatgaagagacgattgtaaacatcaaacgcatacttacagattaagctttgttgcgtaggctgcagagctcgacgatgacatgctgatggtagtgaggatgacgatgatggtgggcacgtgattcatggtgatttggtggttcgtggtttgagagcgcccaagccaaaaaggatcacgtcgtggttgctttcgagtaaccaaagccatacaatctttgtttgtagtatagattcttaacctacactcacatctgattcgatggccgcagatagacagtcgtccgacgagttctctcaaggtcctccttcgaacctcacgagaaggcctcaatcatgcgcaaagtgtcgacaagaaggtcgaccgcctattctcagagcagattgtagggttcacaaaaggcaattgaagaaggaacacatgaatcatactttggctggacctggaggagcgggaagacgaccgggtttaagattcttaggtatgttcttgatcaagaatccttcgtagatagtctttatttcgcacgagttcggctgttacacctatcattctgagtatctgcttttgatcttacagagaacacaacatacacaaccttaatggcacccgccaactctgcctcatcctcgacccaatcagtgatccatccgctattatctactcaaaccggcggtccctcaactgaccgatcatcatcaagcttttatcttcatgatcccaggaatatgccgatggagtcgctcgaacgtacacccatgggcgccgagtcagccgaaggggcaaacgtcgatgatggcctcgtcagacgcgcatacactgaacagaacgacctctcccttggttcagatggccattctactcagagggacgatctcgagatggatgacggagggatgatggacggatccggcgatgagaagggcccaggaggaaaacgcctttcattaacgcaggccagaggttcgtttgagaattggcctctctgtgatcccgcgcgttacgtattgacatgtgtcttcgactgtatatgctcgacgcgtcgggcgtgtgaatagccaaggcttggagtactcctctagcagctgaggaatcccgtgctaagatgttcagcagccgttggagtcgagtggaaaattctgttcgtatattcctttctctatgattatgccgacctggtcttgatggatcttattcttgtttctgcgtatgggctttgcaggccatcgcccttgggcagtcgaccggtgcctacgttgctctgctcgcctggaggtgagtttcttcttctggtttctattttcattcgtggtccaagtgaatccaatgcttcgggaagcttctagtactagtcgctgaaagcgcttccaaccattctcttatcctctcaaatgaatagagacgacagggtccaaagcaatactcctacagcgacacacaagacgtttttgccaaaatcccacttcagtcaatcccttcaatcacttcctgacggaacgtccgcccgaatctatgatcactttgtgaacctcgtccgggagactcatccaaggttcatcgaggcccaacttgaatccgtccgtcgggaggcggaggagaaggtcttccagatggaagagagagcgagaatggagagagaggagcaggataggaaggtgaaagagttggaaagacgattggaggagtatcaaaaagcaggcacggtcgttgcttcgtcagcggcgacaggatcaagtaggcaggctgctgcttcagatacagtaacagccacgggcatcgtcgatgacaaggagaccgtcttaatctcagatgattcatgagtgttctctcttcctcttttttttgtcgcttgtacctcattgcgatagtcattatttattcgctctatacgatgtactgtcgttttttcaagacattgactaagtccccggaaaaaatctatacatgtttctgtaccatactgatgaaaacgtgtccaatcgactaataaataagatcaacttttcgaaggacaatcaatacaaaatcgaattcatctaaagatcaagccaaggtgttcttagaggatttctcctttttctctttcttcgctttcttctcttttttttccttctttctcagcaaaatgaaaccatctcccaagtcatctccggaagctgccacagtctctttaagcactggctcctccttctcctcaaccgccgactttggctttttccttggaatttcctccgacgaggtcgagatggaccctagcacagaagatgatgatggctctggaacacctgcgaatagccgatcgatctcgtccatctcttccggccgagtcgctttatctcgtttgcgtttcttgtcctttttgtccgccgagagagaggaggaagcaggaacgaccggcgtcgaggttgacgcaacgggagcgatgggttgaacaactggaacaatgggtttcacagaggctgcaagattagtagcggcgggcgtaggtcgaggagcagccgtctgttgggcgagccattcgtcctctcgtcgcttgaagaaaccaatattgacttttcgagcaaagaatcgaccatattgagaggaagacaaggtaatctcaaacggaacaagggttcgagcaattttggtctttaggaagccatcgcagtgcgcccaaagtttttctcctacacgagagccaacgcggtcatctacgagtccgtagaaattaccgaggaatgcaagaatcaccttccgtgagctcttgaagggaacagtgggtgaatcaacaatgacgtccaggaggcgagatgagatcggactgtgcgctattttgagtaaataatcgattggttgagctaaaagactattcaaatccaggcaaggaagcaagaaaatcaacgtcgaggttacgaaagacaaagacaaaaaacacttacctagagataacggtctcgttctcttgactaggcaatcgaagcaaactctgcaagatcagcgacccctgaatattcggtcccagcggatcagccgtctccgctacttttttcaaatgccctagccgcctcttagcctgtagagcctcttcttctgtcatctcaggctcagcctctagcctaggctcgggttctttccatcgatcttcctcttcctcctcctcgacttcatcagcttcttctccttcgggtgcagggattccagcggcttttcggtagcgcttcaaaggcttaagagtcaggacgcagggaacgaggaaactctcatctcgcggtcgctgtatctcgaacgattgacaaaccgtgtcgagcaccttgtctccaaggacttggagatcggcagcccggtcaatgaccgctttgatcacgcccgttctcgctcgcatgacagctcgtctccagtctcctttgacctcgtccaatagacttgctagctcttgttctcccaatctcgtcaccgccttagcaacgacaaagttggcaaccggatgaacacccaactttcccattctgccgacgaaataagtgctccagatagaggaaaatactggatcaggtgcaacgcgaaggagaagctcgaacagatgagaacccgtggcgtctcgaagcaggagctcgaggtaatcggatcgagaaggtgcttctgatgattcgtctgttgaatagatcgggaaaagctgtaagcaaaagggtcgaaactagaacagtaaaaacggcacgtacgcagtgttgtgatcaatccggacagagcagtgtccatcaaagagcctttctcattcgatgcgcccccctgagcttcaagttcaatcaacatctgaattaccgggccagcaacctggccaactcctagcgccctgatttcaacctcgccaacttttcctcggatagcaccccagaactctgtaatcaaactgttgaaactatcagggaccgctcgaagggttccttctggtgcgtcggcaccggtctcttcatcgttctgaacgaacgctttgaagttagcgttagactttgcgaatttggtggatcgtttggaacggatcgcggaggattgggaggagggaccgccagcggtatgagctgaggggataggtcggcctgtaagtagcagaaggagtactctgatggggtgagaagagaagggtgattggatcaaagtcgggagtaaaggaagaagctcttgagcgatgtcgtgaatctgagaagacattctgggaagaacgccttcggacgggtcggcggtttgttcttgagaagggaagacgttacgacactgcagatgattcaagttgaacaagaaaaattagttcatactgattggctttgtaaaagaatatatgtacggatacagaactccgtacctctcggtcgatcgtcaatgctcctaaggtaaacagcgtctgaacaacatgacttccaaatctatgttggatcaacttggcgtagctaaaaccatcattggaaatcaaattcaaattagagaaacgatactcgtaagtgaaggtttcgcgggaggtttgaataaaagcaaaagcactcactttcccatcagactatcggcaaacacccttcgaccaaagtcacccatgttccagatcattcgctcgagaacgagagcacaatctgtatcagtagcgagttgaagctcccttgatcgaagctcagacaatgcagcggtaaggagcaaatggcgatctaagatttaggtaagaacagaaagattttggttcagttgatcgaatcggtcggccaggctgattcaactatactcaccctcattctcttcgtcggcgtcttctccttgaggaagcccaaggtcttcaaacactttgagcttatcatctactgtcttgaagtatgatttaacctgtttacgacggtgaccaatcatgcgcaaatgttcccaaaccaagcgaattgtcaggctacatggattgacaaggaatattcaaagagaaagataggacatacctctggatcaacaaatccccagggggcgtccccttcgattcgctctcggatagatcccagccctccatcagagggtgtaacccaatcggcttctccaccgaacatgtttcctattcgtcggccagagggagcattgtcttgggagatctggttagattcctcggtgggctgctcaacatcttgttgctctagcggaacgaacgatggggcaggcgtaggctcaaacgccttcggaatcacatcatccgtcgtgttcttagcctttctctttcctctctttctaacgagctcctttggcatggcagattgttcttgtggaagtgttgaatgagtgtgagcgaggattggagaaaaacaggagtcaagcgataatagaggaaatctcaaatttcctgaatcgaaagctgtgcaaatcattagacgcgtctctattatatttcgttggaaatctctctaatatagtaggagtaaactgtattgtgtgttctgtattgaattcctatcagcgttccgtacgttcatttgatcatctccttcctcgtccagacaggtccatctcttcgttgatctgatcgactcacctccatccacagattgcatctttacctctcatggcattcctaaccgctcaacaacaaaatatggcgtctcaagcaactaccccgctcagtacccacccacctcaaacatcctactttcttccgcatatcacaacctcagcttcggcctcagccgcacaggtggcgggattgcagcatccgctcgcgttcaaggaatctgaagtgatcacgatcgattggaaactgacaaacttgaaggctttgtttgagacaagcagaggtgatagtaaatctagggtagtcaagagtgtccttttcggaggagctaggtggcagcttttgtacgtcctgcccatatattgtctcaaatcgccgtatgccagctgactcgcgaccctacaccagattttacccaaatgttggtcaccttcaatcatattcacaaagcaattgagatcgcctctgtaattcaatgcttttatctttcgtattaggctggtggaggttctcaagactggtgctctctgtatctctcttgtgaacctactcttgacggtcagttctgttcaactcttgctgtcaactttgatgttctcgcaactcacctttttgcaaaatccaaaccttagagtatgacgaaggcccacctccaccaacggcatccacttttggacagacacataccagtgcgcaatcaaatggcgcaggaaagtcttggtctcgaaaaggagtttaccaattcaagttcgcgatctgttctgacgaaggaaaggtaatatgtgtcagggaggcaggtgcatatagcttttctactctttgaccgtcgacaaagccataagatggcatgcgcgctgaaacgttcaagccgcttgcctttttacaaaacaacaaaattaagctgcggaacacgtaaggttactctgtatcatctcaaaaaatctatgtttgactgctttgttgaacccaaccctatgacttaaatgaatattctcattttcatcccaaatatagacgttctcaagcaagaccgctagtaagtcaagacttcaagtctgcatgaccacttcagagtgggtagcgctgaccaactttcactgttttgactctctcaagactggggggtttgttttatcctctcactacgtcccttcgctactttctcattgattcagagaacctgatgtggtatatgtgtctttcggaaacagtgggctcaatatgctaagcgtgatgtcgtatactatagtacgcacacgtcttaatgaacaggttcttcgaggtgtcattcacttcactgacaagatcagttgtctttgtactgccactataatagatcaacctcaagtaaaatctgcagatacgttcctgatcacctgtagcatatccaccgttcctgcgcctcccaaaccaccaagtactattccgaaacgaaatgttcctcaaagtcttttgctggttcgtttttagagtctttcgttcaggatctgcttaaacaagaattctcttgttcttgttgttaatcatgaacaaaccggtcttcttgctattctcccttcgcttcgatagtcggtgggacgaatgttaaatgatccgatctacagtgatgtcagtcatcacatgtcaatttatcttttgatttgaatggtgcatctctgattgtatcctttccgatcctttgaactatatacaggtcgagtttattcttccttcgagagatagatattcaggactcaaagagaagcgaaaggtgatctatgccaatcggacactattgaatagatcagatgtacgtttctacaccacttctcgttcgcaagccgagttcacccgtgaatcatctatgacattcaagctgacagcccaagagttgtatcaaacagtactttgaaacgatgctctcttcaggcttcatggaagggttcaatcaagaagaagaagaatcgtccgtgcatgggagtcagactgaaaccgaatcacatgtgaacactttttgcctgctccttcttgcccctgttgccagggctaactctgtgttttcgggtctttgttcaatatattacgacagtctgaattcttagatccaccatttctggaggattctgattcatcagatttgtcgtctgatgaagaagaggagctggagaatgagcctcatggatttacccaagaactctctgcagtggcatcaccgtcctcttccccttttgctttctcaactatcgcggcgcgcatgacgagcgactcggatcagccagcgcatgctgataggtcggttccagagggtgaagggctcgaagaagctgcaaagttgaacccgcatctagatggattagtcgaaggagagggcttatcaaagaaggaaggtctggtagattcaacgaacaaaagcactcatacgaagaagcgtgagcgatcgaaggataaggaaagggcggggcatattcttcctgggcctcggaagcgtagagtaatcgttcgagttgagttctgttccttttgcacgtacatacgaggtgttcaaacgttttatctgacgcgctgtttgtgtaatgcatctgaccattcgaaattactgcatgctaggacgcatcctacccgactttctatgctctcttatactatctgtacactgatagtatcgcattcgcccctttgacctcctcattcattcctttatcagctgtaaccaatcatgttgacacgtcaggagctaccgtgggttctgcctcatccgaatctcatccaagtaagctaagacgtctgtggatagaagattggtcgaagatgaacccagagagaccagagccagtgagcccgaaaagtatgtatgtcctggcagacaagattgggctggaagaactcaaaagtttaagcttcgaacgtaagttgccacctagttgatttcaccttagacaaatgtgttctgaataatgacaaaatatttcttcttccctgctactctctcgttcatgtgccaaccatagacataatcttgaatctcacggtccagaacatcccgcacgagtgcttctccgccttttcagcctcattcgacgatgtgcgaaagacacaagtggctttcttcctgaaggtccgtatatatccatatcggttttcaaaaaattgtctactatgttcattctttcttcaaatcaaattccgaaatgtcactcgcctgatcagaactgggctgaaatcaagcgaacgaatgggatgaaaattgtttgggattcattacggtctgggaaacatctagggttcgaagaaggtctgtacaagaggcttgaagatttgccttttatgattctcttctcaagacgctgtctaattttttttgtaatctgcttttcacctttacagtctggcccttgatcgtctctcagttggagtatgtgccattggctctccaggaccctgctggccaggctgctgtatgaacgaattcattgcctaggactctgttgattaaatgacatttcttgaagagtaatcgatctgccatatgcttgtagaggcttctcgatcttctgtgttctgagcagccggttactccgttcgatgatgagactcatttaaatgagaacgacgcgtttcatgagacgcgtcattcacgtgtttgcttttctcagtgttcagtctcctgttctcatgttctttactttgatctctcctgcttccttagatcaatcatacctcgccacccctcttgttactctctatctagatggctcttcctcgctcacatcaaattagcttgacgcctcatgagatagaatttattgcggaagagactgaaattgagatcgtgcctctgttcggaatggatcccatccgactcctttccgtaagtccgatcgtccagatatcatatctctgcgagttagatcttgttggctcgtcttttgccctataattatattgaaccgagatgttgagaaaaacgaaatacaggggatatatggtccttttagaccgccacaacggacaaaaataccattctggctagctatcaacttgaaagggaaacgaaaatgccatatcctacccccagagtggctgagcgttggtaagtctgttccctctacagtataagaagcttggaagagaactatccaatctagaaaagtcaaacatatactgatcttgtgtggtttgctctgtattctatttctctctatatgattaaaatgggtttgacattgggtggtacagattccctccaggcgttgcttgctcacgaatcctctttgacgagctcatttgctcggttaccctccagacaattttccgaaatttctaaaatgcttttagatgcgtaagtgaagtctcaaccgctataaccttgctctcttcttcttacctcaagcccttcctcaatttaaaactaattgcggaacacataatccgttctgattgtccttcatcgatcggatgaacaaataattacagagcttctgataatttggtaaacccgtcacagatcaggtcacttctaaaggatattagagaggtccggcaagcaaaattgaggactggtataaaacctacgataggcgaggatggaacaggtcttaacggagaatatcttcaggtatgtccaaaactatttctgtctggattgatttgttctatcgattactgacgtgcacttctatccttgttcattgatttttttgctcttctttccactctgctgctgacagttgacaaatcttacccctttagagatcaacgagttgaggccgttctttgtgagagcaatgggtgtgatgacaaaacttagaccgccggaaccggaagcacctgatgaccaggcagacggtcctggagaagaggatgaggatgaggatggagatctttcatactagagatgcccttgatcgaagaagcaaggggcaagcctgagaacttttgttgtactttataagaaatgaatgagcgtcgctatttgagaatagtcgtttttgttgtagtcggacattacaaaattcctctattaaactggaaagaagactatggtacttttcccctatcggcccgcttcgtcctcccttcctcctgtccatcactcaagatcttcttttttaccatctgctcgtctgcctttccccgtggtgtgaaactcaatccagcaaccgtacatcatatattatcatcatggtcttagccgatctaggtcgtcgcctcaatacggctatcaactcgctctcctcagccaatgtggtggacgagaaggtgtgtcaatcagagtgtcgggagctgttctatcttggttaaaagcactaagttgacctacccttcaccttgtcggatcgctcgatcatccaatttaggctctcgatgctgtactcaaggaagtctgtgctgctcttcttgaatctgatgtgaacgtcaaactagtggccgctcttcgaacgaaagttcgctccgaagtacgttgacagcattcctcgtcgtcacagatcatagtctatagcgaaacgagagtctgccgactctgaccttcattttactgaccgactccctccctcgctttctcctattttcttcttctttccttttcctttcctttcgaaaaactaggtcagaccgctgctaaacccaccagcacctcaaccagctccttcgccatccaaagcatttcaaattgttcaaaaggcaatcttcgatcagttggtgttgctagttgaccctaataggaaggaaggcgaagaagaaaaggaagaggacaagggtggattccagtggcttcctaagaagggaaagagcaatgtgttgatggctgttggtattcagggagcaggaaagacgacaacgtgtactaaggtacgtgagcgataagatcgcgtctcgttcaatcggatgtatcttcagctgacgactttcctctctcgtcttcatctcggtatgcttcgcccttagctggctgctcattattctcgaagaggtttcaaaacctccttggtttgcgcagatacgttccgagcgggagctttcgatcagctaaagcagaacgctaccaaggccaaaatcccttattttggaagctatactgaaactgacccggtagaaatcgctaggcaaggagttgttaagtttaagaagggtacgtgttctcttacaacaactctataccttgcctcacgcgctcgagaactcatttgctcagtcgtcgttatgatacttcagaacgttttgatgtgattattgtcgacaccagtggaagacatcgacaagaagcagagttgtttgaagagatggtcgccattggggatgccgttaaacctgttcgtttcttatctgtcttgttttatactcgtcattggcccttcatactcgaaggctgacttgtacgtcggttgtctggatgttggcaatgataggatttgaccatcatggtgctcgacgcctcaataggccaagctgccgagtctcaatcaaaggctttcaaagaatcagccggatttggagctattatcgttactaagctagatggacacgccaaagggggaggagctatctcagcgtgtgtccttacatatttcgaggacgctcaagatgttgtttgctgatgctggctaaactaccctgctcttgtctacgtcgacatcttccttcttcttttatagagttgccgcaacgaagacgccgatcatcttcttgggaacaggagagcacttgcaggatttggaaaggtttagtccacgaccatttgtgagcaaactgcttggaatgggtgatatgcagggtttgttagagcacatgttcgtacatttatcccactcagccaatcgctcctctcgtaggtcatttctgatgtttacatcttactccgacgcgttttttcttcccataaaacgtgtgtcttgcttctttgaatcgtttattgtggaattaaacgataattagtcaggatatccaaacgatcaacccggagaagcagaaggatttggctacaaaatttcgatccgggaagttgtccatcaaagactggagagagcagatgcaaacggtgatgggaatgtacgttcttgtttcggtgtttttttttttcatcttatgttaagttaggtcgaatactatattgtctaatttctaatctgattctgcatccgaacctctaggggttcattgagtaagattgcttccatgattcctggattaccggctggtcttctagatggaaacgaggaagaggccggtaacaagctcaagaagcttgtgtttgtgacggatgcgatgactgctcgagagttggattctgacggaagttgcttcgtatgtattctcttgctacgtcacttgtctttgttcagtcacgtttaatcagaacaaaggtgactgacacgaatctgttgtcgggggaacagatcaggaaggataaggatgggaaccccattgggtttactaagcgagttgtaaagattgctcaaggaagtggtacgagcgtgagagaggttgaagagtgagtataacgtttgactgagatcaagtcatttgtctatcactcctgactaccattatttattttattttattttttgttgtaatgacaatccttcagtgtgttaatgcaacaccatatgatgtcgtcaatagctaagcaggcaggaggagcggctaaagccaatccgttagttttcggcctctctttctcttgtttcttccatcaacaggcagagtgatatttcttcagttctagagtgtcaaactgatgaaatgaacgacttgttccgatgattaataggaatgcagctttagcggcaaaattgacggctgctatgggtggacctccgttaggacctggtggacagcctagtcagcaacagatgcaggccattcaagtttgtcttttctttttccctttcttttcctgttccttcttttggatctactaagtgtgtccgctgattgttttgttcttacttggctttgcgttaatcggggggaaatagagagctatgcctcccgagctgctccgcaagatgcgagccgctggtccggctggtgctcaaaagtatgtgatcgtccttacgtggccgtttctgctgacgatagaaactgacttcgtcttgatgttcgaatctccagaatgatgaacgaaatcatgaatggcggaccgcctgctcctggagctggaccgcccggtggaggcatgcctggtttcggagatttgatgaaaacgatgggtgggatgttcggtggtggaggcgccggcggtggagggttacctggaatgggagccggagggatgccaagcatggcagatatgcagagtacgttcttgcctgtctctctctctctcttctttccttacaattcgatcgtcctctagatagctaatgatgtttttttcaaaccttattattgttcttgtcgatgttacttttcgtttgttccttcccttgtagaggccatgcagatgatgggtggaggagccggtggaggaggaatgcccggtacgatacgtttttccttcttctctttgaccttaagcaaccacatgtcatcagccctcttttttttccaaagaaagaaactcacgcttcgttgctttttatcattggaatttttatcattggaatcagatatgagtgcactcatgaagatgatgggtggcatgggaggggcaaagtaagaggagacgaacatgaagaggaacacgttgtctttacttgtatcacgttctttcgaaaaggggaagagaggtctatattcattcggtcttgaggacccttcctcgtcttttccgtttaatcattttcgttgaacgttttctttccgcctctatgagcttatttttcttgtaggaataatcaaaacattaaatgcctcttcgcaagattattcaagcttctgcaaacattatagcccggttgctttctcaacaaggtttaaaccaaataaatcaagggaaagctagcatttataaatctaattagaatatgtgagggaaaagaggagcttgataaaaacgagtatacgcagtgatagtattcaagagaggctgaaggatattgaagaaactcatatcaaaagggaagaaagtttcggaaattaataattccaagaccagagcaaaagacaagaagacatgaccataaaaaaagagagaaatcattccaacttggcctttctcttgggtcgagatcgaagccacatgaagaggtagaccaggataaagaagaagacaacatagatgacagtgattccaatatcccgacctccatcggttgagttgctcaagttaacattcgccaaatagtcgttaccactcgagtaggcgcaaacctcgcaactggtagtcgatgtcggatcttttatgtaaccaggggcagattcgaagaaggttgcgagatagttttcacaggtctgaccgcttggaggcgagaagacggcgtactctgaatccttgcatacgacagggatatttcgcatggcaaagaaagtttgagcgccgagaatataggtccaagggttgaggtagtacaaccagtatcgccagaaagcagtgatttgagcgtagggcaccaagactcccgagaacgaggcaaagattcccaaaaagatcgggttgaccagagctgcttgttcggcgttggccacgctagcggcaacggcatatgcgaatccaatcgaccagaattggtagagaatcaagatggcgtacatcggaccggcgtgctgagcatcggtagagattcctacggggaacacgacgaagtaccaaagcacgtagaacaaggtggaactgacaatcacccaagggatctcggcaatgatctgggcgacgacgaaaggctgccacgagtaaatcttggaaggcttttctcgagcctcgaagagcatccgagcgtcaataaaccgaggctgaacctgctggaatactccgggagcctagagccgtggaagagacaggtagatagttggttgaaaaggtcagcaacagacatcaaaaaagggtgaagttcgttgggacgtacaacaaacatggcctggaagacagagaaaagtctgttctggagcgaaatgaccgagttgtcaagctgcaagaacgagagcgagtttagtagggcggatccgacgtgaagcatgattttagatatgacatagtctggggatctccacatggcgacggtagctcgatgaattagggtcttgtactggaaggaggcgctggcagcgtattcccttccgtcctcctcgaacgatggaggcttgctagcacattcctgcttaaggtcggcaacttccttcgagacgttcttgtattcgtcagactcgagccaaaccttgccccaatctcgtccttttgaaagagagccagagacaacgtcgatcatgaactcggcaggattggcatcctcctatatgaggaaaagtatatccataacaatgagaacaaaagattgaaaaacgagacgaaaggtatgcaggacgtacagggcactcgattccttgtcgggcaaagtacgccttcatttcggaagcgttgtcaccaaggtctccgaagtagacggtgtctgtaaagaagagacaaaacgactgtgagcacatatcaagccataacaaaataggatcttagtactcacgtccacctcgggcaagaagtagtaatcgatcaaactggtcaaagagcaaggcactgggctgatggatggtgactagcatggattgtccagcgtcggcaagttttcgcaagaatcgcaaaatgttgaaacttgactgtccatctaaacctgaagtaggctcatccaagaagagcaaaaccggcttggcaacaagttcgacaccaatcgttaatcgctttcgttgttcgacgccgagtccgacattgttgtttccgataatggcatgttcaatgtcggtcaactcgagtagatccaagaccttgtcgacatacgctaacttctcctcccgagacacactggccggctgtctgagcaaagcagagaactcgagagcttctcggacggtctgcgtaggctcgtggatatcgacctgggaaacgtatccggtagttcgctggaaggaagctccaagaggtcgaccatcaacattaatatgtccctcgacaacaccctcctcttttcgaagagctagcacgtcaagcaaagttgtttttccagcaccggatgctcccatgagcgcagtgagcgttcctggtttggtgtaaccctggactccggaaagaagctgcctgtggccacctggaacaggcacggtgtagtttagttcgtcccaagtgagcacggtagtcgtcttggttatcgtgtcttcggccgttccgttacctctggtggtcttgccatcttcgatggccccggcaggacccttctcctcatcgacagcagcagcctttcgagcaatgggatcgtcctttttgttcttctgtcgctctgttacgagaaaaagggacagtctacatgtcagagaaagcggtatgaatgtaagaaaagaaggctagacactcactgtagagcaggtacgatcgttcagagccttgagccttgagcctttcgactccccatgcggtgatagcgacaaagaaaacccaaagaccaatacttcaaaaaatggataggtaaattcaaatgtcagactcaatctccttcaacaactcaagagagaatatttcgagaattacaaagaaaaaggacatacacgattccgacatttcgccacaagtggctatatctgtagttcaagccggcctgcaggtaggcatccccagtaacaaagtcctctccagtctgacttccctggacagtacacgcaaagtgcccatcgactccgtagaaaggcacaagtgtggtaccaacacaatcgaattgagtatcgtggaactcgttgaccatggcagattcgaacccgtagtacaaagggttgatccatcggacccaactcaaccaaggcttcatcgatgtctgagggatcaagtaaccggtgtagataatgagcaaaccaacagccagaccagacacctgtgaggcaccatcgaatgttgagaagttgaaaccgatagctcggaagaagccgagcaaggcaagagtagtaacgtaagtaatgatccagagcgtgaagaaggccgaagcgctctgcctgagctggcacatgaagtagactttacgccacagacggatgagttcataattagtac

SEQ ID NO: 294 - DNA, 29086 bp, Xanthophyllomyces dendrorhous
cataattagtacaatgtgccagatgtggaatcacaagcttccttgtgaacaaacgggaggggtagacttactaggcaataagaaggccgagacctgagcgataagaatagggaagtctgccaagacctgggcgagaacgacggctgagggcctgtacatggcgaaactcttgtgctttgcgaggatagttcgaccggtgaaggaggtcgtaacctctgtcattcctagcaacgcgttgaacagtaaaatgaagaagagggatcctcctcgagtgaacaatccggcagtggtctgaggaaggttgtagaacaaagaaccaagaatgatcgattggatgatacacgatccttgcttaatagcgatcgagcccttgtcgttccacatcagctggtactgtcgaatagtacacgccttgacttgggtccaaagtccggttgagtagagcgagttcttgccagcgctggcagatttctcctcttgaacggccaacttgaattcctcagtcataccattcagtcgctcggtatctcggaggtggtcttcgagctccttctcgctctgcttgtaaatgtccgaggccaggtaggcggcaacaaagtcgtctaccgtctggggcacgtctcgtcggtccttgtcaaacagcattcgctcagtcttgacggtgactccggtcaaatagtcggccacattctgtccttgcgggcacttgaaaccgaggttctcgaagtagggcttggcggccgctcgaggtccccagtagatgcattgtccggcggcgatgaccatgaccttgtcgaacagttcgtaaatctggttaccggcctggtagagtgaaatgaaggaggtggagccgagcaagtcggtgattgttcggatggaccgggtgtactctaacgcggtggaagcgtccagtcctcgagatgagttatcccaggcgacaactgaggctcggtttaccaagacctcagcgatcgacactcgcttccgttctcctccagaaacacctcggacaaactcatttccaaccagggtgtcgtgggtgtgttcaattccgagagtcttgagcaaggctgaaagaagctcttgttcgtactgctctcgggtttggccctccggtcggttcgtgggagtcttcatcttgagcccaaatttaagcgtctgaccgacggtcaaagtagggtagtgcgtatcactggaagacgaagagtagaacgtgtcagaagagagccgaacgagattgatacaggaaacaaacggcacatactcttcggcattgaagacaatgtttccggagtacttctcggcctccttgtggtccatcgatccgacaaggacgtctccgtcgactccggcatatccgtttcggatgttggtcaccgctttgaggaacgttgtgcatccacttccaggtcgaccgatgacaaatgccatctctccggatttcagtactccgttaaagtttctgatcaagactgttcgtcagaaggaagacaaatcagcggatcatttctttgaacggcaaagagaaaacaacaatagagacgaacacttttcattcgtcttgagagtagagggagcgttctccaaattttcattagactggttggctgcttcagctgcctttgcctgcttcttgtcttgaatcttaagcatagggttgaacatgctggaacgaagaagcacaagaaaacatgggtcaacacatcgatcaacagagagcgcccgagaggtaatgatgagtagcaaatgaggaaaagaggggtaaaactaacctgcccatggtctcggcgtacacagcagaagccccgactcctcgaaccgccaagttcttccaagcgacatcaagtttcttctgctttatgccatcgtcccgtctggaggcgagcgctccttcgaggtgcttcgcaagggaccaaggctcctcgctgtgtcgagaaccagtaagcgacctttgaagctcatggaaggccggatcgttcttgtccatcggctgtccgacatggatgctgaaaagtcggaaaaaagaaacatgaacgaccattggttaatttggatcgagagtagagacctagacagagaactgaaggcggacgtactcttctccccagcaggatggggttcgggtgagctccggctttgtaccggcctcaatatcgtgtgataatgactggtcggtcgacgtaggcgcagggttcacggcggtctgtgcctctgactgtgaggaagctctgctagtggaaacgttggaagactgggaatttggttcaatcgcgatgttgtgttcgcccacatccggcgttggtggctgtgcggccaacggcggagcgaacccggtttcgttgacggaatacgacatgaagaaagtattaggacctagggtggagtgagacgggaagagatacgggagaagatattctctgagcgaggggagcggcaaggaacgctgtaagatcacaaccaagaggaacaaggaaagaaagaaggttaggaacgacagtgacagcaaaaagaaagtcaagatctcgatctcaagctcggccaacaagtattccgagggatatggaacagagtactggtacaagagagaaattcccgatccggcaagccaagagtatctttctgttttcttgcttctcctcttcttcttctacttcttctcatccttgatcaagaaggaatggggaagagagcacgaacctagaagcacgttcaggagagagagagataatatctacaaggatatctgtcttgaaagaaacaagggaaggaagagtgggtgactgaaggtgggaagtgagaagaggatcgaataagaatttcgttgattgctttaaaacaacgatgtttttcctggcgcggctccggtgatcgtacgtgttttcttttaatgacttgactaaaaggaatgcggcacgaagccccactgcccgggcatccggtcataagcccatagtagtcagctctcccaatcccatagttctgtagttctatgggcccataacggtgtattgaactcaacgtcggccatcctcttccctactcaactcatttcatccttctttgatttctctggcgcttacgatgcttttgcgatgagctgtgacattctagtgttgactcggaaagcgatcgatgtctcgttttcttggcatacatacactttgtcatctatctgcgctatcatctcattctgggccgtgttttgttctttcggctgtgtcgaaatcattcgatgacatgataccaagtatacatccattcgcatacaccgcatatatcaaatacacacttgtcgcaaaggtagtagtttctacaaagaaccctagacagaaacgaccagatgaactcctatcctcagaaaactgtatgattgtctgattgtccagagagcgtcgccacatatgttgtctgttgtctttcgttccatgctcagaagacaatcgggaaggccatcaatctgccatagcccgtatctgtagggtctagccatggacttatgaattacctcctcgatgtgctgtcatccgaccacacgagcatgacagtgtggttcggccaggctccgagcaggcgaagcgaagcgctcggagtttgaaactttccccgagtgcccagaagattatgtcatcacttcttacgctccaggtgttttcatcttcatcatccatgcgtccaaatactctttatgacgcgtcacttgttataagctccggccggctttattctcttctcatcaagagaggtctgtggctgttttaaattcagtacaagattgagttacagcagacaaacaagaactgatggtcgtcgagagaagaaacaccacagcgatcacgacgacagcgacaaacattgacaacattgataacgaagatattgaccgggaacggaaagcaaaacaatagtctagctagtcatccttgtgtacaaaaaaccactttgtttcttcatccagctacaaacgcctcggctggcgtcgatcggcctttcggattgccaagttcttcccaaaagatttcgttcatccgttcagggttgtctaaatacacatggtgccctgcgtaagagcaaaaaattctcgatcagaagtcttcttctttctacgttcatctcttgccgagacaaataaggaaggggcgaaacaaactgtacctgcgcgttccacaacctcagtggacgtctgtctgttgccacgtgattgcattcgtctgcaagcctcaacaccccctttgaagtccatccacttttcgttgtatgataaacacagagtcggaaggttttacagttcagtttcgatatggaattgacggtttagagaaaattgtcagacatacgtctttatgtccataaacaaatttcacaggactgctcataattgacataagacaacaggtgcaataggtcagtattacgcacacacgcacacgaatacgaatacagagacaagaccgacatcttgatatcatccatccgttctactagcggttttcgagcaaacgctccaggagcaagtagatggtgaatacagtattctcccttttgataggatttttcgatatcaggaagtcaaaagtatttctctcaagtgtcagttcggcttttctttcctaaaaatcgtcgaaacccgagtctcaacggaaagacttacactccctttagcggtggtggtggcatagatgtaagcactaggaagattaacacgaaaagtctaatgagcaaacgacgatcttcgaaaaacgaaagtgcttgagaaccacagctattaaggaaaacaattaacgaaactgcatatcccgaatatcctcttgggagagtccttcgaatcgcctggaagagtacgctccaataagcttcggagccaacgggccgagagctttgagaatagagcagacaactgttagcttgagaaagcatagacaaaaacgaagatttacaagcttacatcgaactacagaaaatggagaccatcccttctcccatctgtaaaatcagaataccagatcagaatcatcgttcgcttcaaaaggcatcgaaactctgctcaagtagagacagcatgtacgcacgcccatccgaaaacactcctagcagccgattggctctgtggaactttctcgcccttctggtcgtttttttgaggcgccttcatttccttcctgccctcactcaattcagattcgatcgccccggcagccgcatcgacatctgataccgttggcgtaccctgagtactgatcttggagggtgttaagggcgcatttgggttgatcggaattccagcaggcgagatcagaatcaacttttcgactcgagacggatacttcaacgtatatgctatattcgatatcgatcaacgttcttttcggtcagcgcccccatatgaattcgattgaacaagatcatagatcgcgccttcctcgcccccagacttaattagagacgaaactcaccagcggagagatagcctcccaacgaatgtccacaaagtaccatcttatcccatccgcctcgctttcgccattcttccaaactttccacgaaaaagtcctctgcattcttcactcgttctgccactctaccttcgtcattctcgtcgaccgatcctgatgccgatgaaggcaagttgaatgccttcggtgacggccgggaggagagacccatcccaagccagtcgagcgcaaatgcccgtcggttggcagacgcagaagcttcaccgaacgctgtcaaacagatcgatataaaaccaatcaggacaaacatcggtaatgacaaatatctctgcaaagattacttgccttgaagatttaagaagaagaacccaagcgcagctccatagccatgaagcagcctggccgaaagaacgtaaagattaacgaaccttggtcaactaatgaaaattccagtacactcacacattaactacgcctcctttttgcgctttggttcccccgtcgccaacggtataaaacttcagaccgtgtaagtacttttccgctggcggcttcgttttgtaaagcgggagcttccacgaagaagatgacaagttcgcttgggttgataaaggaaattgctctaatcttgccactaatgggttggacaatagtgctgtaggtgtcggatcgggtaggtctggtgaatggatgaacgaagggagtctcctgtgaagtacataagtagataatatcagttgaagaaaacgatacgaatcggagcgaagaaaggaagaaaatgcgtgccaaccgaagaagcctctcctccgctagactcatttccttttctctagagaaagaccaccaggcagccagactctgaccgtacgtcgttggcactggcctacttggagtaacaggagaatgatcgggcaacgaagctgtcgacgagttagcagtggacgttgtattggaggataggtgaggcgatcgctcatcaggcagatccggcagatcgttggtcggcagggcagacatatcggttatgctttagggaaaattcactctgttgatccgctgttgctgccgtggttggttgtaagaaggatgacaatcggataaattggggaagagaagaaagtggaaggtacataagctgatggggagtgcgacaaaggtgacgtgttctcggcttcaccctacgtgttgtaaccctaacattcccggtcatcggtcatcggctcttcaattatagaacaaagcaaaggtttgaacttttaaataacaaccgattggtaacaatagggacgaacctacacgcagtcaagagaggaaggggtataagagaacattgatcgatgctgtgtcttttagttggaatgtgcagaagaaagtatgaaaaaacagaaagaaaaaactctgaatgcaattaaaacatatgtggcatgaacaattgtatatatggggctgaagaagaaaacacaacaagttagatggaacgaaaaacagtaaacagtgaataaaacgagttgatcggctctctaggagtaagagatcgaggcgaatactcaaattgcaggtatatgtcaatgaatacgcgagatgatagcaagcgaaatgaaggtagaaggaacgaaaacaaggcgaggaagagaggaaacgggaagattaataacccttcaagatcaagaaccaacatgtgaaggtatagaaagatagaataggcagaagcttcgggagctctggattttctcaaagtgtaccttcgtgtgctttgaatgctcgtttcagaggcgagctcactcgagctgccaagtcagatgcacccaatcagagcaaataagtatcagtcatccatctatcgattataagtcgagcacggtcctcgagcaaggattaaccatatactcacgagcaaactgcatactcttcttcctcgccttttcgagtgaaattgaaaacggattggacgtcgtagtcgaagggtgagagagaagatgtttgggctgaaagaagaaggcaatggattagtatatttctcacaacatgctgtctgacatatcgaaaagacgtccttggacgtacttccatcgatttgcgccgctgataagaacaggataaggaaatagaacacaagttagaaatcacaaatagaacaaatattgagagatacaatgaacgaaccttagtaaactcatcttgatcttccggtaagatcttatactcttcctcctcaacccacctcttctcctctctgcaccggatcacccatccaatccccattaagcaaacaagttttttcactcttgacccagtaccctcggccagcgacaaatttcttgagccgtcaacagatgcaacagatgcaacagacgtgtctctctcagacgcgtctaggacagaagaggaagtagaattttccggaatggtcgtcggaagagggacagaccgtcggtagaacgtcagggtagatgtctttccggctttgtagataatgtgagtcacagagtctgagggcgctttcaacacctgaaccagatcgtaatatttaatgatgatggtcagaatctgagacattgaaggacttaaaacaatgagatcgtagcaaacctttgctcccagttctttcaacatttctacaaacaccccacctgcatcatctccttctgccgtcctgacatccacaaaagcgacaacgcccgccaaagccttactagtaccgtgccctctgatcgaagcgattgaactcttgcactttgacaatgtgagagatacattcgactcagtcgagttccctgatgccgtggattcagtcgaacgtgatggcagggttgtcaacgaccggttggagggctcagttgtcgagttgagtctactgtcacggagcgaggatgtgagaggaggtgggataggtggaagccttcttgatgaagaagacacaaaagagccagaacctcgtttggctccaactccgggcttgttttcagagttcggatctttttctactcgtccaccgtcagtatctccatttggatgtccagcccgctctaaagatttttttcggttggccttcattattgccaaactctgcgctaaaccagccattgccgattgtccttcacatgacaacccactcttgctaagcccagctagcccctccttcgctatcccaagtaagccgtccgcgccggaagatgggaccttgggaagaggcttggccttaggaatttcattcacgactgtgctgagaacctgctttggcttgctgggcccgagaatagacggcgcaccgttcgcagaactaggtgccgccgaatcagagcttgacatagtcgatgacgctgacgacatgtaggtcaacggcaatgaagcagctgatggagctttctctgaaaccgagtccgaggcgacactcgtctgttcgttcgtcctgtttccagaattcatctttgagggccctgacgtcttccttgttcctgatcttcctgttaggttggtcgaaaagataggtaacttgccgaccgtccccacgaccccagttccattggaagatcttgtcgagattgaagaagctcccgaagaagtaggtaatcgggggccattgacgatcgaagtcttcgcaaaggacaacttggacgctcctaaggggagtgccgaacctgattcggaggaagaagtggataacaaagaagatgtggctgatggatgcttaggagtaggcccacttgggactcgtgaatttgttatcggtcgggcatgaacaccaggtaaggttggatgagcaggaatcggtccagttctcggacgcgaagcagaaggagtagatgggaatggaagaagagatagcgtcgactgagctaatgaggcagatgaggcagatgaggcagatgaggcagatggagcgttctggacggactcggattgagaggagggagaaggatcaaatgatgcaaattgaaaagatacgaccgatgagtcgagaggtggcttagttgatatagaggctgtcgtaggttgaagagatgaggttggaagagacagtggaagcggtcgctcctccttgatctctggagtctctgccagtgccagctccgacacatccgagattagctctaacgacccttctagatctatcttctggtccttattttcctcctcctccatttccttttcctctgcgcgatgagtctcagtccctccatttacactatgtaacacgaatggtatcggtttctcagctccctcaactctctttattatcgccctccctccatctcttccaggctcaaatccaccctcatcatcgtccaaactcttggggaagacccgcttcctgggggacctcaattgcttttttctcatctttttaagatccatgagaggaggaaacccttctatccccagaccgcctcgattagcatcagcagtagcggcgataacagcacattgacgacttgggggagacgatagaggtgatcggccttcaattcttgttccagatgaagtcaaaccagtaggcgagacaggcatcggcctgtttgtccgtcctttatcttcttggaatgaaggagaaaacctgacccgtttcgatttactcgatccacttgatccaacgcttccaattaaattgaacggatcctgatcttcgggagaagaaattggcgaagacgatggagaggacgagagtaggcaactcttgagtttccgactgttcggccctgaggagagtggagaaggtcgggcagaactaagttctgcgaggtcatcccttgatctctttttgtgattcgatgctggagataatgtggacgaagatgaagtggacgaaggggtattggcaaggaatcctctgagatcgcttaaaggcgtcaaaggagaactggggcgtgattcattgggagaggtattcgtctgggaatctttcgttatgaattgactcaaaggagtagagtgaggatgcaccacagagcaggaggaagagggaataacaggggtggaagcagatatggtttttgtggcggcaggaacaaaagcagaagagcaaggagtagagggagaagatgaggaaggaggagtaggtgcaggcgtaggtatgggtgtacgaacataaaatgggttagatgcgctttcatctacgataggcatcattggaggaggagacggagtgaccctggtcaagctgcttgatccagacggagatggcacacgaggaagcacagatcgagggatgaccttagcaggggatcggctgaaagcacccgcgcgacttctttttgttccttgggcaacgagaggagtcagtctgttgatatgtccgctcaaaatggaagagcgagagggagataaaagagagggaggaagcctagtcggagaggtgggtaaaagtgtcataacggacttcttctttggagaggggtgcaaccgcatgtcgtcgtcgtcttccccatcatcgtagacactatcacggctaagtctgtttggtgatatgagaggggcaactgtcttgggaggtgacaccttagaaccaattgaaggactcgatttaggcttcagtgagccagatgaaagacggagagattgagagcgggtgatccgagcgcgcttgacaggggatgcccgtgtacgggcggatgagcggacagatggacgagaaacggtggccggagaacaactaggggcgacgatagtagagaaaacggtttggttctttttgggaaacttttttgggcgggactggagatcttcatcatcttccatctgaacaggtaccggagcatcccgacctttccctttctcttcggcggtaaactttggttcaatccggccagcctcctctgacagagaaggcgggagtggtggttgagcaaccacagatagatcaagaggatcatcggctttgatatcccggaccgtatgagtactccccagatctattgattcaaccctatcacccgcctttccctctctcacaggcacgcatcttgcccttgtcttctttggtgaattgttcgctgcttgaaccgctcgacgcgctgattgatcggacgatagatctcctcggacaatcattgacctagcagctctagttctggtgtaaacatggggagagaaagaagcagaagaggtggctcgaatagatcgtttcccctcacgacgggcagtcgtctttgaccctgggggcatttaactgttaatagagtagaataagagtaggaaccggaagagacagagacagaagttaagtaacagattacaaggaaggttgatatatcgaaatgcacgcatgacctacgcaggagaggaacaagaggaggaatatgcaatgagaaagaatggggtatatgctatccgggtcagaagagaagggtatcgccaaaagatgtagttaagttgatggaaagcacattgaacatagtccaaccaacgaccaacgaagttcactcaggcgctattaatttttcatctatcattcaaataacgcgtcttgttttccagctaaggccgcgtaactggtagacgcgccgatgcttccacaaagtaagtcgttttccatctgtacacactttgaaagggagactatcatctataatccacccacagagttcagaattcgagggagaaagaaaggactttcttggactagacagttagaccaacctcaacgagcccggcaacttccatccagccaccgacaagatgcagactacctgttaccaacacatcgacctcattctctgttgactgctctttggtctctgaacaaaccagctcaaacgcttcttggatggaggacgtgattcggatcgcgtccgggggaaacgacggttctatttctcggaacgcggaagcaagagactcttgaatttctagtgtctgatcttccacggacgattgaagatctagatgtgatatgttaaagcgttagtgcaagcatatacaaaaatgaatgaatattacaaaacaatgcacggacctcctttggattggccagatgcgtaggtcgtattggttgagaagatgaccttatcgaacagcggcacggaagaggaggtaccagacaggcgcctcgcttgagagaggagggcggtaagaagagaactagctgatcgaccatttgtacagttgaagaccaatactcgtctccgaccgccttccgttcgctctttcacttcctcccagaaccagttcccgcatccttctaagctctctgtcgtgtgggctccatccaagaacgtcctgatctgaccggcctggagaatttggcatctccctggccagcttgtattctctaatccttcttttgtcggctggtcaagaggaccttcaagcgatggagagcttacaccatacagtggggatgacggcgaaagtgagggagatttaaggagggaatcaacgagagaaagagagagcgttgcgtttgttcgttggtggatacccgctagacctgaagaagaggatagtggagacaacagggtgagatctggaacgagaaaacaaaaacaaatagcaacaagtttctttcttacctagcttgattagcgctaactctggtctgttgggtaggacaacaaaggaggatgcctatgtatacgagatcgtacgaaatcaaattcattttagtctaaactccgcactcctatgttcattcatgagagaagtggctagacaacagagtgaacagtgtatactgcaagaacgaacgtgtgcttcatcagctctagctcgaagaacttcctcgccattctctggttgctgtaccgagaacgcaggaactccttgctaccgatgttgatgacggacgaagatatgaaacaaagaaataagaaagataatttagtcacgcttacgtcctcatgtatgacaggctgttgacagaacagaccttgtagattccgcccttgttccaagctactttcccaatcgtatctcccaataaatgagtgtgatccaacccgagcgaggtcactccagcaacgactggttgaggaataatgtttgtcgaatcgaacgcaccgccgatccctacctcaaatattgaggtgtctacctagtaaagttcacccccataattttcattgaaggggaaaaattcgtcatccaatctgaaagtgctatgatgtcgagcgagtggtaaaacttcaaggcataccttttcagagaggaacgcgtggaaggctaacagagtaagatatcggaagtagaccggcttgacaggtgtcagcggattggcgatctgttgtgtgaatcagccaaaggtggagcaatataagggaagtcagacatgcttccatgttctcctcctcattgacttgacaatcagttgagcaagtaatccggcgaacctgggtgtttccttctagtcgctcccatacctcgaagaaatatttcgcgaatagctcctctgagagaggaactccattgatccggattctttctcgcacagccaccagatgtggagatgtatagagacctggatagatgaacgagggaagattcgaactagatttaagcctatggaggagaacacagcgcgcgcatagaagttcggaagggggaagaatgggagtaacgcaccgactttcagaggtctcttgatcttcttgtccaatggctcatgagccgcatacagagatcgcagtacggagtcacaaaatgctgaggttgatcccttgcctttggtaccagtgatgtgaatggcattgagcgcatttaatcttgtcggctgatctaggtcataatcccataccaatcagcaagcttacttgatgttgttctcggccgaaaccccaaagagaaacatctgattcataagtaagattgacagacctgatatcccacccttcctagatattctctcatttctaccaacgccgactcattcatttttccaccagaagccttgatggcagcgatggtggccgcgtttgactgaagagagttgagcagatggattgcatcctgcgagccgggaaacaatcaagaatacagtcaacgaataagcttcaatatcatctcaacaaagccataatttagatacgcaagacaaattctcactctatatgctctagtagaaagagacatttggaattgttggttgatagtagaagaaggcgaaaggccggggagagaagaaagtaagtgtgagataaaacattagggttacaaatcggttttctgtacaaacgtttaacttgttcatactcattgaattcttgttcaaacagagtaactctcacgcatcctcacccacatcatgtctaaccatccgttgcttcctccgatattccctgcaggcagaggtttgtgttctctctttatcattggttgtcaagctgtatccttctgtatgctaaattcggttgtctggttgatatatcggttcgttctgatctcattctcctttccagaacctgttccgccggggacgactgaggaggagcttgccaacatgcgtcaaatgacccagctcaacaaactcgttaccactgtcccagaaagctgtatattcaaaactgttctttctgctggtgcgggtttcggtctcggagctttcttctctttgatgtcgacttcgtttcagtatgaggatccgatgaatagagcaaacgtcaagatctccacaatggcacagacaaaattggcgttcaaggatatgggggtcaagatgtggggtaccggtaaaggatttgctaaagtcggagcaatctacagtggagtagaatgttgcgtcgaaggggtgcgttcttcttacatggtttctctctccggattcgaaaagcgagactaacgaaacataatattcctcttatatacctgccctcatccggatgatgctatatacagtaccgagcaaagaatgatatacaaaactcgctctacgcaggcatgattgctggtagtatccttgccttgcaaacaggtagtggtccaaaagccgtgctaggaggaggaatcgcatttgcagcgttcagtggagcaatcgacttgtatatgcgaaaggaagccccgttcgtcctatcaaccttcctttctgttctttatcgtttgtttctcccttagaaaacatccatggttgacctcgtctcctttggctgtgtgaactgacaacagggatgaagactaaatctccacaaataaataaacgttctcagaacagagttcgtcagatgtaatatataaacgaacacagcctcttctcttttcatatccctgacttgatatctcgattggctatccttggccttcttgcattgcgcaatctgtaaactatttgtcgaatttagccattccagaaagaacgtggactataaaactaggggataagaaagtaaaaagagagtcagagtttatcccctgatagaaaaggtcgtatgttgcatctcaaacgaacgaacaaatgagggaggacgctctgtcttgatatttgcacttgtaatctatgaaaagtggctttgcgaagaagcagattcttttcgcgactgttgtacgacaactagatgagagggtcatatcctaacgcagaggaccaagctgacattatcacgcgtacaagttagtatatgaggcacttcaggggtttcttaatattcgttcactatcgcgataatgacattcacttgtgcttttctcaagaaagtaaggaatgatacatatatgtacaggtcgtcagaatgagaaaaatgagaactgtgtaccccagaccgaggccaaagataggcattagaacgtataaagcaacatgcgatcaacgtgcaaccgcaaccagactctctacaacttcttttaaaggtggagggagacggtcttgatgtcctttccggcgttcttggctcgcttctggagcttggcaatggacttgttgcctcggagtcctcctccccactgtcgtcgagcctcctcgtacttgtcagtgaagttggccttggcggcggagacaagggtggcaagagcagcctggtcctcggacttgacgtcctggagaacaacacaggcggcggtcttcttgtggacgaccgtaccgagtcgggccttgttcttgacaatgacgtaaggaactcccatctttcggcaaagagcgggcaagaagacgacgagctcaatggggtcaacatcgtcggcgatgacgacgaggttggccttcttggcctcgacgagggcaacgacgtggttaagaccgtacttgacgaaaaggggcttcttctcgtccttcttctcggtcttctcaccagcggcaaccttctcggcagcggcaaggagtcgagccttcttctcctgcttggcctcaggcttgtacttgttgaggagcgagaacaactgggtggcggtgttcttgtccaaagtgtgggcgaactgggcgatcgcaggggggacctgaattgtggcggagaaaaatatgagcgcgtggataggaacttcaaaacgagaagtacagacaaaccttaagtcgctggtgaaggataaccttctgcctctgaagtcgaacgtattcgggccacttgacgaatcgggtcaagtcggtcttggggggaagatctcctccgataccgaaagttcgggtcctcttctcgaagagagggttcttggcgaccttctttccgcccttggggtctgtattgaaatatatatcgaatagtcagaggaagatcgaacacgaaaacaagattataatcgagacttacaaggagcgggagcgaccttcttagttcctttggtggctttgggctgtttggatgaaggggatcattgagacgaggggataccggttaggaatccatccaagttgctctacatggggaggaatagaaacccaagatgggacgaccatgaaccctcccctcccgacagcaccggctgagagcccacctcgcgtccgaatgcggcttcgccacatccgacgagcgaggtgttttccgagtcaaaggagaaccgtgccttgatcggtcttctagaaattgcatcactccgttgctctgtgcgaacccaactccaatctctgaccggtccagtgaatccttctacaaggaagggtcgtctctacttctcaactccaacgtctgaaggctttcgccttcgtcgaaacattgacgcaaacttgagacagaacgttggtgatgaggataaggagagaccgagaagaatttcactgaaccggccaggttgaggaatgatataagttgaatatatgcggcgagcagcagaagacacagaattcctgttggaaccgatcaagggagaacaggttctctgttttgacgacgaaaaaatacaacatatccctaaagggatgtgccaggctagccgtttcttatggaagagatagtgttcgagtcttaaacacaatagatatactgaccatggcgactgtaagttcttgctgaagaggatgggtcttgaggaagaaggtggtgctgagaggaaaagagagttttctatcaattttccactgactgattgtgtgttcgggaagtgtaactcgagccgtaaattgtaaccaagaggcatatgactttcacgtggtaacatgcaaaggtcagtcagggacttagccgaattctcgtctcctcccagccgcgcgtgaaacagctggggggaggaagtgtagtggccgagagatcagctcatttcttcaaggcaatcatccgtatgttcagttttctatcttggatgcatctagagggatcggggggatagaacatatgctcatgtttcattttcctgctgatgcgttgtgaacttgcaactgaataaaaaaatctagcccataatggctccctccacttccgtccccaccgccgaggttcgtttcgccaagttctaaattctgtcggtttggaatcacaggatattgagggagaaaaaaggggaaagaagggacgagaagtagaaaagaaagagaaaaatccggttctttgaaggtgtcgttcagaggctatagaagatgtgtttaggggtgttatgggaggaagacctttgatcgtttagccctgggaataacggcttgacgttaatcctgaagatacgcagagtcttgtcagtatgtttgtctcagtgatgttaaccatgtctcttcacctctttcttcttccatcctgatccttagcaagtcgccgtcccggagactctcctcaagaagcgaaggtccaccgagaagactcgggaggagaagctcgctaaggctgccgaggcccgaaaggtgggtctttcttgttcaaaatacaacatcaataccacacccacagacacgcacacagcatacacacacaaacacacacttcactcaacatcctcgactttgccacctcttagttcaagtcaaatccaatcgcgtcaatatagatctcgacacacttccccgctcgacacgtttagacttaaccatgttcgacatatgtccctcaccagagccgtgatcttgggagattttgatcctttttgcaatgatgcatacgtctatccatgacgctaattgacgactagtcttgcacgacgatgatgtcctcaagttaaccatctttcgggactgaatacaaaaacatcaaaagaaaccttagatcaacggctcttatcacctccgtcctctcatcccttcacacagtgctgtcggttgttcctagatgaatcccaagacatagcaaaagagcaggggctgacatcatgtggtcttttcttttctggggcgtgtttttctcgtttgggttcaactcggtgtgatatgcgtgctggtgatgtgaacttcgcgattcggaatcatctagaccaagcgagccaagcgacaggtgatcttcaagcgagccgagcagtacgttaaggagtacaccaccgccgagaaggaggagatccgactccgacgagaggcccgagcttccggtgacttctatgtctctgctcagcccaaggtctaccttgtggtccgaatccgagggttagtttgcgtgccgttcatctcttgcagctgggcatcaaagtctgaccatctcaaattctgtggacgtgtataaactttgtgtttgtttggctcggctggctttgttctggggcgttggatgatgatggaattggttgggtcgaaattcgatactgggaacatacaataaacgaatcgtcttgcatcactctgatctataatacagtatcaacgagatcgctcccaagccccgaaagatcctccagctcctccggttgctccagatcaacaacgccgtctttgtcaaggtcactaaggctaccgcccagatgctcaagctcgtcgagccctacgttacctacggagagcctaacttggctgccgttcgatcgcttatctacaagcgaggatacggtaaggttttgaagcagcgaatccccctttcggagaactccatcatcgagaaggctctcggagagaagggaatcatctgtattgaggatctcgtccacgagatcgtcaccggaggtcctaacttcaaggccgcttccaacttcctctggcccttcaagctctcttcccctactggtggatggcgagctcgaaagttcaccggctacgtcgagggtggtgatgaagggttcgtgccctttatctgattttcttatcgtcatgcatcaactaacttttgtttttgtgtttgcgcatatccctctttcacagactccgagagtccggcatcaacgctcttatcaagcagatgaactaagtgtttgagaagcttggatgaccaaccaaggtccatcgagtttccctttttgatacgtgatgtgccttttgacggtcgttcaatatacaaatagagcaaaggaaacaatcattgcaaaggacaccaaagagatatgcatgagagagatagtaaagagagatacacgaaaacgcagcgtaaccgaaaatgtgtgaaaaagcttgtgatgcgcgcgtcatcaaagatgggctatctgactggtttccggttcctggaatctcgtcttagttttccccaacgagtatgagattcgttcgtttgattccgtcttcccccatcttcccttcaacctaacatgtggttctcctggcttagccaagctgtcatagagtggattcctgttgtgctctctcttattctgatctatgctcctcagctttcgacattcgtctcctttcttgtatcttcaaagaaacgaaccagtgggttctactggatactcggtagtctggttggaccggtgtggttgattccttgggtttgctgggtctggagtggatgggcaatcttgtggcgcttggatatgattggaggaaaaggcttccctggagactggggatgggctcggtggggaagggtttggactggatggtgttttcttgaggtaagggcgacatatgtaacttctcatttctgttccttgttcatgagacttaaatatcttcttcatttgatgcgcgcaacgcgccatcctcgcatccaatgggtgtattgctaccttccagtccgtcttcattctataccatgccgttcaggccttccgaatccaggcctctcgcccaccccatgatctaccagcaaaccagatcgagcttctctttcttcgcatccttcaagcaggaatggatccactactcgagatggaggatggcccagacaccgagttgattcactcagaaaatgagctgagtgaagctttggtagacgtaggggaaaccacgaggagaggagaaagcttagagagcgtgaagagtccaagagcgcttagactagtaagaaggctagacacggccgatccaagggcgaaagccttcgcagagaggtgagttcaaaattgatctctaaaacttggacgtatatacagagacaactgactgataacctctaatcagactgcgaacatggttcttccgtatgccttgggaatccattaaaaaggacaacatcatggaatgggttgcctggtctgccttcaagtgcgtgttgcgcatttcttgcttttgtcttattcttcgaagcctctctagtcaatagcgctgactaattcttccgcacttgtatgctaaagctcctcggtggatcaagtggcaatggacccaacccagaaagcctctctagagtatgcggtcgatttgatatcgaggcgaacaggcacgatttttgaggaaggtagaacaaacaatgtcgaagtcatgcggcttaccctaggttcgtcttcattcttatttgtgcataaccgcagttgagttccttcagcttgagccttagctgatggtctgttgtaaacatatgatgaaacggcagacagagtcaacatatatcatcgacccctcgtgctgtatgcccttacagctgtcatcaacttggggtgcgaggcttggtgtagggcctatggaatgcgaaggaacaccatcaaagggattgagtgcgcacttaattcttcttctagttctgacgagaaactagatgacaaccttcaaagtcgttactgatgtgttgcttgaggcctatttcgacagctacatggttaggatccctcatgattggacaccagaacaagggagagaggataagaaccgagagccgatcgtgttccttcatggacttggtacaatccttattattcattcacatttacacgttcctgttcttacagaactgaatttttccttcgatcgattgtcacctttataacaaaaaaacaacattgcaggcttcggcttccttcagaaccaaatcgtcattgggcggctggtaaagcgatatccatctcaccccatcatgatcgtggttcagccgcatatctcgatgaatcttgttggtccttttgtttcttcaattccactatcagaaagctagctcggtgcagtatactcatcattgagcgaggcgtgataaatcgaatcctcatgcggaaatttgaaacgatgtccttcaagttcaatgtgaaccatcttcgaccgatatctaaggatcaatttgttgattcgttatcaagcgccatagagcattacagattttatgatctacaagcagaagtctcaccctcaacagggacgaagaccgatgaggtagaaacagttgacaggggtggtgtcgttatgttcagtcattcgaagtaggttcttgtctccatatctcattgtgctagcacataccttgaatcagcggcttaggctattgtcttagtaggatgctaatccatagcactatcactgatgcgccttcttcttcatccatgttaatggcaggggaacggtaggccattcttggctgatgaaggatcgaccagagctcatcaagagaagttgcttcgcagatcctgtgtgagtgtaggacgtgtcaaaagcgtattctcataaaacacctcgctattaaattaagtctgctatagacgtgagactgatgtcttacgtatttaaacttctgggactgaattaaatagagttttctgcttatgggaaggaggtatgtgtgttcgcttacattatataactatctcactactgttcctctctttcgtccaatcccaatgactaaattgagtctgtccgtctcatctatcctttcttagacgtctgcttcaacttcgtttgtgagtttatgcctttcttgatcaacatgatgatattaatataaaaatttgcttattttgcaacaccatcgcgtcgagcaactaaaacagaccgagaaccaggaaacgctatcgaggtacatgcagataagcttcatattctgtatagctcagcgctgtgcattattcacgcaatatctgtctatctcatttatgtgtcaatctctatttggttctcggtagcttctcatgagttactttatcgggtccgaactaggaattgcgaatactatatccagaaactttaactggtcgttcgtctttcttcctttacttaatcctgtttgtgtggacctgctagtgcttacatccattttcaaatcaaaactgaaatgatcagacataacacactattctttgaggatattcctcatgcacacgatccttcccggacagctttcttccttggcggtaaagattcaatcttggacgctcaggtacgttatcatcatgctgcatagctcgtcttattaggaaagatgtatggtactgaccgctcgcctcgtattgagggaaaaacagttggttaaggattacttggagcgccgtacgtggattatctggcttatccgtcgatgcacccatctactaatctctctggtgatggttgaggatgcatagatggcgctacccagtgtgtgcacttcaccccttcagatagccatggtagcgcaattatgtacgtttcctggttatttctttccttgatctgtggcctgagttcgatctgataaaatcatgtgggaatttacagatctggctctactctaaccaagattctaaagtacgtatatcgcaacccttcacgaccaagattgttaaccatgtttcgtgatcgacggctgacttggctgaactccaggtggttgtccggagatgacaaatagagatttcgaccaagctgtaccttacttttttcttccttgcgacatccatcttcgaccgaatagacgcgattgctcgtaacataagttcaaaacatgcacaccattagaatatgtctcctctcctccttctgctctcaagacttacagttctctcaatacacctatttgctgtatgatattcagcataacatacctagacataatttgcttgtttagtaagcaaccctatcgttcactctaactttatattctgctttgcactatagaatgtatgcgtttcaactataaccagtttgaagacgatccgtcttcctctttcatacagaagctgactcttaagaagctgcctattctgctcactcagctgatagagacagtgtctgaagtcatcgtttgatcgactatcaaacaagaccggcctatgccagagaaggatctttgcgttcctggagtgcctgattgtgtgcctttctgtgaaattgaacaacaacaaacatcaacgaaacaggctggtccagatcgtcatcctacgggaagcgtctccaatttatgtcttcattcatgttgtctatataaacaagccttcgttcgcttctctttccttcttcccttcatctcaggtccatcaaattcttataagcatggggttcaccataactgaagagctactggaacaagatgataccctacactcgtcgactccttctttttccaacaattccgctcaatctccggtcgacattattcggccgttacccgacctttctacattgatcgaagaagagagagaaactcgttccgaacctactcatgcgcgtcttcattgggccggtcgagtgcttggtttcgcttctcgaatcgaagagcttgttcatccctctgttgacgagaggctgccggcagacaaccgaccaggagtgtttcagctcaaaaaccctgatcttagaaagctcatccaaatcgctatcgctttcgtccagaagcttacccaggttagacctcaggaaggcgatgagttgatgacagctgaagcggtgtacctactcgccgacattctagcttccgggtcttaccctgaatattgcgagcgaaacataccgttgagcttatttatgtttgagaagagtgctttaatgggctggacgctggcctggtttcggctcgggatgcattatgaaggacagggcgatccgatgaaagcgaatgatcatttcagaagaggtgtccagggcgaggatccaagctgtctatacgtgggttccggttcacctaaccctgatgttctaaaacatgagaatcgatcgactgatctgtttttttatctgggtaacaacacttgcgccggtcatagcgaatggggatggcctatttgctcggtcaactaggtcgttcgatcgatcacagtcgagcgttcgacttgcttcgaaagtcagccgatgcagccaatgaagatttccctgctgctgcttacgtttttggtatgctgctagctggagaatttgatctgccggataccctggacacgacgattctagagcaatgtctagaccagatagccgaggtcacagacgattgtccttctccatcaatggctcggctggaccgggcgatcgattatcttgagaaagccgccactctgagctttcctgctgctcagttcaaactaggttactgctacgaacacgcccttcttggatgtgagtacaacccggtgttgtccgttcagtggtacttgctcagttcggagaatggtgagctcgaagcggatatggcgctcagcaagtggtttctcgcaggagcgccgaattgcttgcctgtcagacaagagttggcattctcttttgcggagaaggcggctaggaaaggattgccccatgcgttgttcgcagttgggtattattatgagatcggtattggaaaacctatagatcttgcgctggctcagaaatggtacaagcgagtgagtacttgatcaaaactttttgacaagaaaaaagtagtcggattcagctcaacggattgaattgtcgtttcttctttgtgtttgttcaacgaaccatcaaaggctagtcgagctcatcatcctgaagctaaatctagattgtccgcgctctcaggacctaaggctgcaccgatcttgctcaaagaacaccaacatcatctggacgacaaactagtccgaaaacgaacagacgcgattgctcgctctcaacggaccagcctcgttcgttctgaagcgagtgtgagccatcagaactccttggctcgaccatcaagaccgccgtccgttacgagcagcgctacgtcctcttcgcgcagacatatcaacgctcaaacatctttccggtggtcggctgatgaattggaccgagcggcgagcatcgtttctcaattggaaactcggccatcctttccgtctgacagaaaagacatgatcgatccggtccagtaccatccagccgagtacttttctccttcgtacgacatgcctgatttctcgcatagggatgatcaagtcgattgtcatccgaggtacacccttcaggaggtatttgtgaactcttcgacgctgaacagacaacacccacctatggaacgagccagaccaccaagaacgagggcggggatggataattcgaggcaggaaggatcaaaatatcaaagcttccacgagatgggtttcgcccctgtcaaagctgaggataaggattgtgtgatcatgtgaatgcttctttgtcggtttcttctttgtctgttctttcctcttcgcagacgtgtttgttggctatctgtcatttgtgtgttgcctctgtgaagtgtgtttgatcgttatgtctgtttagattaattttgtgtgagagagagagggaggcaaggagcccgtctggttgattgaaatctatttctatatagaatgttccgattatttcttgtttttactctatcttatttatgttcttacttttagaggtcctcaggtctcacaacgacaccaccaatcatcccccacatgagcgcctcttttccagctgcgatgttttcttcctcgtcgtcgtcatactctccatcctcgtcctcgtcctcgtcctcgtcgtcccccgctccttctacgccacctacgaccagctttccgttttccagacgacctactcggatagcgttctggagtgctcctttcgcgcctccaccggggacgagcgtgggaagagagatggaagacgtgtcggacgggccgaagacggacgatcggaatttagattgggacgttccgttggaagcgtacgtttcgggagcgagctcggatgatgataggtcggatgtaacggttgcatttatagggacgaactggttcaggagaagagaaaaaaagaagagacaggatgagaatccaagtcatgtttaatattcagacttgtccgatgaaagaaaagaaaaaaaaagagagagagaaagacaacatgaaaatggacaaacctcttcagcaggcatcaacccggcaccttggtccaatagtccatccattccgcctcgaccttggatgaggtttttcaatcggtagtaattcaccgtggcttctctcatcatcatccggtcgtccatatcgatctcgtaatcgtctccgtcgtcgtcgacgtctgagaattcgacatatccgtccgaatcgccgtcgtcgtcgtccgagtcgtcttgctctttgtcatcggcaaggtcctctacttgcgcttttgaagaaggctgtttgggaagaggagacgaattgacagccggtgccgataaaggaataggggtggggttttctgaaggatgaacgtcaggatcatcctttgctcttgatgcgggttccccaggagcgctaggcttaggaactgtgggagggtcgatcgatcgttcgacaaccgtcgatttcacagtcggtggtaatgatgatggtggtgatggcggggggagagatgtcttttcggcagaaggagaaggagtagtcgcggacgtcggtgctgatgttgatgagacagctgcctttttcttgccggagaataccgaagatttcttattcgaagaaggcatggtaggaggagccatcttccgttcgaccactatcggcttgaccggaggggcttcttggggtgacgtcgacgaggctgccaatatgggaggagccgcttggtgaggtgtagatgttggtgtaggtacgaaagcagggatagaggcaggagcaggagtaggaatagggatagaggcaccaacgacggacggcttgggtttagcaagtgcgttcgctctgaagcgactctgcttgtaggctccactgcccgcgccaggtgtcctcggaggagccatcggccgttcgacgaccatagtcttcatgatttccttcttttcctttcctcccctctctttcggctcggtttctgtttccgattccggggcgagcggttgttcgtatgtctgaccggtggagagggacgaccgtttctggtcggccgcagagaacggaatggaaggaatgacctcgccatcagtcgtggaggatgcaggggcaggctcgatggccagacgagcggtcggcttggcctccaacgtttcgtgggggacgaattccttgacttgggatgtttccgaccatgtcactgatttccttcctttgcccttgccctttgccttgtctttcgcttgcccgtcttccttctccttctccttgcctttccctttgctgaccggctttgacgtgggtttctccgggccgacgtggttgcccgaaccgaggttctctggctctttttgcttggaccggtttgcctgttctcgctcccgctcccgctcttgctcctgctccttgatctcctccaactccaacatcctaaagatggcctccttgtcgtctggtttgagtccgatccgagggggcaacggcgcgggacgttccatcacgccggccttgcctctgccttcgttggtctctactggcgaagacccgtccgggccggacgagggtgggaggtcttctttgatgtgagcctcgaacgtctttgggtcgatctcgaccgtcccgtttttcgtcatcccggtcttttttcttttctttttttcttgtcaaaagtacgggaaggagctaaggggctaggaagtgacaagccaagcaaatagtgaggtcagacctgggaacgagaaaggtcgacgatgatggatggaatgggatgggat

SEQ ID NO: 295 - DNA, 2906 bp, Xanthophyllomyces dendrorhous
aaaaaaagaaaaaaaagaaagacgtaccacatccttgagacgcgtcggacaccgttttgacatacttgtaaagcgtgccctgcttgacctttaacggcggggcgacccagttctttcgtctcctctcgagttcctcctcggagacgtccatgttgagggtgttcttgacggcgtcgatcctgacgacgtctccatcctggatgagcgcgatcgggccaccgacctgggcttcgggggtgacgtgaccgacgacgaaaccgtgggagcctccggagaaccttccgtcggtcagacaggcaacgtcgtaacccaggccggcacccatgatgagcgacgtcggcttgagcatctctggcatgccgggtccacccttgggtccgaggtacctgagcacgaccaccgtcttctcgcccgccttgatcgagccggactcgacggcggtgacaaagtcggcctcccggtcgaacgctctggccttgccgacgaactggaggccttccttaccggtgatcttggagaccgctccgtctggtgcgagatttcctctgaggattcggatgtggccggtcggcttgatcgggttgtcgatcggtcggaggatctcttggccttcccacaggtggccgtttgtgtggttccatcggtcgaggttctcgccgagcgtctttccggtgacggtcaaggtgtttccgttgatcatcccgttcttctcgaggtagctcaagatgctggggattcctccgattttttgcacgtcctccatcacgtactttccactcggcttcaggtcggccaagaaggggattcggtcagagaccgactggacgtcgtcgatcgtcagcttgatgccgaccgagtgggcgatggcgatgaggtggaggacggcgttggtggaaccgccgagggccatggtgaggaccaaggcgttctcgagggcttctctcgtcataatgtccctcggcaggatgtcgttctccaacatgtttctcatcacgctaccgatcgagtcacactctgcgagcttttcggccgattccgcggtgaacgaggaagagccgggaagggtcattcccatggcttccgttgcggatgccatcgtgttggcggtgtacatctggggggagagaaagaagaaaaaagaagaaaaagaaaaagaagaaaaagaaaaagaagaaaaagaaaaagaaagaaaggcaaagagatcagttcatgttcgcgggagggaaaagggaaagaaagccgaaaagaaggaacccaatgcgaagcgcaaagaaaatcaagagagagagactcactcctccacaggctcccggtccggggcaggcgtttcgaatgacgtcgtcctgtttttgagtgtgtcgagaaagggaacacaacagatgggacggtagagaacgaacaaccgagtcagccaaggaagcaagaaatgacgaatgaatgggggagctcgggcgagtagagaaaaggaactagaagaaaacaaggtcaagcagaagaaagaaagaggacttgcccgctcgagctcggcctgttcggtctctccgtcctggaggtactttccgtaggcctggaaggcgctgacgatgtcgagcttgccagaggacgcacactgaccggctcggatggttccaccgtagaccatgagaccgggtctgttcaatctgccgagtgccatgagggtaccgggcatgttcttgtcgcaaccgggcaggacgaccattccgtcgagccagtgtccaccagcggcggactctacctgatcggcgatcaaatctcgggattggagctgggcggagcgggaagaggaggcggaaggaggcgagaggaggcgagaggagtggtcagcgtttttgtggagggctgctgatggcaggcgagggagggagagagagagagtgtgtgtgtgtacaagaggaagggccagacaaaagagagaagatgcttaccgagtaggacattccaaaggttcccatagagataccgtcggaaacaccgacggttccgaattggtaaccgatcaggtcagactttgcgagcgagcgtttgacccgttgaccgagtccgagcaggtgcttgttgcatgggtttccttcgtacctgtggatgtgagagtacaagagtgtgagtgagtgcgatcacaccaacgcaacgcaacgtaacgcaacacaacgcaacgcaactcaacacaacacagagaaaagaaagagaaaagaaagagaaaagaaagagaaaagaatgagaaaggtgaaaaacgaccgaccacacagaggcgacaccgaccatggccttttcaaagtcagacttttgctcgaccccatcggtcgcgtacaacatggcctgcaagaggggggggatcacatatgtgagcgtgtgcagacacgaacaagaacaaaagcataaagagaaacccacttgggaagcaccctgggactttggctgggtgatcgtcctactgtacttgttgatgggacctttgagagccgggctggtgagcccgaaggaccttctgagggcggggcttgagaggatctgcctggaggacgaggcggggactagcatggctgtgacgggggatgatggatagatggatagatggatggtgaggaggggaaagtgaaagaaagaagtaagcgtttttttttgatgatatcttttttgtccaatgggatgagttggaaaaaaaagaagaaataaaataaaataaatcaagatggaaagaatgctcttttctctttcggctgatgactcactgggctttcacttggaacgaagtcggcgtgggaacgactgggttggtgtagagcgaatggagggatgcgatagaacgagttgcccatcgaatcatcccaggtcgagtcaaccaagctcatcctcttttcggacgcccagagccgaaagtatagaga

SEQ ID NO: 296 - DNA, 874 bp, Xanthophyllomyces dendrorhous
gtgtgtgtgtgtgtgtgctagagtgtgtgtggggcagatagaccgggaggacaaggatgccgagcagacacaacctggtgtgccgggcgggaggcgaccgaggaagaagaagaagagggaaggttgccgaagaacggacgtcggatgtgatgatcgacgttgttgtagatgagatctagtgtgttcattcatgctctctgtgcgctctttgatgggcccgggactgggcatgactgggcatgactgtgttggagggatgcggtagagaaggctgctgggatgtcatcacatggggaaccatgtgatgtgatgtgatgtgatgggatgggatgcaatgcaatgcaacgccacgagacgcattacaaactgcagcgcacaacacaaacacaagcagacatatatcacaaaagaacacggcagagagcaagagagcaaccagagcaaaggaaagagaagaggcatggggcatgatgcacaaggcataaagcataaggccgggggaggatcctcggagggaaagagatcaaggagaagatgtagatgtaggatgtggtgcacattccggtacgcaacacaccgcacaacacattgttcgagagcgcaacagtacagcagtgaagcagtgaagcagtacatcagttcatcaccacctatgcctacacctatgcctacacctatgcctacacaccaaagagacagagaaggagacgtctggctgccgatcaatgttctagtagattctgtagtgtgatctgaaggaatttcctaatacaactttctagtgtgctccctaatacaaatcagacacgaacgattaggaatcggatggaacgttccatctgtttccagtcgatccccctggggcgaagagggg

SEQ ID NO: 297 - DNA, 551 bp, Xanthophyllomyces dendrorhous
gcccacccagcagaaggagatcgatgacctcctcatcaagaccgacggtgttagtaactttttttttctctttcccttttctctttcgtccttctcgtatcactcacactcgatcaccatctcactcacccacccctctagacccccaacaagggtaagctcggagccaacgccatcctcggtgtctccatggccgtctccgaggccggtgccgccgccaaggtacgaactgtttcccttttgaacccttgctcccaaccttacggccccaacttatcttaatacttttgctttcccctttctcttcctcatccacagggcgtccctctttaccagcaccttgccgagctcgccggtgtcaagaccccctacgtcctccccgtcccgtgcttcaacgtcatcaacggtggttcccacgccggaaacgctcttgccttccaggagttcatgatcctccccaccggtgcctcgtgagtctgccttaagggttttttttcctcttcccattcatcaaactattctgacccttgtctttttcattctgcctgcct

SEQ ID NO: 298 - DNA, 2285 bp, Xanthophyllomyces dendrorhous
caccttcaccgaggccatgaagatgggttccgagacctaccaccacctcaagaaggtcatccagaccaagtacggaatcgacgccaccaacgtcggtgacgagggaggattcgcccccaacgtctctggagccaccgagtccctcgagctcctcgtcgaggccatcgagaaggccggctacaccggaaagatctccatcgccctcgacgtcgcctcctccgagttctacaaggacggaaagtacgatctcgacttcaagaaccccaactcggatccctccaagtggatctctggtgaggagctcgccgcccagtacaacgacatggtcgccaagtaccccatcgtctcgatcgaggaccccttcgaccaggacgactgggcctcgtggacccacctcaccaaggacacccagtcccaggtggtcggtgacgacttgaccgtcaccaacgtcgcccgaatcaagaccgccatcgagaagaaggcctgcaacggtctcctcctcaagatcaaccagatcggtaccatcaccgagtccatccagtccgtccagctctgccagtccaactcgtggggtatcatggcctcccaccgatcgggagagaccgagaacacctacatcgccgatctcgccgtcggtctccgaaccctccagatcaagaccggagctccctgccgatcggagcgattggccaagtacaaccgattgctcaagatcgaggaggagatcaaccttgccggtggacaggctctctaccccggactcaaggccttctccaagggtcttgccgcccccgagttcgctctctagatgtcgttctttcttttctgtttttaaatattcccttttccatttcttttgggttttgccaatatcatgtttaatttcccatgcacattgttttctcctcgccagaggatccacataacatgcctttgatctttgtgtgtgtaagtgtgtgtgtgtgagatacaagttctatggaaaaagccactgaacagagtgtgttaagaataataagaagaagaaattaaaaaattaaaaaaaagacacgccttacgtaaaaaataaaaacctctcggggggaagtcagcccaaccctccgcttatcgactacagactaacgaccgaacgaccaacttctcgcaacgtacactccctcactcactcacacactcacacactcacacacacagaaggaaacaaacgacagaacacaaaccgtctgatcacacatgagctcgctttcaatttttgtgttgggttgtggaacgatgggtgtcgccatcatctctggtccgttctttcttcctccggattccttccctttttcgttctcaaaacacacaacattgaggtgagagaaagacctgacgagtctactgtcccgaaaccaatccctccccttctctgggcctggctcggttcgaaccatcaggtgtgctccaatcgatggaggatccgttcccaaagagatcctctgccagcggcacctctactcctatcggcaacggcctgggcgagggcgaaggagagcctctgttaggcaggttcatcgctaccgtcggtcggtatgttcttcctcaaccttttccttctcttcgtgtttggtaatcgctcctttggcgacaaacacaaaagaccaaagctgaaatcgaaaccgaatcatccccccacgggaacgatgggcgatgacctttcctttctttctttctttctcgtttggaaaatcaaacactaaagaccggaatcagtaaagagactccgaaagacgttcgcctcgttgcccaacgggatcggagagaaagttgaggtttggtcggccgaggggaacgcgaaagccgctgctgagtgtgatgtcatcctcgtctggttcgtccctcttgcctctgtggtttcggtcaaggcttctctgagtgttgattctcaatctttttacctttcacccatccatccacccacccaccctttctcttctgcgctcaaacttcacaccgaaacaaaactggaaaacagctgtaaaccaaacttggtggccggccttctcagcgagatcccctcagaggcactggagaacaagctggtggtctccatctgcgcgggtgtcaagatcgaacagatgaaggcaatcttgccggctagcacgatggtcgttcgtgccatgcccaacactccttcccgagtttgtcccttctctctttcttccctctttttctttctttacggacgtgcgcaatgcttactgagatatgaacggttggcggaaaaaaaaaaccaaccaaaatat

SEQ ID NO: 299 - DNA, 1874 bp, Xanthophyllomyces dendrorhous
atcttttcctccatcggtctttgccggacgctcgaggagaaacactttgatgcgtgtacggccctgtcgggatccggcccggcgttcgcctgcgtcgtgttggaagccatggccgacggcggggtgatgatgggtctgccgaggaaggaagccttggagttggccgcgcagaccatgcagggagcagcgaggatggtgctcaccacggggttgcatcccgcccagttgaaagacaacgtcaccagttcgtgttttttttctctctctcttctttcttttctctctcttttccttcttggttcttactcttctttttgtttgtcttcccgatctctctctctctctctccctgatctttcctctgggtttccacaaaagccccgggaggttgcacgatcgcaggcctgctcacactagaagacggcaaagtcagatccaccatggccagagccatccaggtcgccacccagcagtcagtcctttccctctctcctctcctcttctttttttttctttctcctctctctctctctcaccccaccccacgaaccaatctgacgaaactatcgactttcggctttcggcgttcaccttgaaatcaccaacagcgccggcggactcggtcaagacaagaaatgaaaacctcaagaagtcaaccttcaaacccagaccagaccagaccagaccgggtctgacctcttgttcaaacgtatccttgtcagccaaccccgtttttgtcaataagacagaaccaccaccccccccccccctcacatacacacactcacacacagataaacacgggcggacgatgttatatgaatgaacttgaaactattctgtagagatatcgtctcttgcctcttgcctcttgcgtcttacctcttttccttcctttctccctcccctcttctcttgctttcaagactgaccggtttggcacgaggatgagaatgcaggaagaacatgaggatgctccctcgaagggttttctcacgatgagacactgtctggcatcgatcaaaagcataaagagtaaacagcaaggagatagagaaagaaaagaaaagaaaagaaagaaagaaggaacagatgaagatgtgcggctggaagaccggtcgagtgtgttggttggtataaatacttgaattgaacgatgggagaggatctaaagagataaaaggagaaagaaaaagaaagacggaagagagatgaatgatacagattcttctatatattgatgtccaaaaaaggaacaaaataagagagagaaaaaaaaagaagggaaggaagtgaaagcaaggccagacaaaggaggagtttagatccctcctttcataggttcggccacgagaagtgctgttggcgacaagaaagacaagttcgaaccgtttgtcagtacagacaaataatctttaacgcaaaaacaaaaaaagagaccaccggcacgcttaacataccttctgccgtctccttatcctgaccggtcagaccttcatcgtccgcgccgttcgcttccaaaaacgcatcgagatcagccatcactccgtcgtcatcctcctcctccctgcccgtcccgtcgacctcatcgtcgtcgtcgtcgtcgtccccaatgtcatctatcgcgaaccgttgtcgttccatcagcgcgtcgttcgctctttcaaccatctctctttcttcccggactttgttggcgagagtgttaccggatgaagcagacgcaactgaaaccacagaactgatcgattgtcgtcgatccgttttttgcgatggactcagaagagattctctcctcttgggctcgacgaatgtcatatcggtctttccaatcgccggccgatgtacaacctgtcaaagttaccccccccccc

SEQ ID NO: 300 - DNA, 42062 bp, Xanthophyllomyces dendrorhous
cccccccccccacacacacatgcgattttaagttttcagttatccaaacaagtctcagaaaaggaagaaaagctaccgacctggtgctttccgaatcgctgtcctaccccatcagcaaactttcataatgatcaagcctcaaattagtatgacggtgttcctcggagcaaacatcaagacaagaaacccaagaaaactcaccttgttgaacgccgacttgttttcgtccgttagaaccatgcccatgattcctccccatagcccagacttggcttgctcagcggccttgttactgtaatcctgcacaggctccaactggaaggagcctgacaattctgattcaaagaatgcctccaatacctatagccgattccaaacatcgccagatcagatcatttgacataaacatgcaccacaaagaaaaaaaactcatgcactcacctcatcggccaacacaaccatacgaaaagtggctagagactacaagaaaaaaaaccaagacagaaaagaccaacaaacgtttgcgcactgcccatttcgtccaaaataataataatatagacttaccagataaggcaagctgtgatgaccaggagtagagactgagctactcctcgatctacccaacacctggtcagactctgaagattcactatcgatcaactgctcgacagcagtcgaccgtctagtctcggggtgatccggagaggtagcgtccccgaattcatacgcgttcaagataaatttagagactgcagcgaggaagacatcgcctggttcgtttcggaacacgaaaagcaaggattccgacagctgaagcacttcatccttggtcaggaacccatcatggttgttgtcctggcacacaagaaacatgtcaaacgaactgtgagtggggtatggacgaaaagaattgggtgaccgattcatcaagtaaacgctcacgtgtaagttgaagaaccactctatagactccatcagccctgcgcccatgatcttgctgaggcccgagacaatgtcctgacaagaagcaatagcgataatttcatgttgttaatccaaatgcggtacgaacgaacgatgcactgcttttctttcaatactgaatgactggaaagacaaacctgtaacgaaagggtgcctttgctagatctatcccaggagtagtatattcgatcgataagatcgtggtccgctatctgtcgatccaatcgctcaaagccgagtgtaatagtcacagtgtcctctcttgcccaagttaagacctcggaaaggaacactctgcacatgaaaagcacatccacaagtcaaagttgataaacatatagtgtgccccgatagaaagaaacgaagtggaagaatcaaatacttacttgaagatattgagatcgatccgggtctctgtccggccatcatcggcgatagcgctcgttgtcgtcggtaaactatctccttctttccttttcggatccgaacagacagcagtgaagaatttatcatagatgatactgatttgttcttttgtgaaagacccaagggatttgagatttcggacggctgcccgtttcgagaaggactcgatttcatccgcaatgtccgcacggaaccgtttacgttcagataggatggtttcctcggtgataatattgaattcacggaaggcgacaactagtataaaagaggggaggtaagacgttaacagggatgataatattgaggatgattgtcggcgacatacctagaagctcttggaaattggtgattgatctgacccggggctatcaacagaccgcaagtcgaaacatcgtcaggatccatcgtattcaacaacgcttctgatgacccataccaaactgaggggctaagcttacatcatctgactcaggatgggccgagtctccaattgtagcgaagtaatctctcatcaagctagagggcgcatcgatccataagttagttcgaaaagacagacaagatcaatgtcaatgaaagcgagatgacaagataaacgaacctgataaacattccatcgtccgtcacgtccatcaaggcctcaccgttgatcttcaatatagcttgaaatttctcggacgagacaacgatcgggtcagatgtctgcagctattccattctgattctagataacatgcgtcactcgtcgaagaagaaggaaactagacctacagagaccaatctggaagagaaccttaggacccattgccatgaagcagtcacatattcgatatgcaaaaatcaaaggcatcgaattgatatataacgacaagaaccagctgtttttcgccaatcgttcaaataaacccctccacgatttatcagttcatgtgcagatatgcaaatgtagacggagtaaaaaaggacaaacggtagggaagcaaccgaaagttggacgtccacacttttaaggtgatcttgaatcatcggaaggcatttaccaaccaagctctcgaacaccctttggtccaaaagtgtaccatgcattgacggactataaggatgttttgttgaagaaagatggatgaaagaatacatgttagaactacttcatatatgtgggtaatggagattatgtcgatagactgccaactgacgaatagtatccaggctaaatatccgaggagaaaccgagaaggagagtcaaggtcagaatttggaagagataactgatcaacacaaaaaatgacgagtttgaatgtaccagaagtctatcacacaagacctctaacaagaagaacgcttgctcctgtatcaccgaatattaatgaatggaatacagcgcataagtatgatcggcctttgcagaggatgaaagcgctttcggcttggacagacctccgacatgtaactgagggtacaagagaggaataattggtctcgaggtcagcgcgccaacaaacaaatgagagtagagaagatcgaaggcccacatcaagattgcggcagtgaggatattcatagcttggcagtacctaagacaaagaggaagcaccagtatgaaggtatatatattagcagacgacagggcggtaacataagaagataacggacaaaacgaaacaaaccctagttctggatttctgaacgagtacgccgtcaataccctccgaagggattctataccctgctctgtctggaatcctttgtactctggcaaggatcggtagagatccttctcgatctcttccgtagcggaggtgactattcctctgttatcctccaggatcttctcgtataaccctcgattagcaaatcgcaggtctatgtttcgacgcgcaagtttgtaaacaatttgcatgaatccgtaagttggttgtatgaaacaaatactggaagaggtttgatgtacaccaagacaaaagaataaaaacaacagaagggacgtacgtatcgagccagagaggacctcccagagttctcctcgaagtcgggatggaagaccaacttgcaacaaccgctggaaggatggataccgaagcactaaaaatgacatcaaaggtcagtcaacaaccaaagcacttatgaattttgcaaggatacgaaggaaggagaaattacaagtcaatgatcttccatgaactatgtgcgtagacaaagagaacaacaccagctatcagctcgtcaccttgaatacatgtagaaatttagagcgatggcgatgccaacagccctagaacttggaaggaagcatgacaaacaggatacttaccggcaaaatactctttccacagcttgattttgcttctctctctgagcttccgcggatctccagggaatccgaatgtctcgcctaaccctctctggtagactcctttgctttcgcctccgggtcctcttgcatcaccttcggccacggtggatatcagactgccttgaggctcgtcatcgacagaagccatgagatactcggagtagagtgtagcagtgaacggtttgagaagcttcatttgtggtaactaaatagatacaaattgagaaagagggacgaaagagatgagctattggtcgtacgtaacacggaccgagggcataaatgccatgagctgatagacggggcttacttgcgctttgagagcgtctcgaagaagtatacaaaaatgttctctgagtgagcgtcgtccagttgaccgggtatataagttcgagatcagtcatagagttatgcgcatagtgtaatacgaaacgaatccttgaaacaaagatactcacgccgttggcagcatactggtcaattgcaaaatctacatccagaccaacactcagttgttgtgattaattgttgttcgatggagtattgaagttagaaagcaaaaaaagcgatagacataccactcttaacccgtgccaaagagaagtactcaatgcaaacactccagctctgctgttgagcctttcaaccctgcggatacagctcagcgggatgacccatttgatcgaccgtttatccagcgaaaggaaacacaggtacggagggaggagatagagtcgaccagcctgcaacagtaagatcagatgtagtaaaagaggggtttgacgagcatatacaggccaaaggagagtagaagtgaatcaggatttgttaggtatgagcgttcaaaatcatcaggaaccatctcccttcgtgggatataagtctcgtctttgaccgtgtttgaagagattgtgttatagatctaacatctcttcgaatcggatcaaaagcgtaggcaaaaagaagagagatagaagcgagaaagaaagcacaagggaatacgcacatgaacggcctcgtcagaaatgctgaccacgcaattgatctccattgattttaagctggcatcttgttccgagacagaagggaggttgaaagaatgacgagtgtattcctcctttgttggttccttctgagctcgaaggttagggagagccatattctgaccggaagaacaagtagggagatgagtagatgagagatgagagatcaagcacggatgcggcgtaggtcgcaatttcgaagaatgtagctggacgtccttggccgtgctctcccaagtctcattcccgctcttctacctcgtattctatatgtctatgttcacatcacttacagtgtgtagtctctagtaaatgttctcttcgaaggaataacatccagtataacttatgataggatagaccacatagaagaagatgtttcatgtgagtgatatgcgtcgcgctcttaggactgaataggcatacgtcctgattacttttatttagttatgagtaagtatgtctcatttgtatttcaattctctcacgaagaaagatgtaatcaataccagagactcattgcaaccattcagcatagaatccatacatcacacagagaatagagatagtcagaagggcactgttcgattgcaaagtgagaagattgtacgatgaaagagatgcctgatgaagaacttgtttacttgtttcattccccttcagtttcagcccgtgggtgtgtcatcacaagaaggatctcacgaaacgcaaggccctcgagtcttcttcctgtgatacatctgctcacgttcgctcaaatatcatcgtgatgttccggaacttcatttccctcagtcaaggctgtcacgcgtataaaggtagaaaacatagggagggtacgacccgaaaacagagacgggtcgaagattgagagcgtaggccttgtacagtgtaggcggaatatttcgaaatcgaataatcggctacgccaagcgcgccgtttcttcaccccaaagctcttgatcatattatcgttgccgctgccttcgtttctctaattctcgttcgcattcgacggaacaacggatgggaagaacatcaaggcgaggctcatgtctccaaccatttctattttttgtcgtttcttttcctactcttctcctgtttttctcatcttcttctcatcttctttcgaccttgactactacatttcttctttctgggtcatcccttccttcaacatttccctctgcaacagcatattctgcccaactgaaaatttcgaagcattagaactagataacgaaaaagggttatggaacaagagaaagaagaatggtctctgccgtgtatattccctgtccacttccaaacggcttgctagagtggccaccgatgaccgagtacgactgcatgtcaagaaccgcgttcatcgtctgctacatcttgactatttgtacgcttctgcctcttgtcgttttctttaagctcgcacgggttaaacgctctcaagtgatcctcaacattcgttttccttctcaatctacctttaatgacgctttcggtcaccgaaccaggagatctaacgagacctcgtattgtgcttcctatcgttcattcacctacaccaacactgtccggtcggactgtcctcatctatgggaacagctttttctagcgctatgcttcaacgcgtcaacggccctcttactgtgcgtcttccggtgcggcttccaatcttgagcgctaaagtcgaaagctgacaacctgcctaaatttgtgttccattcggtttctctactcgtcagaatatctgctcccaaacatccaaataaagcactgtgtctgctttcttcagctggaacgatgtccggcacagcttttgtggcagttgccgccatggacactgtgctcatggtctggggaatgcttcgtagagcaagtggaaagaagatttggctaaatgaatactttgagaacatcgtcagttgattgatttctcgtccgtatctcatttatttggttcatcattctgttttgatccctaagatttactatcgaataatgtagttgctctggctaccatgggccatctatgtgatcttcttaccattgaatcttgtggtgagttaagtctggtttcgtttactggtcggcgttctgctcctaggtactgacatccggtccattttccacataacaaatgaataatcttgattgtaccggaatttatcgctttcgcctatctaatactaaccctgtatatcttctctacgccatctagtatacggccttgaattcagagacactctacgtgagcacaatgacatgctacgctgacaatgtcatgtaagaccttacttttttgttttgtttttatattaaataacaataacaatataacctaattgtatctacttgagttcattgtgatccgcaagctcattttcgttctgtttggactagttagttagtacgacgttaactcatgtcgtcgttggaatatccttagtcgctgctctcatctttgacagtaagttctacactttccgctgttgttccgaagacgaaacacaccaaccaatatttgcttctttcccgatcataagtctggagtgtgatcatgctgcttcttcaccggcacagagtgggaaagacaacggcggcggagcgagatatggagtggtctcgtcgatcatacgaatcgaccatgactgtcaatctgcccatcatcagtcgcgtgctcttatacagtctcagtacccttggtggactgttgtaagcttttcttctgatgttaactcttatttctcgtcttttcatcgttcgttgcgaccgagatcaacctaattccccctggagtttcttatcttctccccttctttctcttcaattgaaatcagagcggccatcatattgtatgtcaagccagagtcacacgctccagcggtctatcaatcgacttgtggcgtgtcatgtttctctatttttggtttccaaccggacatatggaaaaaaacctaccagtccctccgtttcctatcaacatctgtactcaagtcacagacatcgacgtcaagtccgacaccaacaagaaaccagaaagagaacgcacaagcggatattgaatcaggacaggattcgtcttacggtccgaatatcgatgatctttcagacctgagtatacaatctcggacatgttttagatcgatacctctacaaacgatgccatctggatcaagacggagatcagaatcaggttcgagcttcaatcaccacatcagcgctagcgacgacgatgaatacgagaagatggaagcccatataacactggaagagtcttttcgatctggcaagacgatgaatcgatcggccgaccaagttgaggagggtgttgttacgtgtctggcgtataatagatctactcaagaaccagttgaagtagaagcaaaagtaggttcatctggtcccatggaatcagtgggtaggtcggtcgagtcggaagcagaggtaaagctttcggcgaggaagtagatgccactgggcggatgtagtaattgtttctttcgctttattgtcttgtctggttctgcactgtccgttggtttgtatctttcttttgtgtgaatatcatcaaatcgctcttcgtcggtagtcagtatcatcgtcttctcctctcgtcatatcctatctgattttattatgttattttctgcttttacacgttcccacattctatgacacatgacgcttttctcatccttctgcctgcccgtcaaattatacctctgtctatctgtttaaatatatatacgcatcatatttcaatctcttttgcacctaatcatttgctcgtatcgtatcaagtcatcatcgaccggcacgtgatctatgtatcactattaattctcacttcctgcactccgctctggtttcccagaaagaagaaaatctcgccaggagatgactagtacgtccgttcgtctattcaagacctactttcttcatctggctggctgagcgacgaggaacatggttgctgatcgacacacacacgaacgcacgaagaggttggttagcaatgtgattcacatcatatcaagggagagatgaagactgccagaagcaagaaagaaaaagaccaaaatgaaaagtgcaaaagcaagtaaatacgttatagatttaaatagagaaaaaaaagaccatgggttcatgaaaactttataaatttaatgaggggagagatgaatctccgggtgtacattcgaagtacaattgagtgtataaagacaggatacgatgtgttcgtttgaaaaagattgaaggaaggtattttgagagaaaaagacgttgaagtgtgtaatctatgaacccaagaaaagaagaatacatcttctgttttgatcgatgaagacctggttaaaatgaggaaaacgtagaaactataggaagcgtacgagcgggaacatgaatgacaacgaaataataaaagctaaaaagagagtgtaacgaaggagttaaagaaagaagaagacaatggggcaaacccataagtaggccaacaaagccttgtctacattaaagcttcttcatatccggctcctgggcatcaccgtaggctggtggggcaaaaggcgcttttccagcgtcttggacaacgggcacctgtccgtctaccgggtcgtctgaccttggtccagctttgtttcaagaacgcagataacccaatcattagcagtcggctagaaaatgattgtaaacaaagaatcgaaaaaaaaaacatttgaaagggcgtactgtatcgtttgtgagcgctgacagcgtaccaaataaaagaaagcaacatgacacccaatgtgataacccaagagctgtcgtagaggggtaaggagaagaggaaaaggcaaaggcgaaagatcagatcggcagtttagttttctgtgaggaaacaaaagacgaagaagaaaagacgtactagttgaagttctgggcggtgatgggttggaaagtaggctacattcgttaccccaacgagaaatatcagcgccagtccggagaaccctacacaaaaagataggaccgttgtatccaaaagggtatatagaaaacgtacgaaagacaggatgatacactcgaagaatgtccagccgaccatgagtagattgatgatcaaaccaagggtctcacccatctgttttcgaccatcagcatcacaaagttatatgtcagactcagcgatcggtaccctgattgaaggaaacaaaaatagatgggaagcagaaacacttagacttacgtagaaaggacctggcacaaattgaacctcgggatggtttttgtagattcttcgggcaatgaccgggataacatatgagatgtccaacgcaactgcgcacctgtttgtattcaaggaatccatataacgagataatcacagcaatgtcagggtttggttttctattttctacatgcaaaagggcatttgaaaatcgacgatgaaaaggggcagccaagtattgtgacaaggacgaacatggaaaagatagcattaacctagagcataagtttgaccattaattttttttaaaaaagtgtcaaacaacgatccgcctataagtagaatcaatcttctagaaaactcacggcaataccactagcgaagttcaaagctcccagtgccatactgaaaagaacgacggcccagacggcaaacaatggggtttgagtggtcttgttcaaccttccaaagaatccccaatcaggaagtgcgtgatcacgactatcaaatccaggcgtcgaaccagtcgaacacgtgttagtttatatatatcgacaaagaggaggaatagatgtagattagacttacgagaaagcgtatagagttcgggagtttgcctgtaaagcagtctgaacagtaaagaatgctaccaaacagatgaatgaccagaggacgagtgttcctgattttccaatccgaacccgcatgatctagaagcatatatcccattttttttcttctgttagctccatatcctcagaacagtaaaatgattgataaagaaatataaatacctcaatgaaagcttggccagagaacccaggaagatcgcgtatgtcaggactgcaaaggatgagaacaatctgtgcgctcagaaacagataaatcaatctcagtacaattttgtataacacaaagccacaggtacagtaggcactatgatgaacacgcacgtttagcaaccatccgatgactccagtcccggcaacagcaacgaagatggcaacaggggccgcgatcgccgctctcttgacctcaaaagagatatgagcgaccgcgtcgtaatccgtcatcgtccactggacactgagtaagccaaagaggaaggcgattccatcggatttgtagccggtgactgatgacgagaatatcaagatgactctaagagtgggacgcgaggaaactctacactgagtgggctgtaaaaatagaaaactggactagatcgtaccattgttgatgtctccaaagacataagacgcggcttgcatttcgctcctgggagtcgtagccaagaggcagatgatgaccaagaaggcaatccctgtttttgaagcattaatttggatacttcagtctgcaatctttgaagcatgcatgaaaacatgatagttgcaaccaaggaacaaatggaaaagaacaacataccaatgttgatgaaaacaaaacctttggtaaagatagcgagctctctagtcctcaaagagttgagcagtccgtgaaggacgagtaacccggcgaacaaaccccactgcatgatcgctgtaacgacgagatctccgtctttgccaacagagacagcagcccagatcatagtagccagaccgaactcggtcgacgcaactccagcaacttggccgagaaggttgagcctagaggacaagaaagtagccatccacgtgcagatacagtcagtaatggacgcatacttgtagagagttgcgcgtgaaaagaacgtaccatctttaaagacgattaagaaaagaagtgcgatcaagagttagattgggcgatgtatgtgcacatgcatcttgtaatcacgaaatagaacgagaacatacccaacgacccatccggtgatagctcggtatttctaaataagcaaggaaagaaggccagaaggaaaagacacgatcagctaatggctttggataaagggtatatttacatatgaacttacctgaggaacaagccacgcgctggctgagtatacacctccacaggtctagttgaaacaaaagaacggcgaatatgccggcaagcatcaaatcaatataccgttcaattcgatttatatgacgaacgagaaactcgacgaccaatcgatgatcccagatagtgtacgcacaggataagcggaaacaatctcagcaatggaagctccctgattttgtaccaatgacagaatgatgacaatgaggttaactacgaattctaatatttgaagagagaagagtgaaacacgtaccaacgtcatgttcataacggaacccattgcccaacaccaaaccacacttgctggtccaccagattgctattgatgccgagaaagagagatagacatctcaaacggttcttagccagaagttcccgttccgtttcgaacatagcgtaggtgtggatgtgataacagttttgctagaaaacacaaaagattgcacataccaacggaatgttgaaagtggtcgcgattgacgaagacattccctgcgaagcgtcgaatatagaaataggaggggtattgaggtgtgatcggagatacgcgctgtaatgattagtatatgcgatgagaacgaagcaagtcaatgggtcgtaagagaggacaaaccatgatggaaaaggcaaaagagaaggttgacaagctagaaaacgattgttgaactcgaaaattagtatttgacacacaagacagaagtgaggaagagcagacgggcactcaccttccgaactccctgtggaaaaaggatcggacatgataagagaacgagatggctagtcagcacgagtgtacggccaagaggacttgtcgtcgctatttttcctcaagtgtcctcaaagaaagaggatttcttcgtcggacagcccaaaagaagggtgggctgtcttttctcgttacgtatccgaagataagtggtcccgcgctggggtgaatacaattgtatgaacgcaaatcgcgcacgaatccagcgcctcatgcagttgtcaaattattcgattgtgaaaaacgaacaggagaaacaacatgcctgaagaaagagaggagagaacgtatccgaaaagaaagagaagaacaaaagaaaaaaaaagacaacacaactgtctgccaagaacgaacctaacaaactcattcttcagtccgaaccgtttctctaccaacgcatcatccgtatctgtgcttccgacagattgaaggtgagcctctggatcagcagcgtccatcatcccgagggacacctgaaaggatgattcggacatcttggaaggtttacttgagaaggcgaaagggagagggagataggataggaggtagaaacagaaagagaagggtgcggagcgaggggaaaaagtttcctcatctgttaagatagcttgatcggcgctcatcggagggacggtggtcagtaacattttggatcagcgtaaccaggttacacgcccaaaatgttacttataaggaaagcattctccttagttgcagcagaattcctattcagaaatcctatcatcacggaaaactgaaacatcatcccatgggtatctagcagatgaatcgataagacacacataatgacagatataggggtagtgatggatgctatagggaaaacatttgacacgaaagttgacactcgattgagcgggagtacgcgagagaaccttaggggcattacgaaagccagacgaagatgtgcgccccggtgttatctggaccatctcttttccttcgcataccacctactctctttcgcccttgtccttctttcatcacctcccgaacgttgtgccctctcaaccatcaaacccacatctatcttttgtgatactaaatagggattacgactctgttcacgactgtaccttaaaacacacatatctcttcggatgacggtctctcaatcatacggagatccggatctcgaggacgatgaggaaaactcgctcgacgaaggtcttgcgatgatggttcttcctcactttactgccaagaggcatcttacaggtggcaatcctagagcttgctccgagagtgtgtatcccataagattcctttctcgccgatctcctttgtacataaacacacattttctcgtagttgaccgatttttcccattcccttccatctcgaatttgtttgattcgctctcattcagccgatcagcctctagactggcgtcttcggtcaagattacgaacgagtcaagcagcattactcatctgtctcaatatcggcactcctccgcctgacttcctcaagattgcggattgcgcaaagctagaatgttgggtagatccctctggtatgaggccagagaaagctcgtcagtcttctccttccgtcttctaccttgtccttacggttataatcagtatagcttatagttaagcatttacattcacgtaatgacctcatctctatattactgctggtcttagtcgaggaaattggaaagaacttgcagcgacaatttgaaactcttgctcagaaagttcggttcaaactggtgagagcctcatctcctttgtccatccatcgacttcaattgcacatagaattcacatcacagctgtcttccagtttctggatccagctttcgaagacaccaagaagctctgtcacagtcttcgtaagtctgccaaggatgaacgtctgttgttctactacaacggacacggtgttcctgcaccaacggctagcggtgaaatctgggtgttcaatcggacgtacacacagtacatacccgtcagtctattcgaccttcacgagtggttaggaaggtttgtcttgtacttcatcgtctcctaccatcttttcttattgttctcccgattactaatagtctgcccggtctcctgcttcagtccttgtatctttgtatgggactgctctcgtgcaggtaatattctcgacaacgtcagtcgactggccgagagacgcaatgccgagaatagaaaacgagcttcttcagataagccctcgtcatcatcaggagagcaaccaggctcgtcatcatcctccttccgaaaggacgaagatacaaatcccgtcgatggtggagcgacctcttctccttctctccgagattgtatccagctagccgcttgcggcgcgaacgagactcttcccatggaccctcagcttcctgctgatcttttcacgtcctgtctgacctccccgattgagatcgctctaagatactttgcacttcaagatccactaaagcctcaaactccaacggatgcgccaagagcgcgagtgacgcttgagcagattgggcaaatccctggagatcttaaagacagacgaacaccattgggtgagttgaattggatattcacctcaatcaccgatactatcgcttggttggtcttgcccaaggatctgttcagaaaacttttcaggcaggacctcttagttgccgcgctctttagaaacttcttgcttgccacgcgaatcatgagaacatacaattgtactccacgatcggaaccagaattaccgccgacgcaacaccacccgttgtgggactcgtgggatcgaacgattgatgcttgtcttgcccagctaccgaatctattgaaggcggaagcttctgcccgagatccgacgctgcctcctttccagtacaaataccaaccttcgaacttttatgttgaacatcttactgctctcaatgtttggctattcaacgcgggtgtcgttccgagaccgctctcgtttggtgattctaatacaccggcagtatcactcgttcatcaggaaagacggccaccggagcaactccctatcgtcctacaggtccttctctcacagactcacagactgagagctctcatcctactttctaagtttgtcgacttgggcccctgggcagtccgtcaggctcttgatatcgggatttttccatacgtacaacgacttttactgtctcccgcaattgaacttcggccagtgttgattttcatctggtctagaatcatggcggtcgacaagtcttgccaggctgatctcttgaaggacaatggatttgcttacttctcgagcatcttatccccctatcagaacacaaacactcccttgttgatgtcgattccaaactcttccgaacatcgagctatgtgtgcgttcgtgctctccatattctgcagggactttcgacctggtcaacaagcctgtttggcctcggacgtttttgcctcgtgtttgtaccgaatgaaagatgatgactatctgctgcgtcagtggggacctctgtgtatcgcccatctgtgggccaataacgatgaggccaaagcgcttggacttcagctcggtgcaccaaacttgttgtgcgagatgctgagagacaactcggttgaggtccgagcggcggttctgtacgcactcggtactttctttggagcttcaagttcgagcgatccaaacgttcgtggaggtggtggatccggtgttcagcttgatcgatcagaaagggatcaactacggacagagattggaatggccacatccgcagtattggctctcgatggagatgccagcccgttggtaagaaaagaactcgtcgttatgctttcagctatcgttagggagtggagaggctggttcgtcatctccgcatgggcgtatgcagaggacgagaagattcggctaaaaggcaaaacgagaagcgcacaagatccgcttgctagagttctcagggaatgggcagggatgccaaggtcggagggaagtagccgagcggaaattcaagaggatcagatgattctctcgagctgcagcaccgtctacactgctcttctggagatgtcggtagatccttacacagaggtcgcgtctttggcatgtacagtcgtggattacttgaccgcgcttcttcttgactctgctttcatggttgccgatggatcgtccatcgagccgtcgtattttgagaagaccccacctcttcgaccagactatgttcatacctcaggcccggctacatcaacaactggctcttctttccttttcaatccgaccactccgacggcgatcccaaactttgtgaatcagacggtgtaccctttcccttcgaccgaccttccggttgaacttcagccggctccgacacctgaacatcatggtcatcatccgtcgaggaaccaaagatcattacttcgaaaaaacgcgtcgttcgcttctaggctaatcggtcttgccggtctaacccacccatccacgcccgaagaagaagaagatgaggtcccaacaacgatggcagagatacatccacctgcagctggattggataccgctcattataaatcaccctaccttactgcttcgacttcttcatcgtccccttcaagctcccgacctaaaacagatcaatcttatgtgaatgcatcatcagcttcgatgacatcccctgcatcctcgactacgctgaatgcccatagaccaacgacgccatctacattgtcagcttcaatgcattcatcgattggaaacttgcaattttcaactcttaataacaatactggaaacaactcgaccacagcagctagtgacagattgtctgaaagtccagccacggtctatccaccttgcacggcggctcaagtgatctttgcacttgtcgaagaggatatggaacggttaatcatcagaagacagcttagatcggaagcaggcttgagagctcaacaagctcagcaagctggagggccagagtttgatccgtacaagttggctggaaaagtaagcgatttgggattggggctggtagctaaagaagtgaaggatgacatattgccgttgaagagtggcttcttcgattggagttgtgagttcttttgctctttctcttccgtttgcctggatgtatgatagaagttgacaatgactaaaactttgttgttgctaaatgtcttgatcttcacaggcgagtactacaccgagcctcagatgagggtatgccgtttctctcctcttttctgttcctagagagataagtaacgcacactaagcctaacctctttatgttcaaatttgatcttcctaagccatccgaaagcgaggaaccaggaagcgtccagtacaatcaacaactatggagacgggaacgacacgagcggatcgatgcagatgccaggacaacagccgaaaagatctcacaaagcgtacggatggatctggagaagaatcagagacccagtatgttttgatgtctgaacattcctccaaagcatttgtgaggtaatcagactcattcttgtgtcgttttcgtgggccggatgaacttttaggtaaacacccatggaaacagattgccaagattcagaatgatcattgggcgatgaaactctctttcaatccgtacgaggagcatctcgccgtttcagatgagaatcatgtcatatcgttagtactcttcagaaccccttcacttcttgctctgtagctcgatccggaagcttatgatttttcgtgtatgctctgattttgcattacgtagtgtatgggactacaagcaacagattgtattgaacaagttttcgaacggaaccacctcgagccctatcacaagtctacgattcatcaatgaggtttctgctgctctatgtttgactgccacaggtatgtagtcttgttgtgacatgtataaacgattgtctttacactattgatgtcatatgcgttcataaatctgttcatttctgcacgggcatagccaccggttcgatccgacttttcagaaactatgaccgacctggagaagttgagttggcaactgcattccgagcggtcaccgtgacgagacctagcgagaatccaactggtacggtcaccgcttgggaccagctcactgggcagctatatgttgggggagatacgaacactgtcaagatctgggacgcacatcgagaacttgccgctgctgtatgtagtcttctctctatatagacaacacttggctctcatttaacgctaatgcgtttccctctcgcgttctttggaaacaggaaatcctcacgggagttaatagtcccttgacgtctctttcaactgagactgatcccgggttgatttttgtagctgggttcggagatggtcaagtcagattgtacgatcctaggtgcaactcagaagattgtgttgtccgatcgttcaataatctgactagtcgaatccgagaggtcaagcttcagcaaggcggtcaatatatggttgctggaaggtttgcctacctctttctttctaagagctgcatcccaagtatttaaccttagattttgtctatcaatcatggtatccagttcggacgggcaagcagctatatgggatttcagaaatgctggactaccagtccaccagttacacgttcagccgcaaggactgtcaaacatatcgacccattcgagcgctcctttctctgcttcgtgagttcattcttttatgtctcagatatcttctgttcctgatgtaaatactcattctcttcttactatacatgtggatacaaaaagcctttcggttcccttgtacgatgctgccacgcaccgaaaaacgcaacatctcgacattcactatttgaacccctctacgacccagggcttgacacctatcgttcaaacgttcttacctgcttcatatctctccccgacttacgaaagacgtcggtatgcctcttgggataacgccatggtattccaccccaaagaattacttttagctgttggaggagtggattcttcaatcaggatcctggctccagagtttgataaatgggcggctcattaaatagtgatcaagaaatcagtggtttttcgcctttttgtaccctgtctatggaggtctatgctccttttctttggtagttttaatcaagatgtacatgtaatggaactctttgtatcacgtgtagccattgtctttcttctcagtctcgtgcccaacaaactattctcaaagaaggatcaatccgtaaagtacattctcgactcctcggtctaggttcgactattttgcatcctccaagatcatcgtctctaaatgtcagctgaacattaatggtttgacaatctaaatagaacttgagtggctgtacaaaatggtggatgtcagcgcgtatcaatgtgaaaattattcaaccaacgagacaaaaggcgcaagaggacagccacttcatctgaaaggagtagaagagataatgtagaggcagagttcgatatgagagaggacaggtcatgcgaggagataatgttcgatcggagcaagagatggatacaagagggtgtattgatcaatcggggacatctcagtatttataatcagtccattgtagattgatgagaaaaggatggtatgtttcatagaacgaagcctctaaagattatgaggtctagatggtgatttgtaggagtcactatattcaacaagagaagatggggttgattgatagtaatatatcaaaagggaacaacaaagataaaacccaggaaagaagatacaaaagattgcgggaagagagggtagatgtgaggaagaacttctaagtttgagtaaagatggagaaatgtgtagaaagaaacgattctctttctgttctaagtattttattaagtctggaatatgtaaaggaatctgagatttagaaggagaacatcatcaaccaggggttgaggacgatagggtagaggatatggcaagcggcctgaacagcaagaggaatgatggccgtcatagaggtgaccctataagcttcagggagcagtgaagtcgagaagatgatcatgatgacgatctgaccaccagcaaagaggtaggccggccagaaacgcttcaagatggctgggacctccttgaagaagttggaaatctcaacctccttaatggtggatccccagagcactatcgagcaagcgagatggccgaggagtcagctctactgttcaagcgacatcaaatcagtagatagaagaaggtagactcactgttgtaagagaccaagtgagcgaccaaggctgcctggacgtgccaactcattccagagaagaagaaaaagaagaagaagatccatttgaactgttaatcggaaaggtgtgttcgaggtcagtcgatgcatcagcagcagaacgaaaagaagagggttcggtcgataacatacgtttgaaacgagcgagcttcccagggattcgactttgagtcgatacaaaaagattgaactacaaatgttacccgcgcctgagaaaatgacgatacaagctatgaagagaaacggaggtaggttagagagtttccgggaaattcttagaaagatgggtagtataagatacatacttaagaagaccttccaactttccaaatagaaggaggacagaacgtcctcgagaattccgatcaagaagaagttgagcaagcaaaggactgcagcgatggagatggctaaagagaaaaacaatcgattggaatcatcaacactgatcgcttttcgaatagtgaggagcaaatatagagacgaacaatagtaagacgagatataagcggcgacagagatcttggagtgaagagggatgttcgagaaaaggaacgtcttgaacagaaccgtcacgggacctttggtaaaccaactgtagcatacgcagagacgtgtcgatcatattaacgagggatgaacgagcaacatgaaacaaccatcgaagaacgaaagacgtacgacttgagaggatagaacaacaattcactgtcaagattccaaaacgtcagctttatttcttcatcaaggtgaaggtcaacaagatacgaagaaagaaaagaccgacctgcatccataaccgtacttctgccatcgattaagctcgtcatcacacgtcaacgagacaccctctttgaatcctccgttagagtaggtcgcccatcggacagtgtatcccttcatctgtaaccggagagccactgtaaggcatccagaagagagaaatggtcagcgcacggctctcttcagaattgtgtttcaaaggaatttgacatactatcgaagtcctcagaaacgtgggattctgatgcagagcaggaaaggcgaatagaaatcaatcatcatgatactgtcagaaaaattgcaagaagcacacgggggaacataccggaccaaattttggtgcagccgtcttccgtatcgacgaaacaagcctcctggacagcagaccacctcatgaaagcgttgtgaccgacgaacggggcgactgaagatcggataccatgattgatttcgtcaataaaaggaatcaaatggattgatagtgaatgacaatctacgacgaaccttctccattggcacaacagaaggaaatagctttgttgattcgcctagtgaagtttgctattggatgaagatggcagaaaactctgattaaaaaaatctcgataaattttgacaagaaacgagaatgggacgaaccaattccaagctcgaagtaatgtccaatgaccaacatgacgtcggctgaatgaatcccatggaagaaggactggtttagcaagcgaatctccttcggggctaaagaagagaaatgcacagagaacgtacattcatgttggataatggcgcactcaggggaagcgtctaactcggcggcagcatctaaaaagcaatcctcaggtactcgagtatcagaatcaatgatcaaaatgtattctccactatatcaaagtaaaagaaagaagaggacaggtcaacatttttatcacacttcgagagaccggatgaggaagaaaactcacattcgaacgtttccagcggcccaagcgactccattcgattcctcgactgcagcggccagcgattcctgatagagagcgtcctcgtcctcgtctgtccagacccaagtctgttcattctcatctggaaccggtcggagttcatccatcaattcttcaattctcaacgagacagccaaagcaaagttcatgttcgaagctttcttaaatcgaccctttcggaggaatcctcgatgtccgtgcttgggtcgggcgacccaaccgatagcgtttcgatcatagtaggctttccgagtctcaacttcttcctcgtgccagagttgcataccgtcctcacaaatcatgatggaggcagttcctccctgtcgttcataagtggtaatggcaactttgagggattcgatggtgggaacaatgactccctcgagtccttccttgtagacgggcatgatgatggtaaagtgaggcaatcgatttcggatgactcgctccggagcctttccagagtagaatctgagaatgacagaaggttcagtattgggtcaaggataaggaaactaaacgaggctggattgaacaacatatgactcacgcagagttttggtagaattgagcaacaggaccgaacaactgccaaatgtttccgacgatcgaaatacagaagaactgtcctcgacacacacacatacacacaccatgtaaatgagttggttcttagtagagaagacaaaggaaaggacataagagatggctcacgaaccatggcaataacgaaggtgaatggagaggtgagcaggagaaggaatcggagggttttcccatcaagaaggaactccttgatcaacgcccgcgctccgagaccgacgaacatcaggttgaaactgacggccagaccagtaatgatcggggcatacagcctataatttagacaagaaaaatgctgagcttagttgagatttcgacgatggaaactagaaagacaggaaatacagaaggaaaagggaacaggaaaacaaagcaagacgaacatcataggtcgggttttcctggactctgcagaccattcatctggtccgacaccagcctctgcatcatgccaaagttgctcttcggtctcttccggcacggccttttctcccagttcaggaagatatcccaattcacttgagttactagcaccttcgaattcttcgaccttctcactgatcacgacggccttcttagtcatcagactttcttcttggtgagcagcagaggcccagacataggaaaccatctttgcttcaagcgtctcggcgttgacgattacactatcgacctcatcagaccagacgatcaaacatttctcggctcgggcgaacgcagcgtattgatgtttcctcgatcgaccgagatgagacaccttctcgatcacttgaattcgagtgttagcgtcgatggcaatatccatcgcgtggcgggacctgtgtgaggtgaaacagtacactgtaaacaaacatgatcgttcgaaaaataaccaggaaagcgatgaaagcttaacgtacaatcgggccatgatggcctgaacgactttactagtgatcttaatggcaacctcggtgttaagcgcggcaacggcattgtcccaggtctgaagagtatcaaagatctcttcagagtcgaatgaatttggatccgctcgaggaaatgtcctgagtgatagaagagcaaggaaagagtaatcagatgaaggtaggtagagcgataagaggattagacaagaatccaataaaaaagaaggtgatttacttgtagattccttttttcattcgaatactaacgacacccattcccgagatgttctcgctcttgaaccaaccttgagcgacacacctcgagtaaagataaccgaccataacggcgaatctatcggcattgtctctcgaatcatccccatcgtcctctctgaaaccagccggaaggtcactgtgtctgctgtgcctacttccgaatgagttcatacttctggcgatcgaatgatttctcctgatctggtaatgtgggtagggatcttcctcctctggctccgtatcggatgctctgtaagtagatgatttggattctctccgaactctgcccccagagggcgggggcctggagccgtagctggaggaattcgaggctcgacgagacattggtcctcggtaagaatcgatcgactgtcggtggttcaattccggataaaatgcctggggtgcaacggacgttcgtcggtttccactagaaatggcctggccgatgattggctcctcgtgcgcagggacctcatcccaaaaggatgatgtcggaggatccatatcaaggtcggtgagcggcccagcggtttcatcggcggccgcggattgttgcgggattgatggatttgacataactgcctaaaaagagcccaccacataatgttgagcgctcaatcgtgcagggatccattcaggaatattgaagaggacatgacttaccgagttaaagtccgagtttcaagtaaagattgcgtctttgttcaatggttctatagagcgcaagtgtgtgtgtgtgagagagagtgtgtgcgtgtgtgtatgcgtatgtgttaactgaagagtcaaaagggtcggaattcaaggcggtagtggtagttagacgaaaggtataaacgaatgtgtaatgtccttccttgcaaaaagaggaggcgagaagaacgggtcagcgaggaaaaccggagaggacgaaagaacaagaaggaaatgaacctgtcgagtcagcagagtcaaaggcagaatatacaaataagatgaaacaaagcttttgactaagaactcacaaggttcaaaccgatggcagtgtaaccggtagcgtgaaggtgaaggggaaggggaagaaatgtggaaggacctgcttccaaaaagaggaattgttcaaggtggttttaagagaacgagggccaggaggtgaagaaaagggcgcgcggagaggaggaaggaagagtcaagctttgtacgttgagaaaaagcgactgaattgtatgggattaagatgagagacagtggggatcgaacgagagggaagtcggaggaaagagaagggaacgaaaagaaagacaagagtgataagaaacaaagtgtcagacattgtggagagaccgaactagagtcgttaactaaacttacccggagcagcgtaggagagagagggcgaagaaggaagatgaggaagaggagaagggattgatcaggaagaagaacgcagacgacagatgagctaaacattcttgtactcatctttggcatgagaacctgttgaaaaaagtgagtccgttggcgttgaggttttccccgttgagttgagtgttgagacactcaggccttcgtagcaatagtcctgtcgatcacttcccacgaggcagccacaagcaggtcttcgtagaattagatgaggctctggcactgtttagttccattaggcgtgaaacggcagtcagatgggcgactcaaacgttgtggtgttgggattaagtcaagcacatgctaaactatcaatgaagatcaagtatcagtgtattatgaaggatgccatcataggcatcagatgagagaggatcgtcgaagggagaaacaagaagaatataaggaaaggagtggaatcttcagccaaccccacacgctgacggagaacaagaagacccggtcaccggttaatgcctcggcctgaactgcgcttgatttttactgttagctattcattccaccgagagtagacgtagatttaaaaccctaagaaacaagaagaaagaacaaaaggacatcacgtcgatcagacagacgattcagtacattgattcaagacaaacagattagactcatccaatgtacaaagaggtttacacagccttacttggatttacgacgcttcttccacttctgtatctgtcatccaaccaagaatcaatcagctcccaaccggatccggcaaacagcccggtctgatgaggagagcagaatttgaattgaacttgaaaccatgagaagaagaagagtgagatcaaaaacacgtgggaatcaagagtattcgtgtgtgagaatacaatataatggagtaatgtttatcaacacatgggacagaacatggagcattgagtcttgaaaactttaacatatgttgtactttccgcccttcagtactcatccttcctcggtcttctatcacattttctctccgtgaatcggccttcctcttctttctatgctcaagttttcccaccgttcatcgatcaatcagttcgttccactgctgatcgcacacacctcagcttaattctaatcggcagcccacgttatgctgtctttgacccttattaatcccgatcttcgactcttcgcccaatcgctatccacgttctctaacgactgcttctatattcgtgtctctagattctttttcaacgtttttgtctcggagacccacagtcagctagggccgaaactgatcaagggtcaatcttcgtgtttgtctagaaccgttttaaataaaaggattgggtcccaacaaaaactacagaaaacaaaaagggtaacagaaaagcaagacgaagtggaccatcagaaaattaaaaccgctctggaggtattcatttacttgaactgtggaaaggcagaggcaggaagaaccagtcagattccaaaatgattattacagaacgaaaggatacaaaacacccagtacgtacgttctttccatcaacccattccttgtctccgatcttgaggtcccaggcaagagctccctcgaagaaggtcttgtcggcctcgttctccaaatccaatcgagtgaactcgtaagactcccaatcaggggcaacagaaacaacggggacaacatcctgtcctcggaggatcaaagtaccggtgatgatggaatcgttggccttgccgagaactccaacagatccgaaaaggtactttcgggatccctcgaatcgagcaaagagacctccgatttggttgctgtttggacaatgaacgcaacggtaagtatgtataccaagcgtgttatactgcagaaaaaaaaggacgaacgaggacatgaaggtctgagtgagctcagtgttgtacttgaagtcgatcttccagacagagaatccctccttgtcgacgttgttgtagaaccaaggaatggcaccagttcgggtgtcctcgttcgagtacactcgcttccactcctccaagttgaaggtggacttggggagagcgtccaaggggttctttccggcgggcttgtcggcgaaagactcctcctcctcctcgtcaacctccttagccttaggggccttgggggcggcctcagccttgggggccttgggagccttaggagcggcctccttcttgggggcaacgtaggtagcggcctcagtagcgagggagacgtccgagaagatggaggcaatcttggggtggttgatcacactggttgtgataaagtttttaatcatgatcagtcaacctgcatgtaagacataacaaatcatcgagcaaacaaggcccagaacgtacgtctgctcgaatcggacggcgttggagaacttcttctggtcctcagctccgtagtgccgggagaaggcatcggcaaggacggaggcgacggtgatgtcagccaaggtgattcgctctccgacgaggaaagttcgggtggaaaggtagttatcgaggaaagtgagagcggcggtgaccttctcaattcggctctggaagacaggctgtttcagaagataagaggcaatggtcaaccgaagatccttttttatctatatatgtatatgcaagcttaccttgttgtagggaatgaagttgttgatcataccggtagcaacagagattcgctcgttgatctcagtctcggcaaaagagacccactggtcgatcagggcagcctccttgggatcagaaggaataagaccagagttgggggcagatcgggcgactatgattcatttttcgtttatcaaattgaaccgaacagtaagacaaatacaaaagaaaataaggataagttctcaatcaatctgatatgcaggtgccgattcgggaggacaagtaacaaggagtatggtttggaaaggacacatcaaccatgctccagaagatgataggtacaattgacgagtgatgacctaaacagacatggtcgaggtctgatttgaagagagaaagaaacatacggtagtaggcaatggcggttccctcagtgagcttgaagtcaccctgctcgagggccgggatctttccgaaggggaactgtagatccaagagggaaaaacgattgatgtgatcagcctacaatttctcctcggaagatgactagagtgattgggcaatctaagcttagagcattgcccttctggtcgcattgactatcataattaggtcactcgacgcccaacaataggcgttgctcgggctaagacgataggaagcgatgggacaggagggggaacgcaaagagagaagaaaaaaaaagaatgtctagaaaaacgaaccttctggaggtaggcctcagccttctgctctccgctctcgagagtggttcggttgaggtcaaggccagcgaaagcggcagtggccaagattcgtcgaaccttgaaggaagggttgactaagggatgaaatataagagtaacccagacagattttgtcgaccgagatgagacgaattcgtagaaaaattgagagaaagcaaatcagtgcctgtttcctttccctttttcacttctttaatacttgcagtccacatcgtgttgactaacaatgacaaaaaaaaatcggacaaaggacgcaccaaaggagaaaagagttccgtcagacattttaagatgggatgaggaaagaagaaaagtgaggatgggctgggtggcaaggcaaagaaggggaaagagaaacgaaaagaaaaaaatctggcagaaaagaaaaaatgagggagcggttcgcgcagtcaatcagcttatgtaagccatctcccttgggagtgcctgagtgtctccgaccatctctctcaattgagcccaactggtccttacactcaccacgctgttagaggagagtgatccgaaggaaattgatctagagggaatttatttagatgggtcatagcacagaggcctttacagactcatcagagtaaatgtggaagcaggatatagaacgaacgagatagatcaagagaaggatatatgatcttctgcgtataattcatacggtggtcctcaatcttgccagaccagattggagaggctggttccattttgagagcactcatacatacaccctctcgtgtgcgcagaaaaaggataaggaatttactcatggaaaggaaggtaggcatagattgatggaagtagcgcatataccgatgagaatcacttgacgagattgacacacaagaaagaagacatagtggaaattggctgccctgcttttcttgttcagatttattagcttttcaagaaatttttaatagacttgtctcgatacactcctattactttttctctccagattctcttttttttcgctttgtctcttcctcctttcttttctcctcgataaaaaccccatccatcaaagagaaacagtgaataggactctcctcatcttccttcctctcatttttccctcaacaataccagtagaattcgggcttgtagttagagcaggaagagaacagagccttgccatgtccacgacagaaaccccttcgtcaccaccaccagcaaacagctcatccaacgagcactccgctgccaccatcacctccaccaccattaatattaccgataccgttgacactaacacccctgcatcctctcccctcaagaactccaaggacagtcctgctaaaccatcaatccctcctcagacatcttccgaaccaaccagtccggtcaagccatctctggatgttccttctgccccgtcggagggtggtaaatcagctccgccgaggataacgaacggagatcaggtcgagaagactctgaagcggaagttggtccttggggcagagacatcggtacctgaacaggaatctgaaggcattaacctcaagaaagtcaaagaggatggcgtgagtgtttgtttgatgccttgtttctcaacccatctttctttctctcctattctctttcctccgtctcgcttctttttttttccttcgggatgagatcaagaagcagggggagatcggagcgatcaagacgcttcaactattacagaacatattctccattttcaagagaaggcaaagaatgacatttttatcgtgtagctctcatctcggcatctctccttgagccatgttctttttggttatgccgtgtcttcatctcagcatgttttgacgtttgaacacaatctttgtgaatcattaatccttattataactcattttctgccttcatgaaacagatctccgtcacatcgtcctccgaatcgcccgtcataaagcccggaattgttcccggaggtggtttttcttctttcgcttcttccccgtcacccttcgttacatcctcttcttcttccaaaactactaccatcaatgcgacgcctcatgattctccctcgagacctgcttcttctgtaccttcgcctcaaacactcgctccccagccaccatcatcgaccactacgacatcgttctcaggctttcttcccgcttcgggtgcatctccattcacgtctggaggtcccaagtcggtctcgtctccttcacctttctctggcgctaccgcattttcggccttcgcaagttcaaacccatttgtagtaggtggcaagaagaaagacgtgagcgatgtgctttccggagacggagaggactccaaggaagaaactgaggcggatggaaagttagagaaggatggcaagaaggaactgaacgagaccgagaaggacagttcattcggacaaattttgagcaaaggacaggacgttgcacaggatgatgaatccaaggactctgaaagtggactcaaaatggaagcccaggacggtgcgtcttttgtctggtgtcactttttgaagaaggaaggaatctaattggtcttgacccttgacctgacatactgttttccggaccatgaaacagtaatcacgggtgaagaagaggaggatacgaagcatcaagttcgttgtaagctttacgtaatggaaaaggatggggggtggaaagaaagaggaacagggttattcaagttgaacatccattcgctcaccaagacgcctcggctttgtgcgtcttatctgttcatctcttctttccgcgtcttccatcggcatgggcttctctggcgttctctgactttctttgacgtctgattttgcatcgaaaacacagtgatgagagcggacggaatcttcagactcatccttaacgtcgcacttttctcaggaatgaagcttgagaagcaggataagtgggtcagatttactgcttttgaagaggcgaagcccgtccatcttgctatcagggtgagtcttgcacatcccattttttctcttcacgtagttctcgcatgccctgcttcttcatatgccatgcgcgcatagtcttctgagaagactcagtatgctgaaggacaactatgatgctttcgttttgtgaatttttcatgataggtggggacgttgaaatctgccgaagatcttgtacgttccctccacggaacttgcaatcttaacaaatcacttgacattgacagtctccgtccttctgatctcatcacagttcgataaaatcaagtcttttgtgcctccaccaaagtcgacgattgatcgatccaagacgtactcgctagctccttttgaaggaacctccacatttacgaaaagccaagtagaagatgataagccgtcagctgatgatcaaccaaaggtcgacaagaacgagacggaaaccaaaacggagcaaacggaatctcagaacgaggttaaagacgcggcagacctagtttaaaatttctgtcactgggggccttttgaaagtttaatcttcggattgcatcttcactatcatcgtcatcgccaattaggacatccggccgaacctgtctatcttactctatcttcttatcctcatcttctctgtcgttctcttttctctcaactcatcttctctttttaccctgtcatcaaactgaatcaaaatcgccgccatacctcatccgccttcccatcttcccactttcttccattccgttttttcttcctgatccttgtttgtgtccgcgtagacgcgtttgtcgacatgaactgtatcctaactgacgtatcctgttccgtaccactcatcccataccatctgtcttcccccctctttctctttcggctcctgtcttctcttgttttcttccttttctcaaccctcacctattcagtctactctctctcctgattgtcattccactttctcttcccctctaacccttgttcccatcctcttttttatccgagctctgatccctctttctgttcattctgccacttctggttcggcgagacctaccattagtctcagttcaattcactctgatttcacttctcaacctatgttgaatgaaactaaaacaaacaatctcaatttctctactttgacctaatctactccctttctcttcttcttcttttttcctacctttttttctctttttatcgttatacatgagactaggaagtcagatacaatcattgtcgaatccgtcctcttgatacattgtccttacgcaaataagctggatatgaaagaatctattgctgaaggcaatcttagcataaccctaacacatcatgaaccgattaatgttaagaaccattctgctaatttggaatctttttttatcttcgtctactttcgtgattctataaacatttattctctaccaactgaccgctataccacagaacttacctaccgaggttttggccgtcttgagatggcttcagctgtgatctgccatgtttttcttcgaggcaacaccctcagatcttgcgccagaccccaagcatttctctccgtgcagtcaccagacctgctagctcctcccggttcttcttctttctcgatccatctcactgtgacacctggttggtgcgcatatggtttggcaagccaggtgggtctcttacctttggtctgttgtccgtggtcatatcacatcagtccattgtacgatgacacctgggtggtgtgcatatggggtctgggaagccagtggggactcggtcgggaacgagcgccagaacgaaagggtgccgttctcgcccgtcggctttactgtatggtcagtgtcctcgacgagagacagatgccagcgagattctggggctgcttgagacaggacaaacatcaaaggagtagtaatcaagtggttacgatgcttccctgctatatcagcaagtacaggaagtgccctctgggcgcgcaggttcgaatcctgtctacttcgtttttttttacgttgatctgcgtttccattgcaatccaccctttttaatcgtggttcaggtagttatggatcgagtatatgggatgcatgtcatgtataaaaatcattcaagaaaggagggcaggaaccagacaaggctgatgctgatcaaactcaggacagacagaaaatacaaagtactgggaatattacaaccataaaaagaacatgcaagcaacatgtcagaggataaaacagaaatacacattattctcaatcgctcgagatagaatcgacatcatggaatggtctaatgaaccaagtttgtagatagtggtcagcacgaagagtaaccaattgagaatatctaaaaatcctcttgccaggagccgcactcacgtgtattcaatcccactcctcgcagcctgcacaaccaacccaaaggaacagaagttttttcgagatcaggaacagcatcactacagcatgatctcggcaaagaaacaacacacctttagcatccactcctcatccgcctcttcaaattcataaccccttcctccaaatagtgagagcaataccggcaacaaaacaagtccgtgtagagcaccactgatgatcaacgaaagccacattcggaagaagtaaacctccaagagttttgatcttgtgaacgcaaggacagtgactccgataagcttagtgagagtgatgcccgaaaaaacctttgaatcgaaaagtgaagatagggtcaggccaacctggttttagaaatgagagcatacagaaagagaacaaggtaaagtaggacgaacggatcctccaacatcgaccagagcgctccaagcgcgttcgtctcgctctttcggacctagaggatgatcgtaaggcaacccgcctccgccagcacccatgaatgcccgagcgatatgcgagcagaattcgaccgcaatcccaagagatattactaggttgacaagagagatcgcactgtagcaacaggttaagccgtcacagaaaacggatgctcagtcagtcgttcgaacttcacataacaaaccactatatcgatataatacatacttgaggctaactccccagacacccattaagcccatcacgctcgtcaccgccagagcgcagactccagtaacgatcgttcccgtcctccacgagcccaataagagtgacgtcacgaaaaagatggacaccagagccaacgtaaggacttcgaccaagatggtgatgacatgtgcatactgagcgaaaatagaggtcaacagatgatcaaccatatgtctactttcaatgtaattgctaaagagaggtccaataacgaggacaaacctgatcaaagaatatatagaacaacgagtaaggatatactcgagcgccgattctatcctccatatcctttgcgatccgtcgagcggaagccaatgcgttgataaagtcccctccctttttcaatggtgtgtgatacgtcctgaaatgagacgcttcgatggcgtctcggctctttgagaaagatagtgcgttactgtacgacgaccttccaccaagaggacagttttcatccgtcggggtttgaagccattggccaaggtatcgcatgaattctgggccttcagggaatccttgcattgtagtatcaaacggaggatcacgatcgagaaaacaaggttgacatcctcgttcggattcttcaggcgaacagaacacatctggatcgtcttttctcactctgcaacacgactcgagtacagggttgagccactggaagaaatcgtcgatccagacagcaggcgcattagaaaggaatgaaacctcgggtcgtttgcgttcagcatcaagagtagaagcaacagagagctcgtcacaagtggtaaacctaccacacaacgcttgctgtgcgggtcgttcggtgacattgagatgatccactacaaagtagacaggaggtccgatatcaaggtactgatcaaccgcgtcaaagtatgggatcaaatatgaatctgatggtagagccaaacgttgatctgtcgtccaccaggaagggaaagtaacgcgtgtcagcttctgtagacaggtctatcaacacttaaaccaatgaacaaaaattcaacaaacctagtcctagctcgactttctggacaccgactagagcaagagcaaacagccctgaaaatatgagaagaacagccgatttggtttcccttttgagcaagaacggtgcataatactttcgaatgactctgttgatccatccctctccattggaagcagggaacccagcctgtatttcatcgtcgcccccatcgtcttcatcatcatcctccccatcctcattatcaaccgtggactcgagatagatagcctgctcaggatccaacttgatgaaaggcagacaatccattctgtgcgcctatttgaactcccaaaatgcggatcaataatccatcactctcttccaagacgactacgtattcctaaaataaataaataaacacgaaaacccttacctcaaccctctttagatccaacgtcagagcagccacaaagattgttacctggaggatcgcatcgatcgcgacagacccagccgcataaagcgcgaagttcctgaccgctggcattggtactaacgctcctaatccgaacgcgaccgtctccgtaagcgagctgagcaagatactaggtcccatcctagctaatgtccgagctacacgttcctccggggagagatacaactcagtcggcgcttgggtctgttccgccgaagcaatggtgtcgtttggtccagtggaagacgaggatggcgtgatggcaaacgggtcctctgtgaaagattgaccctgaagataatgggatgatcgctgttgaatagaactgggcgaagcgagaggtccgtgcaaggcgttttggcggtcaagctcattgacgagaatgaaaacgttgtctggattgtgaaacgtagaagactcagctttgtctgtgatcaacaaatataggaacgagagatagaagaactcaccaactccaacagctaagactaagaaagggataacctccgcgataatcaatgttactttgacccctagagctgaaaacacgccaaccgaggtcgagatcgagatcaccacaaccaagattccaaaaactcctagggagaacttggagttgatcaatgccgtccttaacaaattcttgatcctctgacgtctgcctgctgaccctccccgttctttctccctcatccctaaaacatcagttagcccgaatagactagcaatccagctaatcaactctatcgctagtcctatgaggcttccaccttgagacccccctaacgtgaatgtcacgtaaaccaacatgcccagataactagccccgacgacaagtttgtcaaggttggatgccttattcaactcttcttctaaactgacaccggtggaaaacccgatccaagcacggcctgcttccagttctttgggcgagttcacaacgtcctccaaataacttcttaggctgcgttcccattcctctgctctaagtagaccggcttcgtctaacgttccttgcaggacgaacgtcgtgataaaactcgaaacgttcaaccaattagttgactccgacggcagtcctcccagaataaacttcggttctaggatcattccactttcggccaggcaatcagatggttgatctgaacatcccttaatgacgtcctgccattcgtcctcgtcgacctctccgcccgtgagggcatcgaaccagaccgagatcgactggacgatacaagccgtacctgggccggctggagagtaacacacatcttcataagtataattgttgggtattgagcgcatagacaaaatcgttcgttcgtgttcaagccaccagttaaggcgttcgtatgagagagcgggttcgataggcgttggaatactagctgttccttgtctgtcgggcaaggaagcagaggatgaggagtcggtaagagaggatgtgatgaagatttgttgaggtcggaagaaagggccaaagctttgatcaaaatgattcttctcgagcacgggtgatgacgtaggagaaacccaaagatgaactggatcagtctctacggagaaccgtttccaaccgagattaagaagggcgaggaccagcaacgcaacaatgaatgttgtatctagatgttttgtccatatgagatacaagaaagtcaatgatttccatcatcatacaagatagcaagggacagacgaaatccacatgacttacaagctctctgtgcgcacatcaatcccagtcggtaaaagcccttcttgagccagacattgactttgctctgtctaggctgcaaccttccaatcggatccaacaagcttcctaccctagccctgccgtcgtcatcatcattcgataatccaagttcctcggatccgatagtcgtcccaaacaggtctgacgtgcttcgtctggacgctccaggcttatgcctcgtgcttgaaggactgattactcttccatcttgagcgtctacctctgtatctactcctggctggtcgtcatcgcccaataaaatcctgcgctcccagctctgtttcttcttctttgctattcgatccattatccagagggatgtgacaatcaacacggctgccaagtatgataacgtgacgacgaacgatgtacagctcattcgaccaatatgacagcctggaatgggatccatcctagattcgcctgatggagtcggcaagtaaggcaacgaagggcatatcgatggacagtcggcacaagcgcatcgagagtagatctctggatcatcgcaatgcaatttggtcggactgaccggggaccagcgatcctcatcctcggtttctggcagcgaagaaggaaaattgatctggaatgggctacctaagccagggcgtagcttgcccatatatcgtagaaaggcttccgggtctttggcaccccctccaatgagatccatagcgagaccgttggtagcaccaaattgaacatccttgcaagagtcatagaaggactgtttgaattctggagagacatacacgttgatctctttaacagcttcctgatgcggactagatggcattgtctgggtagagagaacttctaaaaaggtcgattgggaaggtgaacatgtgaagtggcaatagaacgatcgaaatgagtttcggcaagccggacaggcagcgatgaggctgtaggcagcagagttgcacatgatagaccatccagtgtcagtggcttataaccgcttcttcgagaacaaatcaagcaactaagcgggtacaagagcttacggttcggcttggaggaggttgtctctgagagcttcggcttgatcgatcgtacaacagaccgtgtccggagtctcgaatgacgggccgcatatgtccatgagcattgctttcagctctgtcgaaggctaaataatccataagttacaaattcgtttgtccatttgatcgtatttttgaagataatcaagaggagagaacgtcagatagctctggtacatgagtgaatctatcagaaacagatacaagttaaacggaccgaatcggcatcgccatcatcaggacaagggagttccggatcgaatatcgattttttgccacaggatcctctgattgagcatatccctggtccgtgtcttcgatcgaccaacgacgtggtcgttatgttcatggcaagtgagcaaggaagtatctcaggtacgactgtattgaaatgtcgtgggtgattgaaggtattgatgggattgatggtggagatgggctatatgcggtccgatgacttaatgcagccatctcggaatacaattcatttattctgaacacaacttatctaaggttacagacggcaccgtgaggggaaatctcctccttcatcagccatccgttctcttttcttttacccatcctctcactcctctctatctcttttaattctctttctcaaggtcagtaaatgttagactgcattataagaatggtttgaagttaggcttagttgactgtagagcttctcctgacgttgttttttctttgaattttcttcctctttggcattctcattttctcttctacctttgaccacgtctctttttagttcaaagatgtcttcccaccccaaagctttcttccctgacttgtttggcaagcgagccttccctactcccgtacgtctgatcactgtactcttttcgccgattgttgctgtcctcaggcatagcatattcgagatgagcccttcttcggagagaagcgagttttaaagatctgctgtagatcgaccaatagcccatgttgacctctacctttttctcctttttctgctccttttgttttcaacaataccatcaatactctttcttggaatgcatccaacttgaacgaactcatccatctgtagatctggaagccctacaagttcctctttgtcggtttggccatggccggttggggaatctaccaggtccaagagattgccgtctctcgttcgttccgtctttaaattatcttttggtcctctacggatgaagtctctggatgcatagaaggaagctgatgctcaatctttatgttctctttgctctgttctttatgcgtctgcaacaggacctgaggctttgaacgacgtatggccgttctctttccatttgcatatgacgggtttctcgaacatcttctcttctcacttggctaacattcttttcttttctatcttcgtgcttatcccgaatgcttttcacctcttttgtcttggaatgactagcctgagaacccctaccgttcgtcgaatttcatccatcccgctgaatctttgtctttgaatatggaaacaatagagctgaccatttcttttctcttatgtcctcaaccctgaacgccttctcttcacttttggccaatgtatattctgatcccctttcgaccaaccctctccgttctatctcaatcttccctaaaacccctgttccactcatacctttcgactcgaatttgccaaccaataggacgacgaatccttgctgcccaggctgccgctgagggtcatcactaaatgcgattgttcttcttcctggactcctttaaataagagtcttagaagcgttggcgtgattggatgaacgaatcaagtggatattgtgtacggtgagatgagaaggaaacgaaatgagatatgccctttcagttctttgttcgtactggcaacacaatatgtttaagaagcgaacaagaaggagtcggtagtattttaaggataaaaattgagataatcagcattggatggtttgcttatggacacagaatgtcatatttttactagagacacacgggagctattactctcgtatccaacagtcgtagactttcctgtatgtccaagtctttaacaccatcatcacatcaaccaaagtacttgtaacaacgagcaaatttctatgatgtctatgttcgaataacaagaatatgtacggaacgatgaaagagacatagatgactggaaaaaatcgaagaatgagatgcaaagaaaaaaccggtagaggaaaaaaagagatggtgaaaccccaagttttccttctcatttagtcggctgtcgaccatcatcttcaataactctcctactcttcttgctttctccctcttcttttttccacaacagatcagcttgcatgttggattacgtgtcaatatctcatgagagtcagtctcgttactatgattttctcttactgttttcggtcggtgctatca

SEQ ID NO: 301 - DNA, 9032 bp, Xanthophyllomyces dendrorhous
atactgtgtctgtcgatctagcacttctggatgctcgcaagactaaggagattcctcataagtctgtctcgtttccttctcctctcaacaaacccacctctgcattgcagaagacacactcggcgccagacttggctaagcctatcgcttcagtggagagactcgaaggcggagccacaatcaacactggttcaagatccaaacacaagaagaggacacctgaagagttggaatcttatttgaaagaaaagagagaaaaggcagaacgagaaggaaccgcttgggtggatcatggtcgttatttggagataaaacgacttaggtctggtttgactgtcgaaatgattgcggagggagcatatccaatcgggtttacagatgacgtacgtctagtttctccaatagatactctaatcatcctggttgaacaagatatcctctcaatcttgtctggttctgtacagagattcgagtattctcccatagccaatctgagagacctcgaggtcaaccgaaggggtaatttagtgggcgttgtcacaagtacaaccactaaaaagatggcaagcggtgagtttctgcaaattgcattcgctgtaactacgagctcttgcgtttgatttttgtatctgattctgtacgaaattgttcaatctccatctgtcaaatatatcaacgtacaggcgacttccacacatcgttgaatatgagagaccctagtggatctatttccatagttctgttcacaaacagagagatcaaccgtccggaccctatccctggttctatcctgcttctacgctcggtgaaggtaagacatctgcgtatcgcttctgaatcaccttgataagtaacctgactcgatatgcatgtttactccacatctcattcctgcagaaaagtagctggccgtcaccccagatggtcggtaccgccagagatgattggacatggatctacaccgatcaacaagtatccacgatgaagactcatagcaattttcacaacctaaccattcaagccttaccgatcatcacccatgactattttctgaagctttcaatatggtccaagcatacacttggctatggaagtgcggctgctgttaaagaaaaaaatcagaaaaggcctcgatctctaatcaatgtatcaaaaattgaggttaacgtcttttttgatcttgtcgctcaggtgagtaacgcaccccatctcatcccatccccttcttttccatttcccctttcctatttgtaagtaagacttgagaaagaacaaactaaccaatcagtgggatatcatgttgcaatgtagatcgttcaagttgcgagggcgaacgatgcgctggatctatgggtaaccgatttcacatcccatcctgatattcccgaatgcgaagaacacatgcctaggccagaagatggtctggcgccaaccacagctttcggaagatatgttcttaaagtgagcgcctgggatgacctagccaatgaggaaaatacaagtcttcgaccaggaaagatcgttcgaatgagaaatcttcgaccttggtacagatcaggagctctggaagcgtcaatgtatggaagggctgatagtgggtgtcggattgaccggatacgggaaggcgatttggaagcccaggaacttgtcaggttcgtttttttgtttgtatcttatgaagataaattcctaatatccaaaagccccattgctgattactatttcgatctcgtttgtgaccatacgaacaaacagtcgaagaaaggcattcttcgagattctttccggacaacagagtcaagacctgaagcctgtgatagaagatgtacctcccgtttcaacaaccgagcctttaatcacagagcatcagtcttctacttcagacttcaatacttcagaacccaatgctttggagcgttctactgcaaagttggctgtcacgccagacgaagtatcacctggtaaattacgactgcttcgacatcatctttgaaaatgtgcgaagagactgatggtgtgactgcttgttctaaagtgaaacggctatattccgacgagtctcacccgggaggcgtttcaattgaacaaatcatctcagagctgccttgtcctggtaaatatgcaatccgagctcgagtggtagattacttgtcagtcttagcttgaattacctcgtcgtcaatcagatgttgactagctgaatcaatggtgtgtcttgaatacatacaaaatcaaaataaacagccccaagagactagaggactgtattattggaatttgtggtatttgtcaagatcagtaagtcacgatttccctacctgtacagatatccttcaagattactgatttgtggtatgcctgctgaatcaatcgctagtgtttccccctgtagaattcttactacagacaaaggatgtcgagagtgtaacgagacgagagtccgatggatgtatagagtcgttcttcagttagaagatggaacaggatctctgaaggctggtttactcgagggcgatatcgtacgtctttgtctatctctctctttcttctttgttaactaaacgacctaaaagtcgactatgaccaaccctgctttcctgtgtattgggagaaattattagcacgagatgttcccagggcttccattagcagagacgtacctcaacccggcaaacgaagtaatcgatctccttcgctcaaagctcagtctcttgatcccctctatgagatcccccactcccatctctcctactgggcagcagattcctggacctccgttagaagcatgtgtaaagagttattgggtaaaccaccaaaagggagagaatgctgctgaggatagtgtcaaggagaggagctatagaatatttgcgactacgctgaaagattgagctgtacaaccgatcgaactatatatgtttatatttctctctttcttctgtcaaatctaaggcacaaagagcggcagaacattcatggaagataaactatggaaagaatatacatgatgatgtatactgattttcggttcttgcaacgccccggtgattgtctacaacgagaaaagacacgcggaattacgtgatagtgattgtgagcagttggatacgggtaagatgtaaagggtgaagaagatgagaaggggaagatcaagatatttataagatcaagggaaagctccaggcatgggattcgtcgtcaacgcaaccttgccacccggtccaactccactgagtccaaccctgcccacaaaaaatgtttctttgacgtaactctgcagaccctttgcggtgatttcaccgaaaccagccatcattccaccaatgaaaggaagcaaaacgttgattcccaaacaggcgaaggcaaggagggctcgtcgacggagaggaaggtactttgacgagaacaaggcgagggtgagcgaaggaggcgtcaaggcggaggaggtgctggaagcgaggtagtgctcgataggaagatcagcagagttgataatggcatcgtcgactgttggcttggaagcagaaggggcagaagatggggaagaggcggaggaggttgtggctggtaggctcgtcaaggcagattcattgttgggattaggatcagaggccactgctgagtcaaccgtctgagaaattaagtctgttcagtgaccaatccgtacaatccgaaaagaaggtaagaaactacgaaagacgccttaccatgactgcttgaccgtcgacaagcttaacgtcgcctactgttctctgatcttgactcggcttagcgttatccaaagcatccaaccctcgccatgcctttccgtctctttggagagcgtcctgatcttgtccgtctacctttgcctcgatcttcgccgctcctaggacaccgtctcttccgtcgaggttcagctctttggcaagtccgctgccattcaagttgctcttttcctcggcctccttcgcagcctttaccggctcttgtttgacttttgtttctttctcggctgccttctttcttttagcctcttcctcgtaaaacttctcccagtacgctcggctcgcctcagctttctctcgggcgatcttgctttcctccttccacttccggttcaaggcatcaaactcggtttttgatttttcgagcttgattttttcgtcaggagatccgtccggaccaatatcggcagagttgccgggaggtccagagctatcggggagcgaggcgataggagcgggtaggggctcggccgtgctggtggaaggagcagatgatgacgatggcttaggcgcaggagggggaggaatgttgaacgaagtcaacaccgcggtctacgcaggaatgacaacacggataaatctggtgggtaagcgtttgacacaagagtaacgaacgagagatggactaatttgacgtaccccaagcacatcgtcagccgggatcgagataacctcctcctcgggttgaacaatatcctcttcacgacctaaaggcttctcctccgagttcgtgtttgctacctcggcctctagtgcggcgttgtcctctgaaacaggctcagcatccacttggcttacaactggctcctgttcggcagcttccgctttttgttcggtctgctcatttatgggcttttcctccacaggagaaattggttgttcctcttctacatgaacgacgttgtgttctgggtcaggagcatgagcggccgctgcagcataagagatttgttcttcagacattgctcttgatctattgtgagtatgtgctaatggcgatggatacgaggtgaagggcgactaagcgagatagagagaaaaaaaaggaagccaattagaacgatgatatgacgcgatttggtctgttagggttatgattagtcatcagtttcacatgcccaacgtctggactagccaagttcgttggtggactgatcgggtagttttgttagtgaactgatcaattggcgttcttacaccaggtcaaccaagaattatcaggatggccagttccaagcgcatgggtgaaagaacgagctggcatgtatagtatttacaacaaagagaggagagaaggactcaacagagggactgattatgtaatctctacatcgacgcgctaccaaccctaatgcgttcggtcagctcacgcgtttgaaacattgcagctcacgcgtccgagacgcaactgatgacgcgactgatgacgcgtgcgacggtcagacacgcgtcacggtgattgatagaatgatcagccaacgagcccgccgcgcgtgtgctgtatctgccaccttcgtctttggccctgcgcgcgtcccccaaaaaacctcatcaacacgcatacagcattcacgcccgaacgatatccatcaccctcctcatccactactttcaatacagttatatcacgatatccattgattttctcttctctttcctctcttcatcctgacactgagaatgtcgattcctaccgaacgtccgttccggaagtttcagagtgaggcttggaacatgggttctaccgtccatgtgaactcggcgaacctgattgatccagaacttcagagtgctttgtaagtaattttattctttcgcactcctcttttatgggttcttcctgtctctttctcggccttcttttgtgtgccttgtacaatctaccactcctctggcactgtgctatagacggtcccatttgcgtccatcgttctactctctaaaccatgattggtcgaaaaactcttgagaaggtatcgtccgaataagaaatgtatctgcctgatgcggtcatccatgcgctcataaactgaacccgagcaggccaatcagtcttttgttcctttgttctccttctcttcgcaaatctcctatatcatcctttcgctttcgttccttttcaagaacagtctaattgtgtcttgcttggtgacttcatcgacacaagaaaaattgagataagatgatataaatctaactctcttgcattattctttatccgttattcctaaacctgacagggcctccgttggagagcgagtccggaacagttcgtaaccgttgtttgctttcttcctatctacattatctcattctttccgactactctcgaccctgaaacctcacgcgcacacggagaaacacttccagtgtcctcttctgagttcttcgctcccatacacctatgctctatccgatcatatctcactgggttctaaccctccttcttgaaagcatcgacaaaataaatttctgatgccttcctatgtttcaaccgtttttgatcacaactcgcctgcaggtattgtaaagtcgaacccgacggtggctacagacccggtacggaagaatgtacctactcggacgttcagccgagcggcatctacgatgaactaccctattgtatccgatccgttcgcagcttcgtcccggtcgacctctgggtttgccagatcgttctcccagtacattccagcacggtcgtttgctccaccggctgaggaggaggacgacagctttgctaacggtataattgagggtgacaaggaagcaccggcgttcggagaaggtgaactgggctggggtgatggtgacgcggcggagaccaatggtgaactctttggtggagagcgattgggagcgatcagtggtgatcgaatccatgaggacgatgatgagtcaatctgttctcctgccccttctctctctcctcctggatcgccctcgcggactctagagccacagatttcctcttcttcccctctacctcctgccaactctgcttctttgagcaaaactcgatcgttcaaaacagttccttcttttgtcgagtcccgacacaacatgctgtccaacctccgagctcaaacgttttcctcacccgaggttgacccagaagaagcagagacgttcagacgacacgcttctgccggatggagagaggatctcatcccggctgagaaagggagattggagtccaagccagaggaaccatggaaggatctgaacttacactctttcgccaacgtcgaagatttttagttatcgcctccctctcttatttttccttctcttcacttttctctaccttatctattgagcggactgaatgggagcctaggagtggaattcagtgcttgaggatgacaaagaccggatcggattggactaaagttttgatatgtgatgcagccgttttcttatctcctcttgtcttgaattccctatgatattacatctgaatgtacactatatataaaaccaaaaaaagaaaatctattcgaagcgaaacaaaataatcaagaatgaagacaaacgagcaggagcaagagcagaaacgaaagcagaagcaagagtaaaagcagacagaagcagaagctaaagcaagatacgagaacacaacctattcatctttttcccttgaccattgtctacctttgatttttctaatcagatccgtttcctgaccaacgaacgacttctttctcgctccacaatagctcggtaaactagtaggacacgatgtcatcccagagataagttacccgttagagtttgtgtacgaacaggtcccgctggcgtcgtaggtgtcacctgggaagttacaggttttgtactttgtggttgccgtccagctgagcaatttcacaggcgttccgctatacgttgctgacgctggacaatctccagaggaggctgatagatccagaggaaggaaaatggaggagaaaagattagtaaggtcgaaatctccctcccctttcctttgataccgatggtggggaaaaagaaagacatactcagggtggaaggacaggctaaattagatgaactactagagttaagaactgatgttgatctcgtgtagagacaagctgcagggacggttcgtctagtcgaaaacaataataatacaaaacagaacttagatgtcaggacgatcaagaagagatgaagaatggatggatgttgaaaaatgagacatacttgtaattgtaagtacatgttgtaccggtagtcccgtaaggcgcaccggtgattccatccgggggataactcgtcctttgatcagaatcgtccgggatggaacttagtgtcgggcattggtctagggtttggcgcgcgaggcaaggttgaagggagctgatcagaatcagtatgctccagaaagggagaggagaagaaagagagtgaaactcacaagagcaaaccgaacctgagggaagagcaaatcgttttccattttcgttggtcgtaccagtaggcgccgcttggacggcgcagattgcgcctccgggaagcaggactatacagcaaatggatagagtgagcatggtggatggatgagtgcttaaaggtgtgttgagatgaaccaggaatgaggatacagattatccaaatggatgaatgcaagatggagaggagacaagttttccaggaaagatggaaaggcaggtagatttaagcaagtttgacctgaagagacagatgagaaagaagagaaagaaaaagagcgatttcaggggtacaagggaacgtcagtgcccttcataatatatattccccccttcatttcattgaacttgaaatcccgattagcaatatagtaaccagatcctatccgtcaaaaacttcttgaagcagcagtatatgtgcgattagcagagcaaccaatgcgtgtcaatggcggaagagctcatcagcgtaaaagatgttctgggatagaagggtaggtggttcggttcgtccgacccgcccgcctgattgaaaattccgatttcggggaggcacaccgctaaaattgaaagctgccgatcattttcataacaaataccgaaattggccgtggaatcctccgacgcgcagctcacatgccccctgatccctgccatcaacatccatccatctgtgatcgcaaatgcactgattgccttgatgcctaattctatcgatgaaccattggcggtttgtccttgaagaatattactgaaataaaagggtgaaaatggacttttcgttctggcacttgttcccaatcaagtcctc

SEQ ID NO: 302 - DNA, 120064 bp, Xanthophyllomyces dendrorhous
  misc_feature (51582)..(51591): n is a, c, g, or t
gtgcaggggcttgatttgggggcggggagggtaatcgactgaccaaattaggccctgcgaccacagacggatctgatgcggatatcgggaaaggtgttggagaaggagcgagtgccaatggaggagtgggcacgggggaaggaatgactataggcaagatggtagatgtaggagtttcttttggaagattatcttctgcgcgtacttgttccagcaaagctacgtccggtttcgtatcctcttgaggctgatcctctttaagctgatcttcttgatctccatcctgcattagaacgtccactactggcttcatatcatcgtcttcttccatcttgtcttcttcttcctcgtcctcctcttcctcctcttcctccagctcctggagaagttccttcgcctcgtttatcttgacctttaaaatctgctggtccaggaagaagacccttcgatctgctggagtcgcgaacgatctaacgattaaccccgcgatctttctccccatatgttctccaacttccggatctgcgctcaagaccagtgcatgcagatactcttgagctttattaagattctcctcttgtgcgttttccagcatctgttttatctgatcaatttccttcttaagaagaattgggttgaagtagagaatctgtcgttgcgttgcgtcatgtttctgtaagaacacgtcagccatctcgttcacgaggtcttcagattctggggtttccaacgacgggtatatcttgaaaatccgcttagcaacattaagcttgatcttgccgctcttagaggacggagtggtggaaaaaatggaggatgaacgggacgagcgggagtcgttagagagaatcgattcagatcgatgcttcctcgtaagcttctgtgaagcagatcgaaaggtcagatcatcaattgaggcagtatttaaatcagcaaagtatatgccatatgactgagtgctgttgggtattaaatcgaagctgtaaaaaacttacctgcttcttcgatggtgagggagactccgtcttggggttgatcaaccaaccgggaactgctgattttggcctgataccctctccctggcttccatgtactggaacaatgtttttattagccgtaatcgcatcctttgcaggcgagctgtctggtcgaggcgtgctagagagccggatatgtctatccgaaaggactggcattgatatattagccgccatagaagtgggacttgctcttgatacagacgatgctggcacttgaggtgacccatgcacactgtcggactcgatttctacaactgaactgttggaaggggtagaggaaagagtacgggatattttcagagggcgtgtcgatacgtttccacctttaggcacagaattggaattgctatcagcagcagtagcagaggctatagcaggtgaggaattccccgtcgtcgtcgtggtcgtcgtgtcaggtgtcgatctagcaaaccatgagtctgaatttgctggagcttgtcttcgatacttcctagccgctataacaggagaaaagacgaaagacaaaccgaattagattctagttattatcagagtctgtgatcatcaagactgaaccttgaacgaacctctaaatccattccaaatcctcatcgttcgagcatctctcatcaatattccgtcctcaaacctcagtcgaacgcctgacttctcattcttgacgaccttttcaaacttggctccttggagagcaatgtggtaagtgttttgtagtttgagttcaatcttagaagcctcgatagcccatgaacccgcgagaatgatcttgatgtttgttggtgggtctcggccgttgtcttcccggatgacactatcgagtaaatgttttcagcgagaacacatcccatcaacacaaagcgatcaacatgaaaccggtacatatatgcattagatccggtaaacaggaaacgagccaaacggaaatacctacatcgacccctgaagttcactctccccagactttgatttctccggcatctttggcaaggaatgcgaggcaagagatccttccacatactgcttctgacaggaattcttatcaaaatctatctgaccaaactcaaccggtctgaaggaattaaagacctgatgtacatcatggataggttctttttttgtcgagggacctgctatagggctggtacgttgggaagatggcatgatccctgatttattggacgcgtaacagaaggagaaacggcctagttctgaggagcttttttcaagagagacctaacgcccaaccacgaacggctatcaatctgacgagatgacaaagaatcgctgcgccagctgtgaccggaagatatgttgatgggaaataaacagatggtagtgatcaatcgatcagggtgatggtcgtttagatgtgacagttgacgcgttggataattgagaatgtttcttatgcatcttcgtgaaggtcaccatcaatcactcggaacctcttgaattcacttctgttgactcagttcgacttctcaacgcttggctattggttcccgatgaggtgtattctgtatgagacgatagtagtttaagaaaaaaaaacatatgtataatgtggcagtacgcaactagaagactggatacaggcgtgaagtacaattctgagttgtacagagtcgtgaagcagagggagaagaagagaaaaaagccaatatggagggagacaagagaaggagatggtcgaagtcttaaaaaactgtccatgagacagatcagagggtgatgcttaaaaatgaagttccaaagccgagtttacagaggtttcctttttgttgcgttttagaaatggaaaggagaaccgttctcgattaggcttaaattcgtggttctcgaagaaccgccagaacagaacactacgaaaagatagaaaaccccgctacgaaccataggacagtatgggcctgagaattcgggaaagacgcaaagcaagctgcgtagtcagcatcagaaagattcccgactatacgagcgtcgatgacaagatgatatagcgacaaaggatcaatttaacacacattttgccgttcgactgatcagatgttgcatcctaattggagaaaagggccaagccgaagttcagctcgatgcttaagttgagcaactccctcaaaactgaatgagtgtaatctacatacgttcccttgcccaacttagcaaacgactctctagcgatagtgtggccacaaacaagcatcatcggaggatttgttggagtcgcttgttctctagagacagggcatgtaaatattgagtgaaacctgagcgaaggaggcaaggggatctcgatctgaacgtaaagaagaattaacaccaatcctcttgaggcatgggaagaaatgtctgagcagagggagacacaacataccggtaactctgcctcaatttcccaatctgacccgacttttgccttcatcatctttctcgctttttcaatcctacctacagagctactcgctcctagcccaatgactatgccaagaacttccttcctgggccaacccactcgatcacaaaactctttctcaaacaatgggaccagcagcggagcgtgtaaccctgggtcggccaaatctgcgtaaggtgaatctcggaaaatctgaaccgagttggacgcaaacaagagcgctccgagaagccgcttgatttcggtcggatacaatgagaagagaggagtgaaatattgtcgagcgtaatcgatgagcactcccggtggagaagccggagcaggaagggagagtagagagggaagaagtttccgaaggtagatcgaccgatgaaggtaaaacaagagcggagacgatcgagcgctcaggaatccagcattatttgtagcccatctggatcaaagaagaaattagatccaatgttagtgagccgtgactgcattatattactcgaaaagttctcagtcgtcatatagaagtactgcacgtactgtatagcaagcgtcaagtctccctcactgattgcgctgagtgttcggtgaagttgttgagcattctcgagctcaacagaggaggacttaaatccatgttcctgatcatacgaatataaaactggtcagtgtcttcatcagtccgatggacagacagaggaataggggaatacttcttccatcaacaaaactgtattctcttccgcccttctcgtcaatgcgttcatcactgtttgaccgagcagtctatgtgagttggtctctgagaactttccaagatcagggaacgactggttctccggcatggcctataaacgaatcaacggcacaacttaatgtgagccatgcagatcaaggatagaccggtataagtgatcaagtgattccacagaccttggtcagagctgttccgactttgccaattgctttgtgatacgactttagtgcctgattgtcctccaagcgaccaccaggcgaatttaacgaaatcagcggtgatcagacccctccaagaatcacagattgagaggcaagggatgataacgaaacaagaacaaacctcgtcaactttgcactttgatccttcaatcgcaacttccatgcgattcaaaatctcgtcaaccacttccagagtgtttgagccaaggacttctcgtcgagccgctattaattgatctaccaatgtgtctaaagaaacattgatggctgatcctccagcagaagcggccgtagctgatgagccaggggtcgagatagatacgtctgatgatctggattttgttcttttgtgagtgattggcgtagttgctcctaatgcttccagcctggaaagttctttgtacaccgcgtccatctgtgagcgattgtcgtacaaataaagttgatggatggtggtgatagtgatggtggatcaaggtcgaactgaggcatccgacgagtagagatgataggcgcgggttgaaacccgtcgagtcttacaacgcaatacactatgacagttatacagtccattacattaggaatttacatcgaaccagcacgaaagagactgcagcatttagaacagaggagatctataaacgaccttgcacacacacacacacatatactatctctcatctctccttcttacagcatacaggcttatagaaagcttcgaattttcgcactcaatgcatccccgtctcgtttgccgagccaccccatccgggcctcggtctctcctctgagcatctccttgtggtcaggtgggtgggccatcaattcctgagccgaccaatccgctggcgacctatttctctctcttttattcatggggttcgtcgtcaccgatatagggaccgtctgattgaccacgggggatatcggagagtgatcggcagaaagcgagtttgttcgaaacttgtgaggcattgacggatgaggtgcaggaatcagatggaaatgtgcctgcgtacaaatcaatcaacgggatgccattcagaaggtgacggccttcggactgtttaagcaaaaggtataaatctgaagagaagataattacatgtgacacagcttgcgcaaacccttgattcaaaacttgaaggatatgaactcaggatgttagatttgataaatcctagtccgagttgacgatgaagaattctctaacgaaccgacattcaaatccggattatccgtggctaatttcgatcccaacaaagaactcggagctcaatctatgctctccacttccaggtacgtgtcgaagtgttcatacctttgtttatagccgtgatgatcttgggcatcacacttcccatagcagcaccctctactgaagacagatcggccagcctcggacagtgtgacctttatatgcagcaacaattcgaacgatcggtcaatcgagcaagaaaaaccaagaaacaagactgaatcaggcccaaagaggaactaccgatcgaacgagaagaggaaacaaacaaacgaacgaactttggaattaagagggtatgaccaggtcgaattggcatcaagtctggacatcgtgataaaagaagtcgagtgaaatcgatcgaggatcgtcagagaagcgctttcggtatcgtcaacaaaggaagaggtctaacctagaaaagcgatcgtgctaatttaaccacgacacagacaaagaagcttcagtagagagaacacagtgtaaggaataaatagagaggggcagaacataacacatgcgatggatcgaatcggcctacgtactgttcatcctcataaacagtgtatgcttttctatccgcctcattcgcgttagcgatctgacagaacggacaacgggcatccttctctttaggggtatagctcggatggatatctctaccgttagagtgttgggcgagaatataggatgtcatgagagatacgtctttatggaacaagtatggtcatatgaagattccttgggaacagatggtgaagaacgagaaagaaaattcaggatggatcgatgagagaacgtagatcgtcagcgccgaccgatcaagagattgtccgcctcttgcgcttaatcgaatcacgcagtgggtttcgtttccccaacgaacagaaacaagcaacactgacatgacatacacaagaatggctagattcaaataattgagaagaaagtctatctacaaataagattgagaaaagagatagaaagacaaacagtcatagagattttagattactgaaaataaggaagataagatttctaatttttaaaacacctcgattttgggtgttcttgattctttggcccacacatggcccctcctcaaatgacttgtggcttgatgtgtgccttgacccccaaaccatcttcaaccgaaggctccttgaaatcataagcaggcaactcctggctctgaatcttatcgatgataggaacaacagcgtccggaccgtcaaatgcctgcgtgatctcctcaagagtgtatgaatgagtttcaaccatgtaccgataggccaggcaccattgaatgatgaccaagggcatgtagacgatgtagtacttgtaacctaccgtcctcgacgacacacgaggaaaaagagatagaactgatgagacaacggcgaagtcaaacataggacgtaggtgcacataccgatagattcgagagcgactacatccacccaagtagcatacacacccatgcactggttcaaagtgttccaaaccaagagacctttacttcgaagagagtaggtctggacctcggcagggtaggagtacaagacgggattggcaaagttgaagaaccctaaataaatccacaacatagcgacggttgcaattcctgcactcttgctgtccgcacccgtgtttgcaaacacgccgctgtggaaagaattgaaaacatatcaggacagcaaacgagtggagaaagtgactagaacattcactcacgaggaaacacacatcccaatcaacccaagcaatagagttggccaaacccacaatagaaccgtcttcttcccaattcgtttatcaagatagactgcagcgatctgacaaaaccaagtgaacatcgacagtccggccccgattccagtttgagtggtggtgtctgtgatgccaacaagattaagaacctcggtgtctgtagaagaggaagagccagaatcgagtaacgtaaataacagaattcttgggattatcaactggactaaagaacgtaacgaacagtagtagtagacgatggaagctgtttgtcgatggaaagcgttatagtcagcgtactctcaaccacgtgatcgaaatcaacacatcccgacttacatccagacagctggagatcaacgtgagaaacaaacatgtcagatttccaacaagagctttcagcacacagaaagaagagacctaccccggtcataaaagccatgagagctgccaacgacaaccgatgtagactacctttgttcttgatgatcatcgaccaatctgcctccttgttctctgcctccatctgaagcgtcttcttcaaaagatcaaactcatataagaccagctcgtcgtttgggtttccgtttccgtggtaatcaacaaaaaacttgaatgcttcgtcctctcgacctttggccatcaagaatctaggcgtctcaggaacaaattgaactccaatcacaatctgagagagttgtcgacgtaagtagagagaagtagctaaattccgattgatacagttatatctcgagaagaaatgaggacatacgtaaaaggccatcggaagctgaaccaggtaagggattcgccaagcccacgagttttggatgtacgatgttccaaagatcaagaaagatgcaatgactgaacccaaaatccagtacgaatcccaagaggcagccacaatcgaacgagatcgagggtgtgaaatctcctgcacgacgatgagggaagtcatcaaaaaagaggccagtcctgtagtgaagttatgaaaagacaatgagactatatgcgtcaacaagagacatagagtaacgacataccaaacccaatgatgaatcttgaggtgacgaagactaagcgagaggagagcagcagtcacaagaaccagaataagcttcggccagatatcgtgggagttagcacaaggcgacgtacgaccgtaaccattcactccgtccaacccggcgacacaaccaatgacagttccgatgatcatagtgtacccatagactgatgatagcgcatgattcgggatcaaaataagtccaagaacccaaatccagtctaaagccgagcgtacaaagaagaagaactgacatcgaagtccccatcgtcgtccgtatcgggagtcaagccaagtgatgaaaggaccgacaacaaaaccagacatgtatggaacagcattgaggactccgatctgggaagcgctcgggttcccaatatcctctgtccaaacatcgagcgctaaaatcctggagatgatcgtcccatcaactacacacggtacgagcactacgagttaaaccacagggacaaaaaagaatgaaaagaaagtcctggagtagctactgacatccgttcaggaccatgcccacaaagatgatactcaagaaactgtgaaaataaaacgtaggatgttttctcaaaacgaggtcagtcgtccagggctgcatttgaagcttcaaaaggttaacgtacaagtcgagcttgagctttcccttattctcgtaccacttcaggtggtcggacgcattgggactgaaaaaccaaaccggtcatagacaacggacaggcagacagaacgaaatgcgggcaaacagagaaacatagaacaaaaaaaaagaatcgaaagggaacacgtaaggaaaaccaagccttgtgaaacaaacaacccctcgtctttccttagatatcacaatcgaccatctgcctggtcataagaaacataagaaactcacatctttttccagtcaggtgtatgcattgctgtttgcacaaccagcatcgcgacgaccagcccaatccaacatatacaccaacacgaaaaatgagtataccgagagaaaaggtgaagaaagagcaaaaaaggcaggagaaagtgggttcaaaaggcaacaattgatcgcgacgcaggcattatccatgatccgctatgacggtattatctcagcacaggtctctttttttgattagattcccggcacccgtgttgcacccagtgcgttcagcttctcttctcccgctttggcagcgggtggtaagtacatcgctggggtttctctattgcctttttggtatattttttaaaaacaggcagacacaaagaaagagaagatggaagaaaacagaatagtagagcggaataataggcagtccgccgacctagacggaaataggcaattgctgttttcctgtctcatttctcttcaaagacaaaaaggagagcacgcaagcctgctgcgagatgaaatgttggacaaatagagggaaatgagttcttcgacaaacctaaccaacaaacttttgattctttgcctgcgtcgagtaaatgaatacgatcgatggaggagaataatcgaagaaacggatactggtcaatatactattctaaaagccacagaggagagagacaggataaccttcttgacttgtagttgtttctttagatgatagtgtccttgtgaggaagaaaaacctaaagtggttgatgaggaagaacgacaacgaaaaaaagagtcttcttgagagaattttcaactgagacggaagaatcgtggcgaagaagaaggaaaaagggaacaagattttttccccatttttttctttccaagatcatgggtggcgcggatataatgcggagctgaactaaatcatttcgacttccgtccacggctttctatcgatccccatacatacaattaccccccggggattacaaccaactgggatacaaaagaaaacgattccgcaggaggaatatttgaacacacagattatttgcttgtttggataacattcaccatcttcgatagttccgaatcaaattgcgaatttgaaaaaggaggcatgcaccgaagagtcgagagcggtcgcgaaagagaaaacaatcgaatcaagaggaagaaaggaggaaaaggagatagagcgaaaacgattaatcgaagacgaaaggaagaaaaaaaacatcaaacactagaggcgcacatccaagatatcatgaagtagaaaggtaaagagaaggatggcgaggatagcaagggcgagaacgaaacaggtaattgaggaaaatgagataggccagagtagagagaactatacggaacaaagaccagggaacaaactcggaaaggcgaaaggaaaaagaaacgtccttgtagcctctactcttcgtctgccggagcagcggtctcctccttggtgggctctcccttggcctcgttctcctgcatatccgaggtccagagggtcaagttatcccgaaggagctgcatgatcaacgtcgaatccttgtagctctcctcggaaagagtatcaagctcagcgatggcgtcgtcgaaagcctgcttagcaagatggcaagctcgatcggctgtggataaatcaaatgttcttagcaacagtcgatatatatacggataaaagtggttcagagaagactaacgagagttaagaatctcgtagtagaacaccgaaaagttgagagcaagacccaatcgaatcgggtgggtgggggcgagctcagtaacagcgacatcggaagcagccttgtaagcctccagcgacttgtcagccgagtcctttcgcttgtcgccggacgcaaattcagcaaggtatcggtggtagtctcccatcctgattttttttcaaaggcaaccagataactcttcagcacgtgtctagcttcggtttttttaggtaccagaaaggacgaacatcttgtggtagaacaccttagattctccagaggcagcagaaggaatgaggtgcttatcaagaacctgcaatatacaatttgattcccattatcgtcagttcatgcaatgctgttcgaagggcggagtaatctggaaagtcacaaacctcaagaatgtcttcgcagatcttggcaagctcggcctcgatcttctccctgtatcccttgatcatggtaacctgagcatcatttcccttagactcctctttctgctcaatagagctgacaatcctccacgaggctcgtcgggctccgatcttgattgtatgcaaaagtagatcatggtctgattcagcaaaaggcatcgacactaaatctgtaacgagaggtacgtacgacattcttgaaggcaacagagaggagatttcgctcctcaacggtgagctcctgatcggtggaagcaactcgcttcatgttctcgaccatctctataatattcaacccatacaagacagatggcccatttccagtaagagtagatgtcggattgacagatgaatgcacacgatgtcatcattgaaaacaatgatgagatgtcagtacgcatacacctgtatttctgttgtcatcgatagaaacgcaccctcgtatcgctcggcctgctcagcgagcttggcaaggtagacgttggattctctcgactcggacatctgttttaacggttaaaaggatcgtaattcagtaagcgggacatttacagaaacaggagtgtacgtgtgagtggggagacgatctaggagcatcttccgccacaaaccgagaagaaatgcccctgctcggcagtgacaggtgcatccgcacatcgttcctgtttgctcctgccgcccctcctatcagaaactttctttatttgttctgatgtgctctgcccgaaatttggcacattcagccttatttcaccccaccttcgtccgttctgagagtttggagcatccgcttgggcacattcggtgatatacgaagagctcgagcaagagatagagatggaatatgacaacaagaaaagcttacaatggatatctggtagatattgcgagttggggcaaggaaatttagctgtgacaaaaaggcgatagacgataacaaggaaatcagaggaggacaaatggacaggaagggcaatgatggaatagatgaatgggagatgaaaccaaggtggaagacagaaagaagacgacaggtaagttcaattgaccccttttcttttctattggcacagacacaaggagatcaaagatccaagagaaaggacaggagagatagaagaaaatggcgttgagaagagggaagaggagagatcgttcttgatggtgttcctactgcttgagtagaagcatgactctgcgaaaaggaaggggaagaggagaaaaaacacgcgatgggattttacttccacctcaccctacactccacctcgtgatgatcatgttttcccatctcacataaacagtcaaggatggcaagacaaaggatgaagcgaaaatccgagaatactgacatgacgagaaaagggctgaagaagggaagggccaatagagaaaacacaagaacgaacctttggggaattgtatgagaaagttacgaagaaggtttgttgggtatggaaagagaaagaaaaaagaccaaaggaggaaaaaggagaaagacccagaagacagagttgcgcgtgtgcaagcaagaagggttgtaacccgtgagaccacgcacatatctatcacttgcttagcctagaggcacgatttacgtgcggttacaactagcgatgagtcatggccacctgtttgatcgagggtctcgcgtgagcgtaacaagaatgttctaggcgttggtttacaagtctcgggtcttcagttacattcgtcagcaactcagttacatcactcacacacggcttaccgattatttcggctgacacattcaaccggcaaaattcatattggaaccgcctgccggttcggagcgacctacgcttttaacaattgcgtgatccttctcattttcttgtgcacccataagcgacatataaatctttcgctcaagcattctttcttttttttcccctcttttcttgctcgtaactgtacattctcgttatccttcttctagacagtcacctccgcctaatcaccttcgacgctcgctcgaaacagaacatcgtctgcatccaaagctgtatcgtccattctcaccccagaatcaaccatgagcatttctaccactccccaggctgagcagccttcgcccgtagctgcatccaccctgttcacctcagatgaactcgttcagatcaacgagcagctcgctggaaagtctcctcaacagattctcgagtgggcaattgacaatatacctgaaggagcactctggcaaactactgctttcggattgtacgtcatcgtcgggggttttctcctttttttttttttcataaatccagatcagacgttggttgctaatcacctttccatttaaccgtactctagaactggtctcgcagccacttcaatgatttcttccatttcgctctcacgagacgagcctcacctcgtccctcttatcttccttgacacactctaccatttcccgtccacacttgcgcttgctagtcaagtagaagagacgtatttggccccgcttcacgtgttcaagccggtggaccaggagggaaacgaggtggaagatgcgaaggcatttgagcaggtttatggagaaaagctttgggagagagaagaggacatgtatgactaccttgtcaaggtatgtttctttatgttctggcatccgtcccatcgtgtcgtcgatgtgtaaacctgaccatccttgaaatcttttctatgagcgtaggtggaaccctctcatcgtgcatacgcccagctaggcgtcaaggccgtcttgactggacgaagacgatcgcaaggcgctgagcgagctgctcttcctgtagtcgagattgactcgacaggtttactcaagatcaacccgttgatcgagtggtcattcggacgggtaaaagaatacattgatgccgagtatgtacaccttcgctgttctttcttgctttctggatcatatgcttgttctgtgttgacatatcatatcgtgcaatctctgcgtctcagaaatgttccctacaactttcttctagatcaaggctacaaatctattggggattggcactccaccgccactccgtcttccaacccggaagcgggggagcgatccggtcgatgggctggccagaaggccaagaccgaatgtggattacataaagagtatatcttgctcttatttttatcctgttctcatattatccataccttactcatcatgcgttcttgacttcacagttatttcaagatgaagaaacagttcgagaagaaggctcgagaagcggagctgaagagaaaggatgaggccaaggatctggaggaaggtgccgtcaaagtcgaagaggttgaaatcagtcaatctttggccggcttggtcatctaagactctattctctcgtttttgtcttccttgtcctcctctttctctgcattcacctactgtcttctcaacgtgcttcatgcagttccccccaattcttatcgacgtgtttggacgctttgcccatgtctgaatttgtacccttttcattcacattattttcctttttcatagttccacttgccttgcatctacctcgatcatctagaagtttcctgttgcacttctcattcgatttctgtttttcctctcctgcctcttgatacctacacaacaagaacacccttcgttgtctttcaaaatatattgtatgctatgtcttttctgcgcttgtgtttgggttaaagccatatttcaagtaaacgattagataagcttttcagttttatgatgaccaaccctagaatttgagtcttcgtgtatctcgccaaattcttctcgttcgaaactatcacttcgtgccaccttgaggaccgctacgctctatataaactttccgagtcaatttcacatcagtgtgagtgggtttcaatcggctgattacggaatacaatgaaaaacatgctgccagataagtactaacactggtttcttcttctctctcagttggccttcaagcctaaattccttgacccgaatatactgattctatcccaatattaattagggatcaaccacactctttgatcttcttgctaggtcttactctctagaaatcaagtgaatcaatcggtccatggtgctacccaatcttcctgtcgagatccaattcatcattctcttcttcgcattcaagcaagacctgccatcaagcccacaggacgtcaatccattcctcctatcatctgctctaccccttttgcgcgtctgcaaggcatattatcaatattgccttcccttattgtacagacgactcgttatttgtcggcctaatcattggacagggatctttcacagacagaccggatgcttgaaccatccaatcttaggacccactcgaatcggatgggtgaaggaacttgtgttcaccattatcccatttccattggttctcgattccacagagggacctactcagaatgccgacatgaacgacctcctgccgttcaaatttccatcacttgatagcgtggaacgaatcgtctatgtccctcctacgccgagcgaaatcgaacaggctgttcaagacctcaaggcaaatattcaacaatataccgacgtgcacaccgctccttttcgaaagacaatcgcctgtcttccgctggatgcgtttgagccagctttattggaagtccaacaggccatgtttaacgccgttggggcttctctcgctcttgttcatccagcaaagctgaatgagctaggaagaagttttgaaaacatcaaccgcgtcattctcgaaactcaactccgggagggttgtcttgatttctttcaccatgagaacaaactcagtatggtcaaccggttactgggcagggtcacgctgagacttcattttccagaagtaggaaatggacgatcgctgacgaacattcgggacgtgttgtttgattatcttggtgaaccgaccgtggaggatacggtactcgtcaactttccgaggtcactgaggatagcgtataagcagcatctctcgtccgaagcaaccatattgagaaggtatcatgatgtcgcgccaggagagatgccaaaggtggcttcgccacataagaacgtatcttgggagtcgacttgaaggtgagaagatatcttgcgagtcttgcgcgaatgaacaagattcagtgtctttagtgtctgatcgatatagtattctgacttggcgtgtttcagtgattctttaaaatgttctgatcatatcacctctgaccatctgaccaacaaggaaatttttgggcaataacaataagaattatcgagatgagtctattcggaccgattgaactatcatgtaataggcagaagtgccttccccatttttctgcccattcttactctatggttcactgggttctcaacctatatatctgatatcccttctttgcctcgagatgaccatctagtgagttcttcttgtcaaactcccatggaaagtgcattcatcaaactcgccatctctgttcctctatatccttggcacagtagattttgtgaactattttcaacatgatgtcccccagtgtatatataggaggagtattttcaaattagaaaaaggaatatcgtactttgcgtatagctagaagaatgatgaaagcgtcgacagatgatgtaccaaacatatgatcaggtatgtcatcgcgggtactgataaacactgagtttagctgcacatgacccgatcaaacacatcatctctgtctgttcatatctttgtctgttcacgtcttggtctgtggtctgtggactgcagagccttcaccgcgctgttcatcatgaccgacagccagtcaaaccgaccagaaggaatcccttgcaaagaagcagacatccatctcggcagcctgcaagacaaaaagaagtcggagtgacgaggacaagcgtccgggatgagcactgatcggtgctgctgatgtttgccactgctgctgaaactgccatgactgttgaggatgaggctggggcaggcacagactaaacacgtgaccggtggggtccgggtggtttctggtctgagggcacccaagccaaaaggattacgttgcggttactttctaaaatcgtaaccactagttagattgggtcccctccttcttcgtttattctctcccatctcttccattctattcattccttccgttgtgacattcccatcgaatacatcatccagagatgggtcaagaccataagtttagaggaaaccaatacaactcattgtactcgtatgttttcttttgattgctgttgatattttcgagtgatcgttgataggagagcaagatcctgacattcttgtctgtttatgtactctttctctatcgggattcacctattctgcctcttttctccttcattttgatcgcccatcgatcaacagagatgtcgtcgagcctaatccactcccatcaaacatccttaaggttactgaacttggagtgacgagtgcacctttgaagagtgcctcattcttcctcgctccttattgcaaagactatactggttcgccatctcatcttccgactatatccgctcaaacctcatgcggtgttgagccgaacttgataagctgatcaggtctaaattcttttaatactcgtgatacgatatttattctgattcctcacgtacgcttaaccctcgggatgcgattcttgtagaggactttatgctttgcaaggcagagaatcaagatcctgcttactgcttggcggagggtcggcgggtgacacggtgtgctaccgacttgtttgtcccttctctctcagtctcgactgccgagcagtagtcaaggccgctggataacgaagacgtaaactaagccttcccacccttcggtcttctgaaaacagtatcaacaagatgagagagaattgtgctcagttgtacgaggctcactggcaatgcttggagaggaacaaccaggtttgtcgcttggtaaacttcatctgaacttaacccatctgacattgtcaacgggcatctcaatcaggacttttatgcttgccgaaatcgagagcgaccgctaaatgcgtgtgtgtttgaaaagatcgtatgtgttcaattcttcactctgtatatttgtggagaggctcgtcattcttatatcataccaaaaagaaccattactgacaatctatattgtgtctgactttgattgttcgatcgatcaacactcctctggtattggccattggttacatcccgcattctgtgtcaaaatcaaattctctaccggttgtactctcgggaaatttttcaacccttgatcatcctgccttcaaaatcaatcttggttgaatctatctaaacaggacggtttgaagaaggaattgccaggggctactttacctccagtacatgaacgaacgaacgtgtacttcaaaccctcggagggttagatttcgactctttctccacttcctcattccttcccattattgcactcagaaagtcgatcggtgttgttgttattttatcttcgtcgcctgtagaaggagaaaggtcaagaagagggcggacaagtttttgtttcttcccccaaagatcaggtttaggatttaagaaccggagtttcgttgtatacgccatgttgttttatttttatctctcgtcatttctgagttttttttttgaggaaataagtcagaggagtagatgtatcgaaagcttcatgacaagaagcgacaatagaagagaggaggttcgagcaaaaaaattaaggtgtaatacatactaatcgaacaagtcgtgtgcgtgaggttgacaataaggagagatgacgatcatttaaagaaagaatacagaccagcatcgaggaaaaacaaatgagaatagggcagagaaatgagaagaaaatcatacagtgtacatcgtacaacgacagaatggagagctcgggtatccaaggtttaaagaacaggatccacaaaaatttgtggtttagatatgtcgtcaatgaattatgacgcttaagtatggtataaaaggcagcactaatacaatctatagggataacacaatcatagcgaaaaaaaagaaactcaacctccagttgcgtacccagttcgagtgatcctagttgtcctagagctccctgcttcgtaccgagttggtatcaccttcttcaatgacctattcgtcgattgtgcattctgaatcgaacgggggtttcgctcatgaaaactgagatgagacgatgagaatggtggctttcgatctaaagaacttctggagccatcgagtcctgtgcgggtagagggctgttcagtaggcgatgcgggtgagagtacgcgtgtacgtgtggaggcagaggatagatcaaggtcgactagtgttctctgagagtcgaatcgatcagaggattcaaacccaagctcaagctggtcgaaagaaggagctgttcgtgtaaatttcgatcggaagctcgtagatgcaggtatacgagttgagaatttcgaaccagcttttgaaactgacgggcgttgggtcaagagatgaggagtcttcagtggtgagcgtccaaagtagttttccttgttggattcggcgagaaaacatgagcgttcatcctctgcggtcattgtcggaggtgtatacatatgcttcaagagcttgtccgtattgacgacgccttccggtgagctgtcaaaccctgtccagtcaggtcgagaaccagccaaggtgttccatgcgctagctccctcttcccagacgtcgtcatgcccttttttatcagaccttctgatgggagaggtaaagagttcattgccgtagatcactcctcgttttgagtcgaacactccaaacgactctgacgataagacatgggatgatcggctagtcctgaccggttgaggagagcagtgagttttcgatttcaagattgacggagagggaacgtctcctgtcgaacgagaccgtgaaatagaaataattgtctgagacgaagcatgggaagaacctatgtgtagtggagaggctagcggttgggacgcaggacggggattgattcgactttcataggaggctgaaagaacagggattcgagtgtttggactggggatacactgaagagagttgttattggcagttgtgttgggcaatgctcgagatcgactgattcgggctggtgtccgtagagtgatgttcggggatggactgggagttgattgcatgcgcgatggctgaagaccataccattcaggacgagagtttagactattcaatctcggtgcgaaggattcagggtttacagagacaaaacagtcacctactatagcacaggctaaggtcttgacagagcctcctgccggatcaagtgtgtagtcagatcgttttgtgctcttgcaggaatgcatcgcgcgagagacgccagcagacatggttgatagaccacgcgtcgtttctgtcggcacaaacaacggtgaatgtgctcgaaggcgattaagctagaaggacaagtcaagcagtgacatttaagagtgatgtttgagcgcgatcagtgcacgcaagatatacgaagagatatacaggcaactcacctcgtcctctagccaattcttgcgcctgttgcattctcgttcggcggcggacatgtcatagagtgcctgttctagctcgcataccctttccgttaaattaaaattctcttcacagtgtttggacatctcattgagagattctgagagctgttttcaaattctttggtgttagcaagttcacagtgataataaacggcacgaggtatcacaaaccgttgtctgaagtgtcaataactgcgattctagactagcaattttggcctgggatggggtgcgtccgttttgctataattcatgttcccaatagtaaaggatcaacacataacgctgaacaatctacgtcacagagaaattgcacgaactggaaactctggaggcgctttgaggctcctgctgagcttctcaaggtcgggcattgatagaaagttcggcccggcagctaacggtacacgcgttcggtcagcgtcatcgaggtaaacagataacgttttactgcccttaaaacttgcatcgtgagggagcatttaaatagtttgggttgtgagatcaaaggtttgccagggtcgggaagaaagaagatcgagtacagctggaagggaaggataggatcaggggagatagatagagaagagagaacgatatgaatacagtcgagaatgcggaagagagaaagacgacgaaggcgacggagggaggaagagaaagaagaagaaggatatgaaacgaattcggaggaacagttcatttgttgggcagtcagacactcgtcacaggacattcacacaggacgtcttcaggcacatatacacacacgcggatggtccaatttcagggaattctcttcaccccaaggatctaaaagagaggtcaacaagaattttctaacaaccttatacaatgcgtgagctgcgtggcttctgtcagcgaggcagttagccaagtgtgttagtgccaatgtcacgagaggagaacatgcccagaatcgcaagtcagttggtccagttagatattctcgtaatgggaagcggtgagtctcggcggtagaagtttggacgaccgattatataatcatatgaatcctctcgtctcatctgacaactaaagctagtttcaacgaccatcttgtgtcaaagaattgacgctgaccatgcctctgacgttctttcttccccgtttgcatcttgagtccgaaagctaaccatgcagctgatattagatcaattcaggaacagaccaagtctggaacgctctagacattctcgccttgatgttattctgctcggatggttcctgggcattgagctgtcttgccctatattgccttgtctcacttggtattgccctgtctcgccctgatagaacgtgagcttcaacctccacctggaacatgctgcagatcttttctcgcgtgccttttttcccctgtcaactcacatgttcgtccatcaatcctgaaagttctgctccgtcctcctccggttgcctgtcgtctctcggtctttcttcttcttctttttctcttctcttcccaccacacccacactcacgaaaaacatgccaaacaagaccacacctgctcctctgacttctatgttttttgatatagatcccttcgataccagtggacagacctaccagaattattttcttgataacgatattccagtcagatctgttgacagccacgtccgatcggtgactgaaggcaggcttgaggccaagtcgacgatcaacaggcagacatccattcacagtttttcttcacacggctctaaagataaacaggtcgtattcgacaaatcagccaggactcaatcgacgaggactcaggtgagcgttctcctgatcttgcgtcaactatgtatttccgtgcctatctcattcgtcatcctcgctccacttagactctggcggattttcttcgatcgacaggaccagaagaagaaatttcgactgcgcctgtaaaaggtccaagcgcttcttccaagaacaatcctatctctcgcagacgaagcgtcttgacgcttggacgaaaactgggaagtatattttcgtcaaacgagggcaatagtgggttcggacaactatccacttcctccgaattgccacccgtaccctctatggacagcatccagccaagcgtcagaggggtacaaaaaattgttactgctagcgggtgagtctctcccttctcttaggtttggtatgtgtatgtgcgctcttcactctgattcacaaattgctctattctctgcactagaaataccgtgaacatcatatcttatcctcacaaatcgcgcagtcaacgcccatctacagctcctactgttagcctccgtcgttcctccacactagactttggaaacctctgcccagcacccacaaccccactccctcatctacctccttcgaaccatagacacatgtcgacagaattatcctctgatgtgcctgactctaagccttacgttccttcaacccgctcaagctatgaaacggatgaggaaagtcacccgagcccttcaaatatccctatacttggacccattgtctccactgatttgccacaaccgaagggcatagccaaacaaactacatttataagtaacgtctcttccgtcaaaagagatcggcttccttctatcccttcgtcggtattggcgccctcaggaagattgactgccgctcagctacaaagacatgccgactcggccatgtgggaatcgtctcgtgctcggtctcgctccggacgagctcaagaagagtttggtgcggagggcttccggtccggacgaacgcggaggtttactttaattggtactacgtcaaccattgacgatgctcgagatgccttgcttgctcaacgggcgttgaccatcagtctactcgatcaaggagccgaggacagtgaggaggatcagcatgctattgaaaggcaagaaatctcttgtaaagacgttgcctgtcaagcctcttttccttttgggcctcatcctatttccacacccccgagatggcttcactccgccgatagagcggaagaggacggaggtcagctgggcaaaagttcttctgtctctggacacaacttcgaaaaaccagatctggaacctcaaacgacgccactcggaaataaatctgcgagggaatctgatctctctcctaattcgagctgttcaacacagaccactgatgactctccgtctctgtcaacgcctgatcgtcagtcggacgcaacgacagttgcttcgttctccttctcgctatcaaggcaagaggatatgatgaccgcatctgcgtctcttgtcggatctagagggaagacaggatcggccttcagtggtgttggctctccgtcttccagaccggcaacgacctcttcaacggcatcgtttccagcttcatgggatgcaaacaaagagaacgaatgggaaacgccaattgaggcctggaaggagagctgctcagcagagagagaaaagagaaagaaggtggaggtgaagctgagacagatgcgacgggctgccgaagatcagcgagaacgatgggacgaaatggctggatgggcgcttgaggtattttcccgagatttcttttcttgtatcgtcttcttaacctcttagtgttttgccggataagcaactgaagaaagtaactggccgacgatactcgttgtttgcgacaataaaacaggtgattgaatcagccgaaggcaatcggatgatccttcgcgcagagaacgctcgattggctcgagagctagctctcctcaagatgagcaggcaaccgactgattcgattcctgcagagcagttataagagcacaggccagacgagtaattgaggattttacaagacctcaactgagacgcgacctctatccagaccttcgtcaacccttaaaaggtgatatcgtatatggatctgcactcaatctttctgtctttcttgcttatttttcccttttagtccaaatataggatccataacgatagctgctttctgacaaattatctcatgtccactcacgatgggcttctcgttctgcatggcgattctgattttttttagcttgtatcttcttaaaccgaatcaagatggcttaatgccatgtttttcttttgcattctaccatcattcatatgtgaaagcctttcgttgcctcagattgctagtatgcttcctctctgccttacttatgtgcgttaattttgcatacaaatcaatgattaattccctagcaaatccatcatctagtcttaatacctctttcgcagcggctatctatagtgcaagatggacgtttatgtattacgagcaacctgtgtctcttatgttcttcatatctctcgatagtcatgtgagaacgatttattgcgtcaacaggcgatgtagaatcgagtaaataaaagtgaatcagacaaaaagaaaacgaagtagacaggattcgaacctgcgcgcccagagggcacttcctggacttgctgatatagcagggaagcatcgtaaccacttgattactactccttcgatggacgagactgaggtaaaaacagtcataacgctttgtgttactctcaattcaagaaagaagaatattactgaaataaaagggtgaaaatggacttttcgttctggcacttgttcccaatcaagtcctcactggtttcccaaaccatatacacaccacccaggtgtttcattaaaatggattgggaaaccaggaaaacagaagggaaacccgctagaaaatttttcagctcttcggaaagagagccttgggactccgcgcaaatagaggcaggcagatgatgtctcaagaagagattacaaataacagatgaaattatgtcaagactgctgaaactccaacagtcctgtccgaaagaatgttgcaacacatatcatttgtcacagaaggtgttatttcatcgaaggagtagtaatcaagtggttacgatgcttccctgctatatcagcaagtccaggaagtgccctctgggcgcgcaggttcgaatcctgtctacttcgtcttttgctctaaattattctaatcatctcttcctttgttcctcttattcgcttcgtccatctatctcatgactgtcttgtgctcaaacagacacctcttttgctctactttttctttcgtcccgatcccgaaaggttctttcaatcgtaaaaaaattatcgattatgcttctctttccatcacagggtcgtgaacaaagagaacggggcctgaattggtgaaacttgagctgagtgcgccacgccagcccttctcgcgattcgttactccatagttccttctcttcccctggataaacaaatctcatggcgtcaaatatagcaggcacagtcgatcgtacaaattgaataccgagaagattttcttctctctccaccttttcttcatcttcaccccgtgcacctgttggactgatgacggttcggttaaccactaagcgagcctgtcacatgggttcaagccgtatatcaggccgggatcatttatccattggaagatctacaatacattcacaagagataaagagaatcaaaaggaaaggagaaaccttcatagagtcttgttcagtcgtctgagagttcttttctatagttgattaatttaaggagtatgtatacaaggattggttcaaaagagtaacggaaatgcaaagagtgaacatgaggaaggcttgatggacattttcctctataaacaccaagcattcgaccactcaacctgatcgtcctcccctgaagctatcgagtcacggtaaagcccggattcgacccaagcctttattctgccattcgtagcctcgtgaactaatcgggtttcaccttgtggcgtcaacggtgggcccggtgtctctccctcaccggattgatcctctaatgacagagccggtaagagatgatgagagagtttcgatatttctgtagggaccgctagtctgttttcgtgctcattcatccctgttgatcgatgagcatggccgataggtatcgaaaagtaaccgtccggcacttgggtttgagttgatgtcggttgagcgtagtattgtccactggcggcagcagcagtcgttgtcatcgactgaccatgaggaagagtagtcgctagaccggtgacctcgatcggatacgcttcgcgtccagcatggaggccgagcccgtacatttgttcagatgtcggagtgggatatgttgtcgacctaacattcgaggtccaggtcgaatcgataagagagtaatacggagattcgaatatcgggtagactaatccggtattgggcacgctggcgtgagtttgatcgtcctggaacaccgtagccgaacagagcgcacctcttcttcttcgttggtttgatttctcgtaagactggcgcgtcgaagacttctttcccgaaacaaaagacagagagagaaaagaaggttcggatcacacaaaagtgagtgatcccgaggacgaacagccctacaatctgaagaaactcggaaagaggacatacacagaatgtgaacgagttgtcatacaaatgaagtcgaggcgatattggtagagcaacatccgctcgatctctccgacgtcgaatcgacattgtagaggtctctatcggagaatccgggcgagagcatacatacgaaggagttgaagacttggccacgtttgcccttctttttgcttttcgttcccgagtagccacctttacttcaaacggtacggcctcgaatactgatgcaagaaggagtgtcaaggaatgttcagtcttaaaaagattgttctcggagaagagagcagaaacaacaagcctcaggactcactacagtcgccctttcctgcggtctcacaccttgtacaacgcccgttatttatgcttccggagcacttgaccttcctggaaaaagagtacgggagagaatgacaacgccaaggtgagaacccagataacacacattgcccggcgagcggaagatacttaccttgtgcgacagggcgtgcaggcctggttgactctggacatcgatacatgctctcctggcgaaaacaggctaggctgaaggtactgcccatagactgtggcggaggtcgagggtgtcgatgaagagcttaaatgaggagacaatgcaagaaaggaagacattcgtgtgtatgtgtatgtgtactgatggaatgaatcaaccagtcagatatgaacaaggatgaatcggacggtaggcctttagagacgacaattaaagaaatgaaaagactgtgcacaagtagtaattttcagaggtcgggagggaaggagggaagaaatgcaggggttcatgcgaggttgtcgccatcagtgattctgacgatgggttagctttatatggaattgagaagatagcccgggctgaaaatagtcaatttcttgttcggcccgctcatcatagattttggttagccagttgtaagcaaataaatgaattgacagggggaagtgagagtgagggtagagaggcaagagaaggcggacgcagaatagaaaaaaggacccgatcagagcagcgacaaaaggaaaggagaaagatagagaaaagggagaaaaagggacagggtgtatagaacaaatcagaaccgagggtcaagcgagcaattctggccagatagaaaccagggcaaatgctcttggatgtgagcagatgaacaggcaaacgactaggacagggtctaaagaacgatcaggtgaaataggcccttgaagcaagaggaatgtcaaagggcgatcagttaatggtcaaaagatttccccgtaaaacagcgcgaggccgcatcgatgttccagaaaaatgttgaaatttggcgcccttctttgttgatcgcttgggttaaagatttgaccgaataggcatcttttgagataaacaaatggcgctcgatagaaacattggcagtcgcgagaataaataaacgcccgcttttcatgcgtatcatacaatccacgtgtttctttgctcttttctcccttggttttttttcttgggttttctctcctctttcatattccgcttggaaagttctttcgtgaaagatcttggggaagaagtgaaaacctcacggatgaaaaagaaggacaaaaggagtgaaatgtgatcgaagtctagtccagcctattgctgccaatccatcccgctaaatgctctcctccgcggccaaattgagccaactcttcaatacacgagaggcaaatcctgcttccttgtttctttgtttcttcatcgaaatctggcatttgattccttcatctcctcataatagaggaagagatgagaaaagaaagacataacattattcttcccgcgatctctatcacccgaccgatccccgccttgaaacattctatcgatagttcactgcttcttgacttccttaattgccacgccacccctgtgtctatcacttggtaaagcccgcttgagtgccattgcacctacaaagaacgacaacgcagccaccgtcacggccaaaggcttctgaaggttggcctgaacaggcagagtgtacttgaccttcgttgcggtggcgagcgagatgacaagcgataaaagataccgtcaatcatttatacgtgtacaggtcaatcaaaaaatgcgtcactcacatagacaggtacagcacattgctcagtgcatctctccttgatgaccctcacggccggccggccgagggtatcaagataagtcgtatgcgtgtacttctcgggagctgtatcggtcgggaaagggagttcaaccgagatatccctagatgttacacgcgaagtattaaacgatagaacatgtcagttatcgaacaagctgataaatagaagcaaacgtcaaacaaggacccaccgagccccttcgggcagaatgacatcccactggatcgattcatactgaacaccctgcaacgcagtcaggaatccaaccccaagcacccactgcccatcaaccgtctttctgagactctcgctcaaactctggtcccatccaatggtaaagttgtagtcccaaccgcccatgatcggatatctcggccgcatctccaacacactttcctccttctcgtgaggcactggcagtcgggacgcagcccggatcttggtcgcatatctctcggaggaaactgaatgtctgaaatgagtggttgagacattaccgatggtgtcgtatacgtacggtacctggatcttcggaggtagccgcatcgtcagatcggaaagcacctgagcggggaacttccgctgagatttagatcgcatatagtctatacgggaaaagtgtcccttaagactgtttggaggagacgagaaagaatttcaatggggaagtccagcggaaagaatcagactagacatgcgcagcgacaatgatagactgactttggtccggtattcgatagagtgatcttatcttcgatgttcaaattatttccccaatgactgacctgatgagacagagtcacgaatataagttactttcccctccgcaatgactacactcggatacaacctgccaacctacctcaacagctctcttgagctccttaacgctgatcacaggatcattgaatcgatagtgaacctcgaatggagcaacactcaaagtcgaggtgagagctggcacagagtgatacggtccaagtgtgagcaccgcaccagactttgtgatcggattcgactgtgtgtacgctgtcggaggctcagagtaagacaaaatctgaggagtaggtgatctgtgggagaggttgaacagttcaattatcgttcttgagagttttgattccctgttgatgggttatattcctgtttatgctatcagtgataaaggagtccaaaatagcttacttaatcttaacccgtccaatctccatctcgtaagcactcaaaattccggcatcgcccttccagagaaggtactggtcctcgttctgagcaatcgtagcgggtttgggcgtgaccgaatcggtcagcacgaaggtggtggtaagagtgatcgatgaatcaatctgcaacgggattgggagagtgataatgtagctgtgagctctattcaagcaatagaaatcatccgaaagtgatacatggtcagtgaaggtcaaaaaaagtagcctgtcagaagaagcaacacacgccccagtcgatcataaaaagaggggaaaaggattactgacgatgacccttcaattttgcctccttttctccaagctagctcatctcccagctttcctgcctttttttctctagcttcgaaccatccagctcgcatatgttcatcatttccgacaataacctcgaactcggtcgctgttgactctccagggtcaagccggatgagctgtgcggtataggtagttgtttctgtagtgatgggcccttgtagatcaatcgttttgacaacggctgtgtttttgaatgtaggagccgcgaatgaaagcagaggagctagtatgaatagcaaggcggctgagggtcgaatcggaatcatcctagctctacttcccctggttgtggtgatggtatcagaggctcttagaatgaaagagagatgctgaagaaaccgctgtgagatgcaagatgtcggggagggaaaagttagggttataatacttgaaatatagatcatcgcattcattatctaagtgtcgcttgcctatggccacttctttctttttcccttggagttaatcgacaacgacctttcatcgactcatacacaacctcgtcagacactatgcaaggcagccttcctttcctctttcgtcgtttggcagtctctcctaccgtctctcctgtctataggaccgctctttctctttctcgtcgtccaatatcagtcacccgtttggcccctgcgttctggaatccatcggcaccttcctcaccttcaacttcctcatctgtgaagtctgtatttcaagaggaaaacccagcatcgacctcttctagtggactcctcgactcgctagagcaagagcttggtcaggagcaggatgctgagaagattttgcaaaacaagcgatcagtcgagttagagcagaaagagagtcaggccagagcggttggacagagcatgggagctaagcctgtgaattggaaaaagcagcttaagcgagagcagcgaacggaggttcccaaaactgtacgttagtctttggccagcttgctgctgaggttaactgtcaaacctttagtctgcccctccatccaaggaaatttcataccgacttaatcatcttgaaggtcaattatcaaaggctgatatccgaactcaatttcttgttctactgtttagttctctttctcgacagcggccttcaagatttctcctcgaaagcttggactgctggccaggcttatcagaaagcttcctgtcgattcggctattcttcaactgcagtattctgagaagaaggctgccctgcgactgaaatcgaccttgattcgaggcaagcaccacgcaaccgctctcggaatgaatccgggaaaactgaagcttcgttcgtcttgagtctgcttcttgtacatgagatttataatcttgttttgtgctgaaatgaaacgtttttggagggacttaaagaggctgtatcggttggcaagggcaaatatctcaagcgaatcatgatcatgggtcgaggtcgatttggagtagtcagttcgaggtagctttcactgggatctctggaacagaaagctaatctgcttcctgtatttggacatgatttcaaaatctgacagatgcatcacaaatccgccagaatgtacttcacactgacggagggccagaccgtagcggaacgtgtacgtatttcacatttcgtggtgcccgtgctccacacacaaggtttctgtatgcagaatgccaatctttcagagtttcgaattgacatcttgatctgaatctctattcgtaaccaacagcaagaggtctatcatgccaaagctcttgagaaaattcgaaaacagggccctcacgccaaaactaaaattcacacgcgaaaagtccctatggagtgggtcaagcagtcgcattggaggtggtaatatctcacagtaggatcaggaatgaatgaatggcggctgagaaggagttgaaggccgaaaggagaggatagatgggaaagataatatgcatctgaaacacactcgtccccaacctcctgattaaacatcttgtttgacatttgctcaaatgacttgatcacaaaggacataatgtcgtaaatgagaccaattctgactcatgttgggattttggccgtcttgagatggcttcagctgtgatctgccatgtttttcttcgaggcaacaccctcagatcttgcgccagaccccaagcatttctctccgtgcagtcaccagacctgctagctcctcccggttcttcttctttctcgatccatctcactgtgacacctggttggtgcgcatatggtttggcaagccaggtgggtctcttacctttggtctgttgtccgtggtcatatcacatcagtccattgtacgatgacacctgggtggtgtgcatatggggtctgggaagccagtggggactcggtcgggaacgagcgccagaacgaaagggtgccgttctcgcccgtcggctttactgtatggtcagtgtcctcgacgagagacagatgccagcgagattctggggctgcttgagacaggacaaacatcaaaggagtagtaatcaagtggttacgatgcttccctgctatatcagcaagtacaggaagtgccctctgggcgcgcaggttcgaatcctgtctacttcgtttttgaaactgattttttgaaatctccaacatcagctgaacaagaaaccgtgtaaataggattgtgtagtcttgaatcgaacaagtttcctgaaccgtttgttcagatgtgtgtttgttaggaggagaagagggtatcatttgttatgttttaccgcatgcggactcaagattggaataggtcattttccacagagtcgattccaaggagctttctctgcttcaatctttatcgtgttgagaagatatcttattttagtatatcacaatgattcatccagacattgatgttgtatttctgatatgtgaaagcatacgtaaacagagagatgcgaccgaagaataccggtttagacatactacggagccatcctatcttttggccgagacggttccacatccacctttatacgccacacaccatctatattcccatatgtcatccataaattctccttctccagatatacagcgtcaagcttcttcccgttcatctatctcttccataagaacaacatccgcccgagcccttcgtctgacgttgccagccccgagcacccttgccctaccgacggtgatctcggtctcagcttcatcagcatctggtcgtgggtcaccgtcattaatagttcctgcaacagaagatcaccaaacctcgtctttcttcatgagatcagcccttcaaaaggataacaatactattcaagcgaaacaggccgagctcgagagaaaccgagctagaggtaatggaaaacgcaagggcaaaggtagagacaggacctggatcacttcagaattcggaggagaaggaggaggggaagctggaatcttcttaggaaagaggaggttgatagagagccctctggaagaagtctcgactaaacaagatcaagatgaagctttggccatcgtctcaacatctgcaccaccaccatcgacaatcacgccgatattggtctcaccatcaattgcttcttctcccgacgccagccaggaaaccaaatcagaagtcggtcctacccagacgatatgttctcctaaagccgcctcagtgcctgcgagacaacacagctggtttccttggccttcctcctcacagaatgttccattatcagatcctgtttctgcctcgaaaggttcggatatgaccggcccaaaagcctcactgacttcatcgtcatcatcgtcatcacatctcgttccttcgacagaaccaaattcctctcaatcatctgttactgcccgaataagctcatccggtgcttctctaacaacggcagaatgtgttccgaccactgattcaacccagttggccattcaacaattatcgcccgaaacagcaaatagtcgtgcttggcttcactcatcccgtctgagccaacttcagattcccgccattttgagatctgtttctttgaagggcgatggtagccatattgacactgtgagctatggagagtccgctgataattcatcgggcgatgccgagactagtgttcctagtgagacaaatgtgaaggccaaccaggaggaggaaccaattctgttaacaactgaggcaaacgcttcaaaggggagatggatctggtcctataaaaatggatctggtatgtggtcacattcatccctaacctccgtatgtgcttgatttctgtgtctggacaacttctgatcttcattctgatcacacagcgcatcagcccagccttcctcccgatactcaggcttcggctgatctacctcaatcaccaaaagattcagatttcaagaccacagaagctgtagttccggaggacgtggatcaaaacagttcttcgcaagatgtttctttgcctgcatccgaagttaggtattctgaatggtggtcctatttgggatatggcccaaccagaagtacgcctgtaattgcgagaggagaagtcagtctgccggaaggtatgaccgaacaaccatcaggttagttgttgatatcttgatctccctgctgatatgtattataccgatcaagcaatcgattaaaaacatctacccgtcgttcactgtgtactcgtagttgagtaccctggagagattactaggactgatcagcaatcatctcgttctatcccgaactgtcttcctaaagcaccacctgatgtgttgacgtctgttgtcgttccaacgtcctcatacctcaaccctatctcttgggtttggccatcatctgctgctacacctgtacctgtgcccagatcgatgccagccataccctctggagacatcgccttaaatccgagctctgaaatacctgctcctgaaattcttcctcctacaccctccgcgcctcccgttacgacgagtctctctgttcccctaactctacaaactggtactacccctgtttctcttgctgctcctacttctgtgtcttactcctcttggcttagtactctcacacccgctcaattcagagccaaagagcctgttgtttcttcttcctcttcatctattttagatgggcagaaggttcctgatgtcataggaaaggaagatacactacctcctgtaacggctgaaacaccgcaggcattagctttattaagctcaaaaaggcacgttgaatctatcctaggcgaaccacaaaacatacgacagaaatcaagtttaagcctgttggctaccaagttacggctatctccttcaagtcccaatcttccttcttctattttttcttcgggtccgtcaatcgatactgcagggactaccactgcccatcccggagatctgtcttccgaacgtcctatctcctccgtacctacatcgcgtcgacagtccatgctcatctctctgccgccgccaaaccttgtactgcctacattttccgatatatttgatcatccgcctcgatcaacaccgcctcgtccccttttaagtcaacctgttcaggatcctacttcgaatactaacggtcgagtcaagaagagaacgatagcaaagaacgtaatatcatctcttacaacatatgtctatggaccaagaagcaccaatatgacaagagatgttgatacgaacaaaggggagcgtacgtcgacagagggactggacagccaatatttggaggatccagaatcaagaggactacccagaacgtgggttgtacagaaaggcttgaagggaggagacgagaagggcaaggcattaggaattcaatgtgtcaaaagagttgttgttataggtgtccatggatggtttcctaatgctattgttagatacgtatgttctccttcctcatatcaccatctatcaaacaggttgttccatctcagactaacctggatcaggatttttcttgatatatttgaatgtaacggtatgcatttgatagattgctggagagccaacagggacgtcagctacatttgcgaaaaagatggtcaacatggtcgaaaagtacttcggagaagggactttagaaaagatcacagctatgccactagaaggagaaggcaaggtagaacatcgagttgatcggttcgtttctcctgtcattccactgtcgaaagattctacaattaaactgatcatgtattgaaagatctttctgcattcaaccaatcggtttccttatgtctgttatcgcatagattgttcaaggaatacacatcgaatccggattgggttgatgatcttcgtagcgcagatgctatccttgtcgctactcactctcaaggtatgcttgaaatttgcgctctatcaccttgatgacttgtttcagcaacagtttttaactatgccctctgaatattcatcgataatcttgttgttctctatcgtcgaccatcaattgtaggttgtccggtgtccacataccttatcgagaggctctatgcccagggtcatatatgttctgcgttcaaccaactggctgtagaagagctcaagcggcagattggaccggcgaaggaagaacagcaaaacagaaaaatgccaaaggtattgatgctagggctttgtaagtttgaactttggtttacgatatttgttctttgaaaaacagctgtgcatagttgatactgttttcataacgattgcttaggcggagtccatctagggccactggcatacctgagctcaagctcggttgtgataccttatcttcagtactttgagaatgcagcggcacatcaactctttgagtcagttgcaaattatcttgttttggatgcaatactagtttctaacgaacttggctggttatcagattccaagataccgaaagcgcgacatcgaagtcgtatattcagtccctctcgaatattctggaccaaggatgcaagcttgtttacgttgcttctctaaacgatcagtcagtctttctctcttcctaaaacttggtatttcttgagttgtgtctgaatcttttcaaatgattgttatattcaaccggcgcaattagagttgtcccggtgtattctgcaatcttctcagttgctcatcatccaaacatccttagggttttacatattgatgcagtcgcttacgagtaagtcgtctgctcaatttgtaattcgggcaggctcttcttttctctttctgactagttgtacattttgtgtatggttttctaagtacttcggacttcgtcacaaagcttttgacattctgtctccagctgcataatgctggactatctgacggtgggctagtgacccaccttagcgaggccgttgcagccggtgagttatctagcttttgtcaagtactttcaaatgtatgctgctgcttatctcctatgtctggtcggggttgattcgcgtgcaatatgaaggcttgacggggattggtcattccactgcttacggagaagactcaacctatttgtatgcgtagtgtctctgccgactgacatgttggaattgtcttctagcctaacatctatgtctcgttgttttattatcttctgaaggttggccatcagatacttgtttgagactacctcaagccccgtttcagctggttctctggaagtcgacgagtttcttgctagcgaagaacgaaacagctacgagattccgtggattctgagaggaatcatggaagactcgtctgttctgcggtatttcggacgagaactggatgaactaagaagttctttcgacaggtccgtttcttctcttcttcctgtctgtcggctgatttgaacatgccactatatcaactcttgcgaaattgtacagttgggatcctaagacggctaagatgaaagatctccgacgcaaagtttgtcattgtcttaatcttcgcttctctattcttatcctttcgtaaagttaatcagtactcatatgcttttgtccaaatagcttgagcctctgcgtccacgtagatctcgacgagtgaacggacgggtcgaatcaattcctctgttagagtcgaacgtgcctacggcacctcccattccttctgcggttgagtcgactgattctctctcagtaggagtcgttcagagtaggtcgaaactttgagtctggcgacggcattttctcttcccttcgacttacaatatcgctgtcttggctgcccattcattctacgctgttcgatctctccatttctcttgtgtcttttcttcctaccttcagattctaccaaccctctcgtctctgtttctttgaaccaggattggtaatctatctttcatatactaacgacccaaatcggatcaccctgtcactttgcttctgaacaatttgtaccacccccattgtcctaatcatattatgatcgtgtatcacatttatgagttcattcacccagcccttgcccatatctttttccgttgcacttgtcttttctcatctctgtgcataataacgatctatatgctgggtcaacgctatcatgacgtatgtctcatgcctctaatccaaacatacgaagcaacttacaagggaatcaagaaacaagcagcttgggtcgacattccagtcaagtcgcttacggttacgattctttccaaaacaagcatggtcctgttagagagagaaaacgttacgactcatgaactcgagtaatggaaaggaactttttgaagggaaaaatcaacctatgagacaataatattgcaagcgagagcaaaaaaacaaacaaacaagaaagaaagaagacagagtggacgaagacccccttccatggacagccaatgttctgcgagaagaacaaaatgccagtttccaacgcctagtcctctactgcctgagcggctgttaatcgtcgtaacaagaaatattcaactcgagaaaagtgtaggcgtaggttgcgttgggcttaagcttgagcttggcagccagctgggcaaacagtgagacttgaacggtagccccgggcgtgtacggaaatgtgactgagataccatacttttctctttgtctgtggactgtggactgcatagccttcaccgcgctgttcatcatgaccgacagccagtcgaatcgaccagaagggtgcccgatcaaaggagatctccggccaccaaggaggcatccatctcgacagcctgtaagacaaaaagaagtcggagtgacgaggacaagcgtccgggatgagcactgatcggtgctgctgatgtttgccactgctgctgtcgctgccccatcgacgaaggcaagctgaacccgtgactcatgacccatgatccttggtggtttgacggtttgtggcccggggacacccaagtccaaaaaggccatgtattggccaccatcggttgaggctactttggtttgtaaccaaagccatactatgatttaaataggaagtaaaatgatatgtacggaggagcatagagtggaaagagcaagagagtgagaatgaatcttgagacctatcaaggataaggattgacaaacaaaaagccccaaaaaagagaataagacaaaagacccaaaagttgctacaaagtaaaacatagtaaagtgagaatttctcgagaaacaattttagagtgaaaataaatatcaaactcaaaagatgtacaaatgagagtggtagatgggataatgcattgacttccgtccaaagaagagacagaggaaagataaatgaatgacggaaaccctaaatcggattgattgtgttatagatcaacggcgactctcatccacctcagactctaactcagccaatgcctctgccagtcccatcggttttgtgctcttggcttcaggcggatatttgtctatcaaacgcttccgatggttcccattttctgatgctgaataattttttgagtctgaaagatgatccaacgatgatccccaacgggtcttcctctcatcgattgtcgcatccgaatttaaaacagagtcacctgatgagtctgacggagaaggtcgacaaggtcgtgtttcctcggctatttggttgtcacgaccgagttcctgtacggatagaacgaatgacggtcgctcttctaggacggaaactgcgctgaccataatgtcagagcctttctcgccagaagatggatgtggcgtgaacgatggtagcgatgatttttccgatgctcggctcttcgttcgatttgaaggggatgatgatgacgcgtcagagaacaccagtcgacgagcggttttccaaatatccggttgggtgccgaaaacaaggaaacatgtgactccgcaggcggattggtagactgctggaatatgagagtctggtttggcgtacagcatgatggccgatctggagtgtatatccaaggacgtaagaatcagaatgatagttttaaggacgattcttgacactgtaatgatgaaagggaaacctacatcagcgcgccgatcatagtcagactataagcgactacccggccgacgacaggcaagttgactgttgtggccgaatcggtagatcgaagagaccactccatctctctttctactgccgttttctttcctgccttgcgtctctgacggacaagaatgactacactccagactgatagatatataaaaacgggatctcgtaagtttggatgatagacacagacagaaaatgggtgcgaaataactgactatcaaagatgagagcaacgaataatgccaagcctgctacgatatgtgacgctgtcgcactacagacaaaagcataggttggctctgcgatcgacaacgaacaagcaggttatataaggagggaagcggcctcaccagatgttatcggaataacatgtcatcgtactcacataaaggagctctggacggatgagcagatactgagatgcacgattgtaagaaagcggatgaattgtcagcaagatgggaacagcgagttttcatcacaataaatgatgttgaattagaaatcagtcatttggagtcaaaataataacatcagaatgaaatagagcacaactccactcacagcaagattcgagagaaggatgagcgtgaaaaccatccatggtagccatcgcagctagtgtgtggtgcgcgactttgagcaatcaagacatcaatatagctggctcagagagagggaactaaccatgagctcaaaatacttatccatccatatcttcttcccactcgccctacgaagcatgccccaaaccatgaggactgtgaccatgacggctgtcgagatgagcgcagtacctgccatcgagcctgtcgaagacaacagacagagaaatctcgatggacattccggagaaaacgccctgttgtcacggcgatccaagacaaggcgtattgagtttaatatggagagtgagtctaacatttgaacaagagaaagctcgggttgaacatacatgagcaggtccatgactgaattaacgctcatggcaagaaacagctattcagaggccgaggaacagatacgaaacgaatgggagatcaagaaacaaatatcagaaccaaaacagcaaatgacagagaaacagaggatgaaaagattgaggtgatcgttggctgaatcaattgactgtttatttgttgaccttgtattctcttaggggttccaactagtcattcttcagatgatcagaacactcgggactcttctggtgttttacgaatttccttcgaacatttgatccctttctgatcatgaatgaaacaacaacgaaacagagacagagaaactcacattgagtaatacttgagaccgtctgatgcctgtgatcatgatgaaaaggaccaaaggcatgagagtactgatggtgaagatatgaaaaatcgcgaacgctgtcttcaacttctgatcgtaagacgacatctccggactcctgagtgtgggcaacgaccgggtcatcagtgaactcaaaccggttgagaaaatgtcgattggagccatgtgatgagtgagggcgtgcgtgagtgcgtgaaagtgtgagtacgttccgataagccaggattggcttgctctcctctagccagtctgtgaagaaaggagagggaggcgggaaagtgatgagcgagcggatggagaccggaaaagagaaagacgatgtttgatgtttgtcaagagggaaagagaatggaggaaacgagggacagaatcaaaagtagttcgtccgggacgatctgaatgaacggcaagaggaaagaaagaagtaaagcaaagcaaaacaaacaatattgcgatcagtgacttatcaacgtgggacggtgaaggttcatcctacagcacccattagcgagatcccaacggaagaagaaagagaacatgctctgcttccaatcattcagtgtgtaaatttcggctaaatggtttctttctattcccgaagtgtagactcacgccatccagaaaacgaacggtggctgtaaagtgttccccgcgtaaacgaaagaaaagcccaaacaaataaacaaattgaactcaaaatgagaacatgtatcgtagaaagtgcgagaggtgaagctggtcgaaaattcgtttgggtaacgtgttcttggtttcgactcttcagggactggaagacaggaaggcagagaatcgtgagtttcgcaggaggcttgctatcaggagtaaatcaccgtagcctcgaacctcgtcccaccgcttgaaatgtaaggtctggtcctctcgggctcatttactgatgagtgttttggatcacctctgtgtatcgggacgtgatctacaattgttccagaatcttggttatcccaagctgataagcatacgcgagtttgcgccatataggcctaaatcaaatagagttatgtgcaaatttcttcttcgggcgatctgtaaaaacttccgaggtcaaagtttgacgcgattcagatttttctcttgattcacaaagtcttacgatcttctcatgtttacttcttcttcctggacctctcttctcctgctttctgatttcttgttcaaagtcgtcgatagctgtttactgagtttctcacaatctcagtcatagatagcgtaagatttgaacttctcactcagcaatcatattcaaaagtaaggaagtatataaagtcaagaacagtctgttgattagtccatcaatctatcaatcagccaatttgttgaccaacccttcaagggtcactcgttctgaaatattcagcagacctgtagaagaaacaacaagtgaaagagtggaagtaaatcgtctgtcaaacattacggagagattagctgccctattgtgatttatctttgtacagcatagctgagacttgtatatcgaagtagtaagactcatacttgaaagagcaaatgcataaaaccctaaggaggaggaacgaaaaaaagaagtctagatgaagacaacgacacccaagcttatccagatagacatgccagagttagtggtgaattgactcgactactttgatgttcatgttgtgtgcctggtatcgtgagtactgataaatactacgtttagctgcacatgacccgatcaaacacatcatctctgtctgttcatatctttgtctgttcacgtcttggtctgtggtctgtggactgcagagccttcaccgcgctgttcatcatgaccgacagccagtcaaaccgaccagaaggaatcccttgcaaagaagcagacatccatctcggcagcctgcaagacaaaaagaagtcggagtgacgaggacaagcgtccgggatgagcactgatcggtgctgctgatgtttgccactgctgctgaaactgccatgactgttgaggatgaggttggggcaggcacagactaaacacgtgaccggtgggatccgggtggtttctggtctgagggcacccaagccaaaaggattacgttgcggttactttctagtaaccaaagccatatatttattctgtatagacacagtcgacaataatggggaagactcaggaaaggaccggtgttgggggagggagtcggacggtgcctcgttgtcatggtaactacctggcctatgttgctgcagcagctgatcagacgagctcgaccggatcatctgacaacagcgcattggcctctcagactaggcatggagcgatgcacggatcctgtgccctgacgatgcccgtccctataggccaagtcagatccagagcgatgtcagcccacgagaccgagactgtatataatcaaagtttccatctcttctccttcctgttcttttccatccggtcccatctcacgtccattacatcaatcgttcaaaactttcacacccactcaaccatcagcccattctcaggttcaaacatagacaaacatatacaagatgtctgacttcagccttcccgaacctacaaagtcccatctcgtccttgtaagattcaatctttctctctctgccgaaaaccatatggctgatagaaacggctttcaattcaggactttgtgttctctgacacagatgctacctatagaagaattcgagttccttcaaactactcgtttgaactaagtacgtaatttgcttcagcttcttgctcattttcgtctgcgcctcatcactcacgcccatctctattccggtcctaaaaccctcagtacacaagctcattcagtacacctttggctggtcagatatcaagccacacaagttcaccgcgctgggtcagattaaactcgtctcagcctcacccgaggtgaagcacgtacagaactggggctcacccaagatcaagatctctgcttctccctcttcccagaggtctgacgatgatgtcgcggaagaggacgagaaaacgtttacactgggtgacgtctggaaggaccacgagaaagtcggggcaaatgaaaagcttggagtcagctatgagtacgactacgaaggtatgtcctcaaagctcctatcctgctattgagtatctacgcaagataagcgcaggattgacgtcctccttggtcattttcacccatttatccgagatagaaggccgtatgcttgaaatcatctacaaacattaccagcatatgggggctgcatccaatctacctcatattatcaagggctctggaggtccacctcgtgaaaccatccagagccacgaggagtgtgatcagaaaacatttgacgtcgaagcgttcaacgccaactggcaaggttacctcggcgggaccatccagagcaaggctggtctcaaggaggtcgctctaggcaaggttcactagacaccgttttcaatatctggtctttttgttcttccttattgggtggtatcccttgccatctatgcgctttaaatagttctgcatcatttatgctgtttccaatttttcctttcttttttcttcttcttcttcttttctatatctttccaaacgaagtctctatttcttttcttcttgtatcggcaaccattgccccatcagaatgtattcctatcgcatgttcgtcttgagtctttctttccatagcagaaagaacagtataaaacatcgttttctaatcttgaagcagatgatcagagtatgatcttgacctgttcttcctcttggtcatccagtccaccaaccaagtcatcgtcaggtccaacaacttcccactctacccctcgccgttctttcctcacgcccttcaaaactcgttcaacctccaatgcaaacgaccggatcaattccatctcttcggatgtagtctttatccctggtcccgatcccagtctagtatctgctgacgagtgggattggaatcgaccattaccagttccacgtccgcctcgaccacgtgagatcctacctcggttaggccgtcctctctgatcaaaggcgtgtggggtagagttcaaagccaaattcgaggacgaggaaggagagagaaccgaaagaccgagcacttgctgaagaaaagctgaccttgtgaaggagtcagagctagcgcgtgaggatgagtgagaatgagcacgggaagaagaggacaatgaagaagaggggaggtcgttgatctgagaaagaagaggagcaaggagcgggtttgcaagtaattctctgatcttgggtgatgttgctgtttatgcagtcaatgtcgttcaaatcgagtgcgtcagttcaaagtcttcaaacagaacgtagttaggtgggcacagttagcaaacataccaatagccattaaatcctccctttggagtggtttcggtaaatcccggtccagcgggttccccgacccttcccattcattcccatcagaattaacaggccaattgagacttgagagaggccgaagaggaattggctcggacggaggttccggtaaggatgttgatgttatcggtaccggtagcggctttgggtcagaggttgaggtcggagttgaagtaggaagagaaacggaagagacaggtggagaagtttcggacggcggaggtaaatgagagcacgattcctctaccaaggccattccaatcttttttcagcccgaaaacaagtcatacccagagctccaatcatctaggatagaaagagagcacagaagaaacaaccaacgtagagtagaaaacgtctaacaacgagacgaacctttgtgttttttgaaacaaggaaccgaacaactatattttctcccacccattattggaacaaagaaagtcaactatggtcttctcttacattttcctctcttcaggtaatggatggatctcgttttatgtactgaacaatcacttgcaacagacaagagcgaaataaaactgactagacgacctgacatgtcgaacacttgtactttgatgcgttcgtcttgcaaatctgacaagctgcaggtttaggaaagaccattgtctgtgtagaaatcctaatagaggtagctcaagatagtgttttaccgggattcaaagaaagttgaatggattggtcgaatacaatgtaaaggagtgaggagatcacgagataatcaggaagagacgtcagagaatgcaaatatttcttatggcaattttttctcactttgtatcatgaatatctaatcagtctcaacttattgttcccgggcttttttgctccattatacctcattgttgatatcgatcttcctcctacatataaaattattgagcagaagggatagataatgatgatatgccttccctgattgaaattaaacagatgcatgggaccagaattatacaacaatatgcaaacgtagagattaagcccagaagagaataagattgaaagactagcaaagaattgaagcacttttgattgatcatcacgctgaaagggcacatatggaattaatccttcaacagagactgaacgatatgatttactcgaagatgccgaagatccgtgtacgtctgatagttaatggagatgatcaagaactaatcagatcggagatatacatgcctcttattcatatgaagacgaagaacttggacgtacctgaccacagccgacgaaaagaataggttgtccggtaacgtatgtcatagagagtgccgctcctactttatcgtcctaagaaaagcacagaagcaaagcccattggttgtcagtttgcccgttttctgcggaaggcgaaagaaagatctgatatccgatactcacgatagtatcaaacttggtcaaaatcatcccgtcaattcctcgttctttacctttccctccctttgcagagaactctttcaagctcctgtcgaacttgctgagctgatcgacagcctcatttccaaccagagcttcaccaacaaatatgatcttgtcgggtgaattgacagacacgagtttggaaagtgctcgcatcagaggctcgttatcttgcattcggccagcagtatcgatcaagacgacatcaaacgcatgctccttggctaggaagaggattcaagtgaaaagggcaattaaaccgaagcgataggttcagtgtcgcgtcagtaatgaagcaatgctatcaaacgtagcttaacgtaccgaacgagatggcctccttcgcaattgtcgcgctgtcctttccgtaacctttctcaaacagttcgactctacccttcttctcgccttccccaatctgctcgctcagccttccaaggttattgacatgcactcgcagttgctcaaccgctccacttcggaacgtgtcacacgcagcgatcagaacgttgagctcattttgaagaagccaaaagcaaacttttgacaagttcgttgacttccctacaccattcacaccgacaaacaccatcttgtatggttccgagttagaagacgtcgagttactgaaagcttcggcggcattggcagatgcgctatgttttcgtttaatttccaaaagaatatcggtggatgatttaggggtaagaatccgagtgattgattgggaaagagccgctcggacttctgatctgacacctatcagacatgtattcacatcagtttaaaaatgacggccacaatggatacaaagggaaatccaatgaagcccgacgacttactaccaaaacttcctaactttcgaccgatcaatgcgctctcaactccttcacataccctctcacaaaccccctttgccacattctttcccatcagatgtttctccatcacttccagcaccggttgaagatcttcttttgtcaaaactttcgttcctttcaacctagaaaaaaagctagatagagacttctggccaagtaaattcgaaccggaggtggccgagtctgatccgttgagggacatattggaggtagagccatttccagaagcagcagtagcagctgcagcagaaccttcagctagtgctcttgaaatcatatcgtcctcctcgtcgtctccttcgtcgaacgtgctatccaggtctttgacatcgtacaacccgtctcttttgattcctaacgccgtttgatcgactagtttagatatatctgctcgggatggctgagcaacagacgagccgtcgggtagagtggttgaggaaggaggaggagtggagaaatctagagcggccatgtcggctgaggtaatggcagagtcaccccatttacgcattaccttcgatgtagagctagacgtggccggccgacgaggagatgattcgctgattaatcaaacgaaagcgaaagtatataaatccagatcttcgtcagaaacatcattcagttctcagttgagaaagaaagacagctaagaggaagcaacaaacccggacgattttcctggacttgacgtcccagcatttgcccctgctttacccaaagctctctttccagccgaagctcccttcagcctgttttttagcgcctctacatttcttgcaatttcttcggtatcttcaccggttgatcctttttggggtgtagctggagccgaaggagctgagccacacacagacacacacggcaagggaaaagaaaatgaaagtgattcagttttgtagacacaacgaaggcaggaaattctacaaacaaagggacacaaagagaacatactgtccgcctgaacaagtatagcatcaccaccggctttggaatcatcagcaaccatattagccttcaccggcgttgctccagtcgatttgcgactgaagccctttggtctacctaccccaccaatctttttatctgctcctcctgatccaactttctcagacgcgccggcttttgcttcgactcgcctaacgagtttttcccaagtagattcccaacctgcgagctcggtctcaagcgcccattgggttggccctgttgatgctgtggtagtggctatcgtagaagaggaagaaggcgcagagagggaggcatggaaagattgaagaaacggaagatggagagagaggaagagcgttcggagggaatgaaggagctgaggaatgtatggtaagtggagaagccgatggtagctcacctgcaagcactcgcacatgaaaacgaagagcgctctatctcagtcgtctaaatatccttggagatgtacaggagaagaagaagacacgaacgacaaagatcaaccctaacgaattctctctcaaccattccattttccaaccagccatctcccagacgtttcctccatcttttttggagactcccggaccatagttcggcccggacggagcttgaaaaggcttcagagttcggccttcgacaagtacggtggagagaagactgttgatcggcgaaggagtggcagcagaagaagtagcaactcctgacgggacaggaaaagagggagagtatgacttttgaaagaggataactccacctttgagtgtcgagttcacatagaannnnnnnnnnaagaacatcatctgcttttctcttagtcctttccaacgtcgtcaagttctcaagttcgagagtgtatgggcgccgtcccattgatgttacaaaggctgggcgttcttcattgatgagcgtatgttagggttaacacgttgacgcgtcggatttgagcgcgtccggtcttttgttttccttctcatttgacaaggtcgatatttcttctatactctacgatcatactggcaacggcaacagcagcaataacaacgaacgacgagccatttacgttggtatcgaaagatctcaacaaagaggaaactatcttaagaagaacacatgcgaatcgaggaactcatcctcgaagggttcaaatcctacccagtccgaacaacgatcaatggatgggatccatcatttaatgtgagttctcaatttcaattgatgctgcagcttgcttcagcatacacttagtcttcgagcggcggttcgtttgattcttgtaggctatcactggactgaatggatcaggtcagtgctttttcatcatgatctctccgctcaggcgagtatttttcctcaaacattcgcctgacatagtttcacggatatataatcatcacaggcaagagtaatattctcgatgcgatatgtttcgtactagggattcagaacatgacgtccgtccgagcgtcaaatctgcttgacctagtctataaacgaggtcaagcaggaatcacgaaggcttcggtgaccatcgttttcgataactcggatagagcgacctcgcctgttgggttcgagaacttgaggcagatcactgttactagacaggttggtcattttgaacgcctatctttctctacccttcaccttatggaccttgttcttctttgaatctccttcatcaagtctcacttcctctcactttatttatcgcatatgctacagattgctgttggaggagcgacaaagtacctgttgaatggccacaagtcgactctacaatctttacaaaatttattccaatccgtccaactcaacatcaacaatccaaactttttgattatgcagggcaaaatcacaaaggtactcaatatgaaacctcaagagattttgggcatggtcgaagaggcagcaggcacaaggatgttcgaagaaagaaaagaaaaggcgctcaagacgatggcaaagaaggacaagaaggttgcagagatcaagtcggttcgtggattgcttctcgttcctattttttttaaaggtcaatttcgatcatagtgctgatgtttccgtctccttctgaacatgtttagctcttggaagaggagatcatgcccaagctggacggacttcggaaagaaaagcggtcgtacctcgagtatcagaagacaatgtctgaactagagcgacttcaacggcttgtgaaagctgttgaatggcagacggctagctcaaatgaggcaaaaattgacgtcgagctaaagaagactcaagtggttctgtgagtatctttcctcactcttccctgttcttatcttatttgcgctgttcgttgtagtgttctgaagctttgacaactgtccgaattataacataatgaaaccttatcagggatgagcggaagcagcttatcacctggattcaggataagcaggccaggatggagagggaagtagaagtcatcctcaagaagagagaaaaggttcgcgattcaatcttcattcatatatttcacagagtaatctagcctgatcttctccaaaacaaaatattaacaggaactcgccaaaggaggaaaactcgcaacgttgatcgaggctgccaaggcgctcggactagaagtcgaaaagctcagaacgcagatagagatcagtgagagtaatatcgttgaagaggagactcagctaagaaacgttcaacagaccatcaaagaggtattccctttcaaatctttgtctgcttagttttctcccttgtatcgttagattctgatgcgccagtcaaaatttatatgtccatcacttgtctccccttagattgaatccactcgaactgccaaactggacgcagccaccatatcctcctcgacctacgcctctctcaaatctgatcttcttacgcttgacgccaaggtcgaatccgacgaatcgcttctgcaatcccttcttaccggtctaacagcgtccaacaagaacactgacgaagcgacatcctctggtggatacatgggccaagttgctgaagccaaagctagactcgcgaccgccggtacagaggtcgaacaggcaaaagtcaggatcgagcatgcggagagagaggttaaggagaaagagccgagagcgaagaaagcgaaggtagaaggcgaaggtttggtcagagagttagacagagcgagagaagacatgaaaaagaagaagactatcttggaaggtctagagggcgatgaggaggcggagagagaactgatggagaagaagatggttgttggagacaaaatgaacgttttgctcgaggttcgtcgttttctttagccgagtttcatttatgtttgttgactgatctgctcccatgtgtcttccgctaaccttctcattcaaaacgaacagacacgagatcacctcaaatctcgattggcctccacgaatttcagctattcagatccttaccccaactttgaccgatcatctgttcaaggacttgtcgccaacttgatcgatcttcccacttcaagtttttcaagctctacagcactcgagatctgcgcaggaggaaagttgtacaatgtgatcgttgaagacgaaaaagtagcgagcgctctgttggcaaacaagaaaagtttacagaagagggtcacacttttgccgctaaacaaaatccagggtcagaatattccggccgatgtaagttcctcgttgcttcaaaattcctagccctctatatcacaggacagcggttctcaatatgttcccttcttttttccaaacccatggtcattactatagaaactccgcgcggctcagaatcttgctcccaacagaatcaagtctgctctcactctagttggatacccttccgaagtttccgccgcgatgtccttcgtctttggtggatccgtgatctgctctgataaagaagccgccaatttggcagccttccaggccaaactcaaagctattaccctcgaaggagatgtatacgatccatctggcacgttatctggtggagctgccccgaaaggagcaggtgtcctagttcaggtgatggaagtcaaggcagtagaagatgacttgaaaggattgaagagagaaatgctagtgattgagacagcattggggaaggtgaaggttggaatggaggcattcaggaaagcgaagagggagctagagatcaaggaacacgaagtcaagttgttggaggagcaggtcaatggaagtaatgcggctagggtatatccaacctctccttctactctcaacttggtactgccatgctcaacatattcttccttcctgttgacttgtcatttagatcgtcgctgaagtggcagagctcttggagcacatcattcaactaaaagagggcatcattgcttccaaggacaaggagaagcaagcgaaagcagatattaaaagactggagaaagagatgaacgatttcaagaataacaaagattctaagttagccgaactcagagtaagttccatctttgcatttcctctttttcttgtcaaaaggtacagtattcacaatcaccctccacttgggacttctttctcctatctatcacgttttgtcagacgtcgatcgtaaatcagaagaaagcaatcaccaaaagttctgcatcgatcaagcttgctcagaaaaagatgcaaaccgctcaactcgaactcggttcgtcttctatgtcttatgtcgacctatatcttacagtgtgcgcagtgatctcaactttgctgattttgattgtctgtgacagagcaagttgatcaggatattgagtccgccgagagtgaagtggaagaagtgaaagctaatctggaggagagccgtaaacaacttgcgaagttgaaaaaagacctcggaaaacttgaggtaagcatattccagcttgcttatcgcattgatagaaagttgttcaggccgaaaccaacgttttcttgttctttgcgcgaccatctaggaaaacttcaacgtggctgatacaaagttgaagtcagagcgagcggcgctcgcttcgtttgatgacgaattgtcctctcttgagcatgatatcaaggcaaagaagcaagagacggatgaggccaacttagacatcaagaagtacgagcatgagcttcagactcaaatggctgaacggacaaagtcgaagaacagagtagccgatcttgaaagacagtatccgtggattcttgaagagagtcggttagtactttcgctcaaaacgattgctatatttgtgaaaagccaagtgcattcatcgacaatgtaggactcattctccctcccgcttccatcataatgaaaaagattttttgggcagcctggaacggtatacaactttgacgggtttgacctggctaaatcaagaagtcgttgtgcagagcttgaggctcttcagaagggtatgcgcaaaaagataaaccgaaaagtgatggacatgattgacaggtccgttcgatttcatttctcctcacgcgttgtccaaattttgaccaaatgttagaaattctcgcttgtatattttgtctgtgcggacatagtgtcgagaagaaggaggccgagttgaaaagaatgatgagcacggtagtcaaagatcattctaagattgagggcacaatagccgaactcgaccgttacaagcgagctgctctggaaactacttggaagaaggtcaacgggtgagtagtttagtcatcatccttcggttcatagcgccatagaaaattcgaatgctttactatttcgactactgatcctttctttttctttcatgttactttcgatcagtgatttcggttcgatctttgccgaattgctaccaggaaattttgctaaacttcaggcaccagaaggtatggatatcaccgaggggctcgaggtcaagatccgattaggcaacgtttggaaggccagtttgaccgaattaagtggtggccaacggtgtgtctctctctatgttttgctgtaaatgtctttgagaattcaaacttatatcgccttctcttgcgtatgatctcagatcactgatcgccttgtcgttgataatgtcactcctgcaatttaaaccggcaccgatgtatattctggatgagattgatgccgcgctggatctatcccatacgcaacatatcggttcgcttttcagaaatcgatttaaaggatctcagtttatcgtcgtcagtttgaaggaagggctattcacaaatgctaacgttttattcaaagctaaggtaagtcgacaaatattattttgagctttttatgtttcatcgtcaagagattcagggctcatttaaaaaacgaactatatcgtttgacaaactgtttagttcgtggatggaacatctactgtagaagtgagtggctcctttgccgagtagtttggttccgtgtttttgttttgcagatctccccgactcatcaagaagaacatgatatgcttatcaactacttttcgctcttagcgcacaatctcgagatcgaccaaccaaaatcacattagacaacctgtcggcggaactaacaaccggaaaatcaccagaaccaacacgatggcgaacagcatggtagatgatgccgactctaccggtcttgaccaatctcgagaggacgataactctcaagggtcaccgagcataggcgttcgcagttcaagaagcttaattggacgttgatctggaacataaatttctttctctctttttattttcttcttatttttccaacccccttctcaatttggtaactttcttccatgggcatcctcattctgtcaaagacacgtcttatccctcgatttccatctcattgaccatataccaagatattcatttactctgtcattagtatattctcttgttcgatttcatagcttcgttatatcaaattcttatgatcctgacactgtgttttaacgccattcttgtttttgaatttcttgtgctgactggagtggagggaagtatttacattgaaacttaggaacacaacaattgagatgagaatcatattcattcaatctgaaggtcttccatcgaaggagtagtaatcaagtggttacgatgcttccctgctatatcagcaagtccaggaagtgccctctgggcgcgcaggttcgaatcctgtctacttcgttttctttttgtctgattcatttttgtttggaattatatgctcaacatctcgactgtgtttgaccccttttgataaccacgagcaacatatgtagctcatctatacagaagaacgctatctataccacttgtagatcaagaagcaattcaaaaaaaaagcgaaggattccacgatagaggtgaaacctcttgatagttccagacttcacataacacattgagttgagtagcaccatgttcttgacggatgggatgaacgactccgagatggacgccctcgagggtcgtcccgaaaggaaacacgatgagatcgaatgagatgcatctgaagcgctgaagagatggctgctgacgtaagcatcagaattcgttggttataaactattctgatcctgcagatcaacttctgtcgcgtacgcccatcgatatctgtccaaccatggccttttggaaaccagggacaacagcaccaggttagtgacttatagattagtagctgagctgaagaactatttgggataaattctgacttgagtgaaaaacaggtagcgtgatcgatcgtgagaccgaagcggagggaggatccgccttggtatcatcttccttgagcaagtatgccaacctaggactacaaggacaacgccagcgactgcctatctataaacatcgtgtgttttgttattccttttctccttggggtgatgaagaatttaacgggtacagaacaagagactaaatggacgcgcttggacaaacccatctatccggaatgtaggggacagattgctgtacttgatagaaaagtacccgatcgtcatcgtcgtgggtcagaccggctgtggaaagacgacacgtaagttgagttcttaaatcaatataactttgtcaaggtggtgcttacacgagacttagactcacttcacatatgatctgtattgttcaatcccaaaccttcagagcttccacaatacctatatgaggccggctgggcagccgaaggtcgcgtcattggatgtactcaacctcgaagagtggccgctacgagtgtagcaactcgtgtggcggaagaggttggatccgttttaggcgatgaggtttgtctttattctgaccatttgtctgaataatgctgggcaaatattgatgggtacttgatcatttaggtcggctattcgatccggtttgaagatctatcgcatcctgagcgaactaggatcaagtatctgacggacggaatgctatttagagagataatgatggatccactgctgtcaaaatatagtgttatcatggtgggattcccatttctctggtctcggatgttattttgcttgttaactaatcagaacaaatgtggtcctcctttgtcgtttcaaaacagatcgacgaagcccacgagaggggcgtgtacactgatttgttgctaggtgtcctcaaaaagtaaagttatgaaagaatattctcgtgtatcctgtctatcctgagacttatatgtgcctttctttctacctggaaatcctttcgtagaatccgtcggaagaggaaggaactcagaataatcatctcctctgcaactattgacgcgtaagtatttcttctcaaccccatatgtacttgctgttaaatatcgcttttgactgagtggatgtgtgatttatcattggctcaaaccgccccgctaccaatggtttatagagaagactttagagagtacttcaacacaaatgtggatggagctggaagagagaatgaaaacgagagtgtcagtacgtaattcagtctttcatctctccgcctttcaagcatctcgaaccctctactagcagtagcaggacacggaccgtctgacaataaatcttatccgggcttgttcacgcttggcttggtagtcatcagtttggagggccgaatgtatccggtcgaggtcgcctatttggacaagcctacttcaaactatgtcgagaccgccgtccaaacgatactagatatccatgctagtgtatgcagtttcagctactctgatacccatctccaataagattaacacactcaaattctgtttcctttgatttgcttcgtctcgtttttttgagctaccaggagccccaaggagatatccttgtatttttgacgggtagagaagagattgatacttgtttacaggagctggccgaccggatcccttcaatgccgaaatctcttcctggtctatatccgcttccacttcattctggattgacagcggatgagcagcagcaggcatttgaaccaccacctagaggtagcagaaaagttgtgatatcgacaaatatcgcagaagcgagtgtaacaatcgagggaatcaaatatgtggttgattctggatttgtcaaggtgagctgatgcgtccgaccgtgatctcctctggttcttttttgtattaccagattctcattctagaactatttcgtacccgtgcaccaaactagcttcggacgttcaatccgcgaacgggaatggacgtcctatctgtcgtgccatgttcgcttgcctctctgaatcaacgatctggtcgagcaggacgaacgtctcctggaaaatcctaccgactatttcccgtctccactcttacctccctctccaccagcacgtcacctgagatcactcgttcagatatctcactcttcatcctccagttaaaggcgctcggaatcgagaacgtcgtcagaggatttgactactttaccgccccatcgagcgagatgatgaggcgtgctttggagtttttggttgggttaaaagcgttggacgatcgaggaagattaactttgaattcaggtatgaagatggcggagatgccagtggacccgatgatggcagcgatggtgagtacaagagacgtatcttcgaaagtctctgttatatgctctttgttagctgacgagagatcgggtgctttgtgtgtcagcttttgaattctgcagagttcagatgcgaagaagaagcgttgacgatagcggctatgacttctgtccaggtatataactttcctttcgtgctcatatatcatttcatcctatgataggccagttgctaaaacagtcccttcttctatattcctcccgatcagaacgtctttatcactggggaagggcaggcaggagccttagccgacattgaaaaacggaagttcaccgctgaggaaggggtaaagttgattcttttcatgtttagcgagtttgaagacgatcgttgctattatataactgactcttgtatttgtatctgtgtttgtatatgaatgataggaccacttgactttgctaaacggtttgttcttccttcgtgttggttcatctttttcaacatgactcgattactgaaatatctcatcttcttatcttagtctacaacggtttcactaaatacggttcatcctcttccaaatggtgttcttctcatcgactaaatttcaaagcgctctctagagcagtctccatccgaactcaactgaagaagtacttgagcagattcggtacacaaggaaaaaagatcgagagctgtgaaggagaccacaaacgacttcgacgctgtctaggtacgttttccttctcttctgagttttgtcagaactcatagtaaacccttatcgagaaacagagatttgacttactttgagagacaatgttctttgggattcacttagtgactggttactttaagaatgcagcaagatgggtcgagagtgaagggacatatagaagtgttcgcgaaggcgctgtgagttttccttgttttcttacctctttgaaacgaaatcacaaagacacatgttgcgcccaaacactaatgggtatctgtcaaatcgggaatgaaataaaaaaattaggtcctccatccacacccatcttcggtactattcacaagatcccctacatcaggttgggttgtctaccatgaagttgtacagaccacaaagaatttcatgagggatatcacggtgatcgagaaggactggttaacagagttagcgtacgttctatttcttttgtgattggtccctcattttatgtctttgtgtgtgtttattgacgttgatgctgtgcttgatgtctggttctgtgtgagatagtcctcatttctacgagatcaaagagcgaccgagaatatagagatacaaaagaaatagatatgtgcattcagatatcagaaaaggggtgggtgctaaatgttcggaaaatcgtgctccgcgaatcagattcggaaaggacaaaatgaaaaggagaagcatacagtagacaccaggtgttgactgatccagatggaacaagataagaaagagaacaagatatgaaagattaccgagcattcctaaatggattattgcttcccatagccggcttgcctgtcgtacttgtatccggtccatcccatcctatgccaaatccagagatcagagcagaagcagacgagacgtccgttcgaccgaacgtgatcgatagatcttcccgcccaccttcattcttctcgttaatcatccactcggttctttttggatttgactcggtcgagatataatgacctgagcgggtaggagaccgagcaagatgtttgaaagaacggagagagttcaatactggtttgacatttttgaccgagcgatcatcgtcagggctccaaccacattcgctgtcatccccttcgatgaactttgatgtactcgtcgctgctgacactgtctttgattttgtcggcgacgggccgaatggttttcgagggatgattttaagtccaggcgttgggcggtgagaagcggaaggtattgtttgattagataacgcgcctttggtcggagcatggggagggggaagatgatccctaaaaagcgcaggtataggcggtgcgatatttgacctattattgaacttgagagtcgatgtcatcgctgatttgggcatcggcatcggttcgagctgacggaggtataggtctatgaagtctgatactctgtaagcaggcgaatatgtagccaccccctcatcttcaactgttctatcttcaaggtctgttcccctcagatttcgtgtctttgcaagaattttagaatctacgatgcatcgcggctcggaagagtagggacgagatgattcggtagacgtatatcgtggttccggtcggtcagactcgaaagtataccgggaagtgagcgaacctcgaggtgattcaatagtatgatcagacgaagtgggcgatgatgaagcaatgataaaccttgcatcggttggagagtccggaaagtacctcgaatcgttcctagacaagccctgtgattggcgatcgccattgctcgtctgagaagaagaaatatgggagagaaagatagtatctgtaggcaaaggtgtatagggtggtggatgattcctcctgccctgcttcttgaaaccaacctggtttctccatcctgtttctagtcgaagcggcttcaaatattttgcagttgttcctttcttggaccgttttctttcttcgggacgttgatcctgatcggcccatcggtcctccatcgtctgtctcgctcggcgcatgactctcaagacgttctctacacccagtttcctcttttgtttatccacttggacgtcatctagcccttccgcaaatatgagggtcgcctgcttcgtcttccgtcgttctcttctgacgtataaccagatagagagaaggatgatcgatagacaggcgaggaggattggaagactgattgatagaattttacgcttggtggatactccagaggtattggttgagagatcggataggcagatatgcagaaaagggacgagactcgtcggacaagtagagttgatacatttaccagaagagacgatgttggtcgccaacgagcaggagagacattgggagcttgatgggccgaggcaacttccacaagacgctgttatgaagtgccgttgagtgtgttatccgtaagatgatataatagaaggagcaggaatgaactcactgtcgcaggactcgcaactattgagagttgagttgaaataggccgcttggtcacaaacgacaagacatctcccatctttcaagactggcctatcagtcggacatgctgtgcactgattgactgcctgcaaagcacgaaaaacaagaacgtttcgacgctgattagatccggaggttgacaaagaatgagacgaagggaacgaagagaaagagtcataagtcacccaccgaaccagaacaacttgcgcaatctccatggcaattcgagcaaacctcgttggaaagaaacgttgcggctggacacgatgtcacagtacacgaaccgttgtaggcgactttactagagtttgatgggcaggtcagacagtacgaagatgaatattgacatgtcccacatgatgtatcgcaagctatcccgcgagaagagatgagtatagattcgccacaagaagaaacatgtcaacaacgttccttaatgagagccaaaagaagcggatagaagagggcagaaagagaccagatgtaccagagcaggtcacgttggcgcccacttcgttggtgaactctccattcggacagctttctacacacttcccctcgacggacagagcccatccggaaatacaacctgtctcaactagttgagatctcacagatgtagatgcattgtatccggggatagcgcagctcaacgatttggacggacatgcttcaagagcggacagaaaataaccagtctcagtcagctacatcatcactatgtcttctcctattctcattctcctctccatcgacagataggacgataaatactcacagtcgcactcttccttactagaatcatagtagaagcttcctttgacgatcggactatctgtatcttgacatatacccgtggtctcatccacggagacacaagtcgaccgaagcagcttttttgaacctgggcaagccaagcaagagttttgatctgccgcaaagcatccatcgcagagtggggagcatctacatggaacgcaagtcggaacagggtgtcaagcggaggtttagaaattgttgggaaggacattgagataggtcattcactcacggttcacacaactttgaggaagtactccagtagttatttccttcacaaactgaacccttcccactcggtccgctggccctgacacactcccccaactcaatctcccatccgtccacacaagctgtcgccacacttggagacttgcagctaagtgaatttttcggacaggctacacattgatcactagagaggatgaatccggctgcgcaagtcgagcattgtagatttgtgagattataagttggagcggaagacgtgataatgggcgaagtccagccggcggaacatctgcaactggatgagagagaggagccttggcattcgccattcaggcagtagcaagctgttaaatcatcatatcagaaactagtttctacaaggagccaaaatgggtaggaatgaacacgatgttggacaaggaagagacgaactagtggtggagttcacggtcgaggcaacgcaattccctgtaccgttgagtccgtcggagcaaactccggatgtacaagacccggcacagtcttggcaatctttcccaaagtatccaggggagcatagatcacaaagtgatcctgtgaacccgagtcgacatacgcaagccgaattctcgccggctggagacagagagacgcaagagcctccggaagaacaggttatgttgcaagcagctttggaacaacaagaaaagatcgatcttgatctggtcagcgactgcctgattgaccgaagggttgacgagtataacataccagactggatgtcgagcacttcgacggatacagtttctgatttgtctgtggctcttgtgagaggaagttgtttgacatgaccgacagaatcccaactgacaatctcttggttgtttactttcaacttggcccacacgttgttacccagtacccaactgcccactcttaccgtctgattttgctcgatagtagcacctgtctgaaacaactgagtattgcccgtgccaatcgaggaactatagaagagtacgccttgagttggaaagagtctaagcgagaagggcgagactctggtggagacagtatagttttgaaaggccgttatgttgtaaagaggcgcgaggatgggaagatcggacgagctgactggtatggtagaattgttcagcagtccttcaggtagagaaatggtgtaagtcccaggcaggagcaggacgtctgtttctggcaagtgagctccgagtgcaagctgtttatacacgttggaagagacattcgagcaggatgtgggcgagcaaatggtgtaggtcgattcggccgaggcttatgacgattatgggtgtgtgtgatgagagaacgaggttgtcaacagcttaacgaggtaagatgagagaggggaattgacctacctgctaagatggtcagtgcaacgacggccgaccggaaagcgagacgcatatcgatggaagacgcgacagacgggtatgtacgagggttggtcaattttcagctttgctggctagtgatatcttgagagtgcgtgagaagaggtcagtgctagtgatatggttagtgcccaaagactggagttgaataaggaaagatgatgggaaggaaggaagaaataaagagaaaagaagagaggaagagaaaacatgatcaaagggaacgttgttcagatgtatatgtcagtttcacttcgtgctggtcagcgcacacgtgtaggtattgtgtgttgcatgttaggtgtgcgattagcatgtctggtcaagagtcagtccgaatcgaacaaacgaggcaggcaagaacgatgagagatgagagaaagagaatgagatgaaaggatttctgtcgagacaaaagaacggacatacgatgacaaaaggggagccggctgaaacaaagggggatttgcccatgtatgagtccaaatggacccggaccggcccaaatccgctttcccaagttttcccaactgcccccaagtgtccccggggaaagctgaccagataccccacatcggatcgagaatgttccaccggtctgcccagcaaatcacacgtcatccctgccgcggagattaaccaaacaacggctaatcgcggggtccccgccggtacctgaccggattgacgagccgaacgattcatctagtatcaagtatcactgtgttaagtcatattaagcccacataagcgtatctgatttcctcatcgcctacctcgactgccctgtacgggccgtgatgggccaatcgatgggaaagatgagcgaacgatttgccccagaaaagtgaagaaaaaggggaaaaaaccccaaaaacggtctgtccccgcgaagtttccacactttttttttctgtcatttttctcttgccacctcgtccctttttttttctttcttctttcaccagtttctgtgttgtcatcatcatccattcgctttcctcttcttcttcctcttcatactttataaaggaaaaggttagttctgcgttcggaatcccgctctttcctctctccatcatcaccaatacaccacccgaacagcatctgatatcttttctttttttctttttttcttctttactgtttccatctctacccactgtatctcttcgttcttcccgctgttttcttcgcgcatctcaaaactccatctcttgaaaaaagactcaagctcaacccaacactacacctaccacttagttttataaatcatcatgtccttcactaaagaagacgaggtcgctgttgccaccatccgaacccttgccgccgatgtcgtcgccaaagccaactctggacaccctgggttagttcatcaacgattttttttctccagcctttcttttattggtatagttctatctcactaataccttgctccattcgactttgaacgaattttttacagagctcccatgggaatggcccctgttgcccacgttctctggaccaagtaagtgcttttgttctcgctttccaaccgagacagtatgctaggatgaagcgaagagagggaagaaatattaaagaattgagattcatgcatgtgtctgtcggaggaatatgccaattcagaccatgaactgacctgaccgatcttactcaatttctaggttcctcaaggctaaccccaagaactccaagtggatcaaccgagaccgatttgtcctttccaacggacacgcctgtgccctgcaatacatcatgctccacctcgctggttacgacctcagcttggatgacctcaagtctttccgacagctcggatccaagacccctggtcaccccgaggttcacgtcactgacggtatcgaggtcaccaccggtcctctcggacagggtatcgccaacgccgttggtctcgccatcgcccaggcccaccttggagccacttacaacaaggagaacttcaacttgattgacaactacacctacggtatgtgtcactcttcttttctgtcttggccatagcgcagatacttactcgtcctctttcatccatcttcacagccttcctcggagacggttgcttgcaggagggagtcgcctctgaggcctgctcccttgccggtcaccttcagctcaagaacttgatcgccatttacgacgataaccacatcactatcgatggggataccaacgtctccttcaccgagaacgttgagcagcgattccagtcttacggatggaacaccctccgagtctccaacggtgactctgatttggattccatctccaaggctatcgagcaggctaagacttccgacaagcccacccttatcaagctcaccaccatcattggtttcggatccaagctccagggaactcacggtgtccatggagctcctttgaaggctgacgatatcgccgccgtcaagtctaagttcggattcaaccctgaggagtcctttgccgttccccagactaccaccgatctctacgccaagcgagccgaggttggagctaaggccaacgccgagtgggacgcccttttcgcttcctacaaggagaagtacccccaggagggagccgagttcgctcgacgaatcgctggtgagctccctgagggttgggagaaggcccttcctgtctacaaggccggtgattccgctgttggatcccgaaagtactccgagatcgtcctcgaggctctcgcccctgttcttcccgagcttgtcggtggttctgccgatttgaccggttccaacttcactcgatggcagaaggccattgacttccagccccctgctactaagttgggagactactctggtcgatacatccgatacggtgtccgagagcacgctatgggagccatcttcaacggtctccatgcctacggagccatccttcctttcggaggaaccttcctcaactttgtctcttacgccgccggtgccgtccgactctccgccctttcccaccaccaggtcatctgggtcgccactcacgattccattggtctcggagaggacggacctacccaccagccggtcgagaccgttgcttggcttcgagctacccccaacgttgccgtctggcgacctgctgacggaaacgagacctctgccgcctactttgtcgccatccaggccaagtccactccttccgtcctctgcctttcccgacagaaccttccccagttggagaactcgaccattgccaacgcctccaagggaggttacgtcgtccacgacgaggagaacgctgatatcaccatcgtttccaccggatccgaggtcgccatcgctgtcgaggccgccgagaagctcgctcagtctggtgtcaaggcccgagttgtctcgcttccttgcttcagcgtgttcgaggctcagcccgctgactacaagctcaaggttcttccttccggagctcctgtgatgtccgtcgaggcttactccaccttcggttggtcccagtactcccacgagcacttcggtctttccggtttcggagcctccggaccctacaagcaggtctacgaccactttgagctcaacggagagggtgtcgcctcccgagcccagaaggtcattgacttctacaagaagaagggaggacctgtcgtctcccctcttatctctgctttctctggtgtttccgagaactagatgtctttcttaatatattctctttctacatacaatcggttctctttccatgtcttccactcttgatttcttgtcgatcgccaggcttctttctgggatctttactgtacagatgaaacatgtttccttaacgctctgagttataaaagtcacgtgaacgcgtctcggtcctgttcgtcgtcggcctcctccgatcactcacttcctccgtctcatcttgcctccggatccgctccaccttgaccgctgcctttttttcccttctacttcttccatccgacattcatctgcaaaacaaattgtcaagttacggcagcaggagaaatacagtgatgtcaaacacacaatcgcaaggtccatatgtatgttgagttgatctttacggggctcaagatccgttttggccaaaccaactagattctgattatgctttccgttgttgcgtgtcccatcagttcattgggttcgacgtaaggcctcttgattttgccttcatcttgcttcttaaacaaaacacatcttttaattaagcgtctcgttctcgtattctatcctgtctacaccgttcgtcttttggttaactggacacatcgttcactgtaggtcggcaccggatccgccagagctgctttgttggatacatccggaaaactcttgtttgttctttcttggtatctttgccgaggtaatatgcttgatactccaagatcttgtcactgacccaaggaattcgccttctggtttcctggatgatctaccaaacagagctgagtccacccatcagactatcacattcagagatccaaaagaccacacaatctttgagcaatctctgacggatatctgggatgccatccgaaaatcctctctcgctgtcctcgaatccagcggtgtatccaaatcggatatcagaggagtcggcttcgatgcgacgtgtagtctggccgttaccgatctcgagggaaagccagtagaggtctcgaagggcgagaatttggggttggcattagaccatggaaatcgaatcggagaggatagatcgatgatcctctgggctggttagttccatctcgtctatagtccgtttgcattccttctaacttacggtctccgcctcgggttactatgtgatagatcacagagcagaagaagaggcaaagttgatcaattcgaccggacatgtcgtcttggactacgtaggtggtaccatgagtgtacgtatcttcatccatcgcaactttcaaagcctttctgtctcttggtcggacttttcaaaatagaggcgccctaagcgtatttgatgtcggcgctcagatgttctcgtagaaggaaactttcatctccatctctcattctaccctgtcctgttttgctttgatccagtctcggggaagggcttacatgaagcatatggagtatccgactggctggaagttggggttgaacgatgatgtgagctttcactcacatcagatcacagtgttggggatcagatcagatgctctgggatcagtttatctctcgcagcgatcatctgctgtgtagacttaagaactgaacgctcaataattttggtttctcttttgcgctggcccggcttgggatgcatagctcgaaatggagattccaaagacgctttggttgaagaaacatatgaaagcagatcggttcaagaactgccagttctttgatcttcctgattatcgtacgtactgttctcatgcgccaatcttatgggtatcatttgagaggttgtagcttgacggctcttttgttccatctttcagtaacctaccgaagtaccggttctttagctcggtcgtcaaactcgctagtctccaagttctcatacatcccgccagatgcttccgagtccgccccttcctcgaaaggacctcatccaaagtcagatggctggaatgaagagttcctcagaaacattgggctggaaagcgtggtcgaacgagggctcgggcagatcggaggaaaaaccggcgagagtctcgatgtcaaaggtgatggaagcgacaacggggaaagcttggtactcactgtcagtgtccatcttgaaaccttttcaatgataattttacctttcgtatcactggcattggcttagtggattttttttgtctcttttctaatgaataggctggtcttccagtgggtaaaggactggataagcgggccgccgaagagctagggttgctcgagggtacggcggttgggtctggagtcatcgatgcttgtatgtttgaacaactcgtcttattctcctctttgtgaatcatactgatcccgctgatcttcgtaatctcattcagacgctggctgggtgggaactatcgcggctcgatcaacggacatgcatgattctaatccagacgtgactctccagaatatggctccgccgaacctcgttgattctaccatgagattggctgcagtagcagggacaagtacttgttatatcgttcaggtatgtgtctgattctgtctcgtctgatctatctgaacaaaaaattaagtctgaactccctaatctatacagagtccagaaggtgtctttgtggacggagtatggggaccctacaaaaacgctatgtacgttagtctttatgtctttatgtcttttcttcaaatttactaacagcgtttatatctgattttttctagtttccctggatattggatgaacgaaggtggtcaatcttcgactggtgagcttatccttcaagaactcacacacatctatcggcgcgctcgaattatactcatcagctgtcatcttctccttttgtctcactaaacttgcaggtcaactcatcgattttatgatcaccacacacccagcctaccctcagcttctccaggtcgcgaaagaccaaggaacgaacatccatgaggtccttggagacaagctagaagaactaagagtcgagcggggagtgaagacacttactcatctgacgaaagatcttcacttggtgagcctttcttttattggattatgtcgtgatcgatatcctatactcaagtgcggggagaggtgccactgacgaagcaatgagtaacggttgacaatccatcagtatcctgatcttcatgggaacaggtcgcctctggcggacaaccgaatggtacgcgcatttcgcttctccatcgttcatcataaacatgactctatgatgctgaatatttcttgggtttgaacatttagaggggaagcatcgttggtctggcactcgacagtacgctaggagatctcgccttgaagttcaacgttacgctcgaggtaaacaccgtctatttcgtctcgtcgcgtgagccctccctatatgactgatcgctaacacgccttgattgatcataggcaatcgctcttcaaactcgacatattttagaggaaatgaactcgaaggggcataagattgatagtatctacatgagtggtgggtttcaatatatttagctcatcgttatcaactctgccaacaaccaaactcaacttatgttttcatgcttttggtacccattctctaatgaaacaataggtggtcaagtcaagaacaaacgattgatgtccctcctttcatccgtctgtaggatacctgtcatcctcccaccttcatcttcagcggcagtggtctccggctcggcgatgctcggtcgatttgcggctgaagttagtgaaaagttgggtcaagagccgatcagctcaatggagatggccaagaaggctggaaagggtatgaacgaacgactttgggagatcatggttcgtttttcacacctctccttcccgtctgtcctctccacttcctcacaaggatagtgcgttggtcgtatattcctctcacatttatgtaactccaatccttcaaggtggaaatgaccccacctggggctcgagtcgaacccgaggccgagaaggacgagatggcgctcttggatgtcaagtatgaaatcttcagggagagcatcgatatccagaagaaatggtctgttcttctactctgtatttcactcacttccttcttcctcttttcttcttctcttcatttgcgccccgtcttactgatttctccaaacactcccttctctctgtattttaccaacacaggcgcaagatgatagccgatgtaaccgaggcttagtggttcaagaagtttcccctctggctggattcaagtttcttcccattcattctattctttcatgtaacatttgtgtagatacggaccctgcaggaacttattaaacagcacgatatttcttcttgttagcgcataaatgatgtcttgagagttacagtcaatgtatagcgggatcaatgctaattgagagaagatctcatgaaaccaggtagccctcttctatactatttccctttgttccaatggcagatacggtggattatacgatacgggatatcgtccgaataagtatgtgtgagaaacaaaccaagcagaaaagagttacaatgatacgaaaggcaaagaaggagatcaagaggtaatgcgacgtaaaagagaggagatgttaagcaagaagagaaagggtctactctaatcctaggcaaatgaccctcacgaagtattcatgcaatctctcatccccctttccttcttcaaataatccaactccatcaattgtccctccactggttacatcctggttcatactcaattctggatggaacgaacaagccatcttctgaccttgtctgagcgcaacgacgttagattctgggtatgcagaagacgggatgaacggtagagtcgcgagaatttcgacaggcgctgacgtcgtcgtcgtaagaggttgatcaaaaggactgaaggacgaggcctgtgaggtagggattggaatagatgtcgatgcaggtggagtggaaggagtagctgggctggtttgggtggacaagaccatcttagagggtaattaaaatcagcattaagcaaggctacataagaaaagaagagaaagttgagataaaaaagaactgactggagctcgaatgaatactccgcaaaatggaatctctgggttcttcaagcttttcgaggcaaggactaagttggactcgaatgactcaagctagaagaagtgcgtttgattttaaaatggtctcgatcagtccttccttcttttggatgatgcaaagaggatataaacgaaagacttacctgattgccgaaaccattccgaagcacggtcgttgacataccaccaaacaggttctgaccaccctttttggctccttctgcctgatgggtaaacacgtcgtgataacaaatgaatcagtacgtcgatctacgctagcatatagagcgcggatgagtcacctttgacgacagcatgatcattccagcgcatgtccccaacacaggctttaccatagacatgtattaaacgacatcgtgttagaccttcctgaaaatcttgaaagtgaggaatcgattacggaccttctccgggtgctggcagaacgcgacaaggggctcgagaaggtttgacctagcagcgatcgctgcaattgctgtagattcacctatatgaggaagataatatgagcgagccggtcagttatgtaaacagaaatcagacaatttgctgtaagggacatgggcggacttgcctccagggatgacaagagcctctatagatgtacagattgaaagatttcgtcagtccacatccgtgttttcatcggtttctcttcggaattcacaaagggtttgtacatgaaggcgagtaaagactcaaagaactggaatcccggacggtaaaaaaaacctctaggtacatctcgaacgaaaccaagagaaacacttactgcatttatcgagatcgtctttcgtccgaacagtaacgacctcgatctttcgttgctcaaacttgagtcgctcgagaaggatgatgtgctcgtaaaaagctccctgaagacctggaggtagtatatgaagcatggccagttcaaacacatgttatctccgtattttgattgatcaagcaagaggccttaccaagaactccaatggtgtaagtctggtattcgtccatcttggtcatgttgatggaagtaatcggtagatcggcgatagaaacatgttaaaaatttctgttaaggtttggccttgatattatccctcatctaccatcacaattcccaacgtcaattacccttctcacttccagacatgcagctcacgggacaggccgaacttccgtctgtgggtagatcgatcaggaggatatctatacatcctgatgacctcaaagccaactcgcttctagcaggagatcttctcaaactgacaacttcagcccaaccttcggtgagtcctttcctcctaggtctctttctcctcaaggattcctcacacctaacacattttcttttgtaatttgactcgatggttctagccatgtatctttcttcaagcttggccttctcttgagaccgaagtaggaagtcagcaattttgattcttctcaataattattcatagaaggctaaccctctaccgctgtcgaatttttaatattagttgcccagctctcgctataccatatcttcaaccttcagccctcgttgcctcactttgtcaacagtcagctaccctcatgcagcttagatatcagaaaagtcaagatagctaaggcagcgatgagagaagccaagtctatcgaattagtggaactcaaggtggaaaatgtggacgtcatagataaagacgacgacgacggacaagagcaagacagtagggaaagagagagcggatgggttcaagtgtgtgcaaaggagtcgataggtttgtctctgtctttgttgtcagttctgattcaggattcaataaaaaaaacgttccattacgtacgctgcccaatgtatcctctcactcatgcctacgttgtggtcctatctcatgcagttaacctcaagcatatcacccctcagacggtcatatatattccactcccgaattcgacgagtccccctagagcgtttcgtatcaagtccgtcaacaaacaaatcatccagaccacctcatctgaatctattgaggatgccattgccgataaagtctattcattgaatttgggagaggaagatgaggctaagtccttctgggttacaagttggggaaccgaagttacagtagatttggaggccaaggaaaaggacattgaaaagtctaaaggaaagatagtgtctgcagcaaagaatagacagactactaaaagccaggagtccaaggaggtaagcatacttgacatgtttgtttgcattgtggattattaataacgcaatatcttcttgtgtgtctgtaagggtacttcggaagcgtcatacatgcgcgttcaccctcctgcttcaaatcctacagccggctattcaacattaggtggtctttcctctcagattcaaaaggttcgagaaatgatcgaactacccctactccaccctacactttacacccatctgtctctgccaccacctcgaggaattcttctctatggacctcctgggacaggtaaaactgcattgtgcagagcaattgcgaattcgactcccgactgctcttgtatcatcatcaatggttctgagctttcatcctcataccacggcgagaccgaggagaggctacgggatgtctgggatcgagccaaagcgcatagtccatgcgtagttgtgttggatgaggtcgacgcgcttgctcccagaagagacgaaggtggtggagaggttgagaggagagtggttgcgacgctgctgacattgatggatggaatgggaaaagatgacgattcggcgagagtcgttgttgtcggtgccacaaataggccgaatgctttggatcctgctctgagaagacctggaaggttcgatagggagatagagattggtacgcacacgccacgcatatcttgagctgacgaatcaagcctgatcaaaattccaaaacaggcgtgcccgatgctgctgctcgactttctatcctccaggttcttctctctgtccgtccaaacgatatcacttcagactcattagctgaaattgcttccaaaacccacggatacgtaggtgccgatttgacgtccctcattagagaggcaggcaattttgcaatttccagctacctttcatcttctcttgccacatctacgtccactggcatcgatgattccataccgacaggtcttaagatctctttcggcgatatgattcatgcgctctcacaagtccgtccatcagcgatgcgagaagtctttctcgaaacacccagcgtcaaatggtcagacatcggtggtcaagatgaggtcaagcagaaattaaaggaatgcgtagagtggccattgctttacaaaagtacatttgatagattgggagttcggccgcccaggggtgtgttgttgtatggcccgccgggatgtagtaaaacgttgacagccaaagcgttggcgaccgaatccggaatcaactttttagccgtcaaaggtcccgaggtgtgtatggtgtttcgatcacaacgatcacaatctctttctgcgcatctgctaatgagcctgctatgtgttcaacaaatcattacgtgctgtagctgctaaacaaatatgtgggagaatctgaacgtgccgtccgggaggttttccgaaaagctcgagtagcttctccgtctattatcttcttcgtgagacataatctcgttgtttctctctctttcaaatggctttgaatgtcaagactgatcagctgtacgcaccgttcttctgtgatcatcaggatgagattgacgcgttgggaacgtctcgatcggatgatgcttcgtcaacccatacgagtggcgtattgacgtcgattcttaatgaaatggatggtattgaggaactggttggagtaacagttgtagctgctacgaataggccagacgtcatcgtgagaatattctatctcgagagtctcgacacggttgtaaaactgacagatcatcaaattgattgaacgttctgaataggattcggcgctgatgcgaccgggacgaattgacagaattctctatgttggaccaccgtcgttcgaagctcgtattgagattttcaatatcacgctgagaaaaatgccagtagaatctgggctagacgtcaacgaactggccaagatggttagtctcttatattttcatgataagccctatatcacgtcttcgttcttacacttgtgcacttatttgtatcgttctcatcgaaagaccgatggttgttctggagcggagattgtacaaatctgtcaggacgcggctttgagggcaatgcaggaaaacatagaggctccctacgtacgttcccgttttcatggacgtaatatcgtattgaagcatgattcgatcgtgaagactgatgtgtgttctttggaatcttgaattggtacagactcgagtggaagacttccacgtagtcatcaaggcgtgcaggaagagcatcaccccagaaatggtggagtttttcgaggaatggagagatgggcagattgtgcaaagtgcttagatatatacttgtcaatacatcaagctatacggagatgagaatgcagagaaagagagatgttgagaacagctagaaatccgaagagaagatgtcatttttatcaggttatttttgaagacccatcgatgctttcaatccgttcttctctttgatttctctatatctggcgatgaccctctccctctcttccgccaaaattcttgcctggccaaccgaaattccaactctcgcgcctgcactagtctctacactacctgcattggctttgatggccttggaagctagtcgaggaagcgttaatgtaggaggggcttgagcgatatcattgagtctcttcggggcggatgaggggacggcgcttgcaaactcggtcgctcggaccttcttgggcttaacggcaatagcagtaggggtgacagtgattgatggagtagatttggcggtggtagtaggggtgagtttgccgttagaaggatgggcagccggttttgaggttgaagacgtcgcgctgggtccggctttggctatgattttgggtttagactcgctttcttcctcgtcatcgaaattatcttcgttttgagaaccctcttcctcagcctcagcttccatagcttcttgttcggctttgaggcgttttttctcttcccgctcagctactcgggcatcatgcttctgctttcgctcctccttttcttgacgaaagatctcggtagactgttgggagcaagagagtgaaacaggagatgttgtcaatgtggggacacaacagagaaagcagtgaaaaaatgaagcaggagcgcacatgagcttgagcttttttggaggcgacggcgatgttcgctcgaagagaatcctcgactcgtctgttgaaatgagcaagtgattccccagggacgatcttgagcgaggaagatgggcccaaagcgtcattcgtagtggcctgtgagtgatagttgatgaaggaagcccttgtcagacctgatgatcttgatctcctccggttaaatttactgtgtttgccagactcaccttagagtttccagtcttcctctctgatggcgtggccagagcaactttgttcttcttctttcctcctccaggtccgctttcggacaaacccattttgttttcccgctttcgtttcctgaaatcatcttgagtctgcatcgaatttaggattcgcattgctcccttcggcaacccttccctttctagatcttgagctccgggagcttggtcttttccactgttatccgagagaggaatccagaatttcatgagaaaaccaatccactgttgcgtatgaccgaagatcatcatgacttactttgtctttcgagtcgcgtctctaacgctcttcttagcacctgttgagcagcattgaatgaaacatatcaatggaccacacacatcaagaattgttaatcatgaaaacatatctacgtttgtgaggcatgtcttccgaatcgatgaaggagaaaccggtggtggtggttgtgtagaacgagagagcctgcaatttttgtcattattatcttttcgatattttgagtgataagataaagaaccctatacattccgccagaaaaccttcatcttggtaacttcactcactccttcacctccaagcaaactgttgctgactcgctcgagctgctgctagctactgagcacatccatgctaaccctacgaaagtgtttactaacgccatatatgtgtggcctatacgcaagacttttctcgttgaatgatctcgagagaagaagagggacggaaaggacagaaaacacgggaactgatccgcctaaaacgcatcccccttgttcttgtctaccaagctcacattttcccctcgtttctctttccatcctcattccctcacttactcgttcaatcacatacacccgtccaatgagctcgttctcagatttagtttattcaaatttaggtaaacccaatccaacggtcctcatctcggatggggatcgttctagtaacggctcaagtctggatagctgggacacgttcgaacaactcggctctctcaaactcaacctcagcgggagtaaggcagcccactattgaacatatcattcaatctgtcttcttgaacactgactggtagctctttcttctgtagactttacgttgccctcgatcgatgatgtgctgagtagtcatcaacccagctctgaagccagccaatcgacccggctcagtatagccagcttccggtctgattcaccgtccagttcccattatagctctcaatctgtctcccttccttcctctgagaacagtccgtgcctagcatgatctttgtttgttaatctctttgacttgcaaagtacttgacggctgatccattcgattgtattcgttgcagcttcccatacttccttacgcgttcgaatacgaagagagtttaccacctacgatgtggatcattccagccgggaaagcatattatcctttcgatctaccttttctcttcccgaagaaccttccattgactccatagccacgaatcttcctcggagatccgtctctcgctcttcccggccgtcgacttctcctgcttcttcccgacctcaaagctcttgcccacctttgagtccttcctcatattcatacgtatcaggcaaaattagctccgctccatgtgagacccgaagagctcgagcaagctcgacccctcagttaccagcttcggctttggtctcaaccgctctacccacccagaatgaagcagatcaagcgcagagatcgatctcactcaccaagtttgggactggactaaggccgaagttgccaagatcaaagacaacgagtctaaccagcttgcttgaatatttgtcggccatagatcgtggagggcgattgccttcctcgtcggataggccactgggcaggtcgaaaaaggctagatacgttccttcggagaaaaactcggctaaacgagagaaagttgttgaggaaattctctccagcgagcaggtctatcttgagggtctaaacataattgtggatgtcagtctctcttcttcatcactgagcaagaaaagttgttcgattattctgacaaaatctctcccatcttcatatagcacttcatgcaaccccttttggactcaactctagccgataacaatccaatacttcctagagaaacaatcaacacgttgtttgctaatattgttgatattcagctgttctctcaagccttcctttccgctctgaaatctgctactactccttacgctcgcctcaaaagtaaaaccaccctcgcgtctagctctagctcgaccatgactggattcaactctctcaacgatcatgtatcccgatttagtcgtcccttatcaatgccgatcaaatttgatcccctagatattgacatcggacctcagatctctctcacccttctcaaacaccttcccttcctctcgctttaccatcctttcgtttcatctttctcagacgcgtccacattgcttgcaaaactgaagaaggagcacaggccattcagaaattggctggcagaaagagaaagagacgaaaagtgtagacgcttgagattaggagattggttgttgagcgttgtgcagaggtgtccgagatacctgctgttggtaaaagtgagtaagcaattccacgatggatctctttcatatatttgctcctgacatgaggttggttccaatcactataatcaggacttgctatcgtgcacccccgtagatgatcctgaacacgatgatcttctcaaagtccgagatgtggttgagaatagtgagtgtagttcttcctgcgaatatcacgctctgaaagaaacttgaacgccgcgactgatgatcgattcatggcacatgccatcggtttggaatcaagttaccgaaaagatgaatgcacgattacatgatattgttgctatacaaaaactcattgcgcttcatcgatctttcctaaacataccgcctatgttctctttcgtggtacccgggcgacgacttctgaagcaaggtgcgtctccttgatgcgctcgtactccttctcattgaacttacttaataaagtctgccgttcatgtgaaaaggcaacctgttgaaggtttgtcgtaagcgagatgaagataggtcgttctggttattcaacgattgtttggtctacggtaaaaccaacacgatgttcggcggatcacttggagcatcgacatctctcgccagtctgagcagttggcttaatcttccgagttcagttgcgggacttggcgaaaggaaacccataggaagacaatctactcagctgtcttcagagggtgaaccggggaaatacatattttcgaggttcataaaactggacgaactgacaatccttggggtagaaagttcgggaacggaaggaaagtcgtttgaactcttcagccctgaagaaagcttcgcactgattgctggtatgttacactctttcttgtccctatgacatgccaaggtccaactggctgacaagcaatggtttgagataaattgtagactcaagagcagaaagaaatgtctggatagaagccatacggggagcaaaacatcagttgaacgccgatttacgaactctcaacacagtagaagagcataccatgcggcggcaccgaagacgatctgtccaagctatgccagtgttctctaccggtctgcacattgggatggggctcaaagtcggaagtctttctttccttgcgactaccttgaatgggtcaaactcaatggaggatgacgattcctctcgactgcacaagggtggagaagaacccatcgagaatttcacagccgctgtatgggtgccagataagatggcggaagagtgcatgcgctgtcagagacaattcacggtgttcaggagaaagcatcattgtcgactttgtggagtagtttgttgccatcactgttccaccaaagtacgtgactcaaaccttctgtctgatgtttgagtttgtttactgatattaatactgcatgaacattgtaatctagtctttcaaagtcaatgattctacaaacaactcgtccctattacccttgtctgctcccgctcaacccgagcgcgcgtgcgatgcctgttttcatgctttgttcagcacttctatcagcccgggagcaaccatacaacacaagcatgaacatgaacatgaacctggtatggtttcgatcgatcgatctcggtcgtcgatgaattcttcaaccacgactatatcgacctcggcgtctagtactccatccatcaaacctcaatcaagtctactgacaaaatcgtcatcatttgatcgactaccgacttctagctctttcatcaccttcccttcctccgggattcctaaaactccgcctagtacacctcgtcagactcaaaaactgacaatttcgcggatcggaatcttatcacctccgaacttgactgtaaacgtcaacggaaacgtttgggtggaaagaggcgaaatgatcaggggtgatgaaggtagtccgaggaatggaacagcggcaaacagattgaggagtgtgttggaaggctaagatctttcaacacattcctcagtcttgaatcgaggatgtgctcctacgcttgactcttttccgttatcccaatcgtttcccttctaagcctcatcagacagctgtttttgtgtagtttacgttcacttgtctcttctttcaagattttcgatatactctgtacagtgtcctttcctcataacttcctcgaatcggataatctatatacaatgacccttttccaaggcgatgaatggggtattgtcttttctggcttcatcagtagaatacaatccaacatatgatcatgagcacgtagactcaagtggctttagctttgacgatgactggtatgagtgctgacacattcgcaaacgaggagacagaagcaaaacagtggagaattagctttgtttctcaataaaacacgagacatgattgtgctgagatacgcacatccagtaggagcttcacaatcctgtattatgcacaaaagagattagatctcaacgtaggtcaaccaagaacagccttgaaacagacaatggtggttaagacgaactttatgatcgacaagtttgaaaaatgagctgatggttcccccatggccaactagagaaacaactatagattttggtacaaaaaggagtcatcccacaagcccgtcctgtcagcttttctctgtgcttattactttgtgtatcacacgatagatgttcagaagagacaaaatgaaaactctcaactgacaggtctgatccgaatattctctgaacaattcatcaacaactttcctcgttctctcaatttgactctgctcggactctcgctgatcaggcttccaaagtatatcatgtgtctcgaacgaaggttcaaattcgaaccgaattgcattgtgcgggttttcgagggtaccgtatgtagttcgaaggaaatatgctgagtgacgaccatttaagcagacgacggaataagtgacgaatgagaggggaagatttgtcgaaaaaatgacatacacgtcgaacgagcatcacacgtatggagtccaatactctcacgcagattcttgaaaacctcagacaacggggtaagccagactattcctattcatggattgaggccaaagacacaaacctctttaaacattggtcgaacgcctgaagaaccgttcatcgcggtatcttgatatgtccagactaacgtgctaactccccgagggtaatcaaagcaaggcttattagctatccgagtctttgacgtatactcaagacgaatggaacgacgacctactctgcagctcgcctaagaggactcgaccagatgatttctgggaaaggaggagaaagcgcaagttcctctttccacacggcgttaacatgcttagcttgttcaatccccagtgaggtgagggacggatctggaccccaagtcaagtttccgtcggtctttgaatccagtcaattcccgataaaggcaatatagtaagaacaaagactgaatttaattgcaaaatcaggttcacatgaacgaacataaagtttagaccagtagtcattccaagactgtcgtcgcgtatcatgtaagattctatgtcgaccattcttcgagaaaccctatcctaggctgaggagtaaacttacatcggtcccatactttgactccgcaacctatcatgttaagacaaacagtcaaggaggaggaccaagcatgcagacggtgttagtagtagatacaaagaggttctcgatattgaacgcacattgtgaaatccttggccatgtctctggaggtaaaaagctttatagaacgttcccctgggagcatcattctgcaattctttgacaacaaacaatcataggtatgaatgaaagcaaaaagtgccaaatgtcagctttctccaatcattgtcagcgcagatagacgggtctaaacaacaaacgaccaactcttgatagtttttcgaaaatcgtcccatcgcgtaggcgagtcatctatcaggcctaaccgaggtagtacctagtccagcacgaggcgtttcgaagtcagagccgtacgcaatagcgtaaacaggcacaaatgtcgaagaacactcacagccgaggcaactttacctgtcgagggcgcatcttgtagaaagaaaccttcgactacctgcgcacaaattgaaacataggaccgtacagattgacgtgtacaacgtgcgtcggattcgatcaataaacttgttcgagaaaggggcaagtcaaattgaaacttgtatgtactgagtaatcatatgttcttccattggtactcgacctggcacacagcattctcatcacgaaccatgcagatcccagaatgatgagtatcagcatgcagatgacaccaacgtgttcgaattgatgagccatcagcttgaatctgttatgagttcgtgttcggatattgccggtagaaattggttcagcgtagatgactttgtgaaccgatgtgttctgctttttaggaataagggggccgacaagttcaggacaagatgtcatcctgagtatttcagtctacaaaaagctcaaggataatttgtctatcagtcagatagatgctgagtggatggttggatgattaaatgatggtaagatgctgagaagagaaggagttgaccggccggatggaagcgaaagacaacaccgaacatggttactctttgtttgttactcgtttactccctcgttgttcagtacagggataagaataggcaaagaaacaaacgatcctgacttctacatgcgatgtgctcattattatcgtcatcatcatcatcatcatagtcctttgaaaaacacaatagacaggtatgaaagcgagaatgggaaccaaaaacaaacatcaagtgtagattatcgatttatttagaagtatattacatcagaatccaactccaagcggatccagcgaaggttccctttctagtcgaggtctttccccttcctgctctttcacaattctcccttcttttccttgatcttctcggactccatttttgataatcgttgaactagtgtcatagctggaaattggactcaaaggatctcttgtcgagatcagctctcggtcgaatgatccttgtctaccatctgaagccacatcttgtatggtcaatttatctagggacctataaggcacgctcgtcggtgaggtcgttccaaccacagatgatgatgggtttgcagaagacaaagtaggaatcggcgcagaagatgatgttgacgaccaggcagaagttgatggcgggagtgttgagaacgaattagaatgtgacaatccagcgttagagagagaaggattggaggaactggaagcaaaggatgcggatggtacaaatcctggagctgaagatgaagagacagatggcgaggatggcgacagcggtgaagatgaggaggcagcggcgggagccagaatccaacatgtatcaccacctgcgcgcaagacagacggtgtctgatcttcttccgaccaagggttttcctccaccgttgattggccgagatggccattgtttgtcaaggaattcatctttcgaggaattacagagaacggacgttcttcttgccaagcagacctactagaacctctgctggactctcttcctaatggaccagtacttcctccaccacttgcaccgcttccagtactgtttccggctcctcccccgaccgacgcagcctgattggcaaccctccctatctctttggccgcgcctgatagagcgctcctagctccagatgagaactgggcccaagtaccaccccaagaagaagttgaattgttcaactctcgagtcgaagaggcagaagaatgaggataactactgatggtccgagaggaggacgaggattgatgtctagattcgaatgttcacagttcagtgttggtcaaagatgatgcgaaacagagcaatgcttcataccctgtgttcccttcttccgtttgaagatcgacaggtggagagcctggcgaagctgtcgggctggacagtgacatgacaggctttttgtttgacctcggccgataagggaaggaagctcctgtgataccatccaaaatggagagtttaccgtcctggatcgattgactatcctctaccaccttcttgacaactggatcttcctttttctcatagactgccggtgaacccgctgtaggcaaaggaggctcttccgagacaatcactggccggccattcatctcctcatctcctctaccaaacacatctgcccagaacctgacatcttttgggttcggaaacaatatcccggcgtttccctgttgagctagatcctctgatttatcatatctagcgttcaaaaatctctcttttgcatgctcggatgatacccaatcccatacgctgactgttcgatcctgcggcggtttggaacctttcggtccgaattctggtggcattcgtctttcgcgttcagagttgaacaagaatgtaccgaactgacaggtgtaaagttgttcgaggagcattcgaaggaacgtatcgtcgaactcaaaacgagtaggaaattgtcgctgaatttgccagacagtgtcgaggaactgatgaaagacaggggacgtctctttgagatgtgagttggacgaaaactgtttttgtacggaagcgaaccaagcttgagccgaggaggaacccccgcttccaccaccaccgctgctagaagaactcaaagaagtggactcctcctggccgttggttgttaaacttgatggatcaattcctcccccactggtctggtttgaatagtggaaatacttatcggacgataagtgaccacatcggtccaaaaacttgtgtccaaaactgagccaatctttttcaacgagtaccatgaatcccttgattgtcctgtagaacggatctagacagagttgcgcaacagctgagagctgagcggtcctatcccagccatcagaacaatgtatgagtacgtgtgacgaattgatatgaatgttccggacaatgatggtagagccctcgaggattgatgtcgtatgcttcaaccaatttgaccgacggagagcctgtctgtcgagcggtggaggctgaacaaagtcggttgctgagtagtgtcctgcactgcttccaggaataggttcactctcccgaagtgcatcgattaccttattcaaagaatccctcctgaggcaacatggaaggaaaagcaacatcattcaatgacaagacttcaattggaggacagatgaaacgaagcttgagaaagagacgaacatgacatggatgttctcgatgttcaagtagacctttcttgccagcctgtaattgtccatgttttctgttcctgcgcctttagccacgtttgccattgcatttgtcgttggtctcgcatcaacgatcagattggtagccgtcgctccgtatatctgttgagttccggccgtttggccttgagggctcggcgtataggcagagtcattgaacaaatgggtttgaaaaatggcttcaatcaacttttcatcttgaatcgaccgagcttgctttagtccgacgagcggttgggatgatcgagtgattgtggcctgtgatgacccgtcaagcgattggcgaaacagcaatcaacgttaatttgaaaaatgaaaagagaacgcacatcagagctcaagagaaacaagaaaaagaagtaaaagagaagctgattatttacatagttcgcccagtggagatacgtgagcgcagggattcgttctttgctcctgtacttggaagcgtgcgtcaatgccgaatcactgattctagccggtacagccaattttgccggataggtagacgagaactacaaatggacaacactttcgggatcagcagtagaacatacaaagaaaacttgagacatcaagaatctgagaaagaacgcaagtggacaaacagaataatctttatttatatccgtaaatcgccaggcttttgtccgactgcctacgcccatgcgagtaaactcttccctgggagtaaagacgttccagccgtcacacttctccaggggtggagagggagagtatgtaaatgcatagactttctcgattgagtctgttgttttgtccggtgggtgcaggaaagaaagattgttagcttcatagatcttgaacgagtcagactgaaccaaccttgaaaaaaagaaaagaagaccatactggaaactgttagatccttgatagtctcgaatacgtccagacaagttgactcatcctcgaagaagaggacgtatgtttgaaaaagtctggtccgaatcaagattggagcacggccgttgaacgattgaggaagtttattcacttggttgatcaaagggtacgatatctggggttcgaattcacagtcagatcgtcttttatattcagctatatgaagaagaacccagacacacccaaagctcaggagacgaggggcactcaaagatgagatgatgaagcgtgagatggagtgtgcctgtcgaccgaagacctttattttctagctggacttcttcgacctgagaaagttgaaaacatcatattggatgagaatcgaccgaggaatcaggaaagatttaaattcgaggaaaaattagataaataaatcaaaagaatcataagagtcagaggaatcttttggaagcatgagatctacactctcaaccgaaatagaaacggatcgttcgaacgacagagacagaaacaggaggattcaggtagttcactgaccttggaaattcttatgacatccatcgctcgcaggtacgaagttatgagagtaaactaagagcaaacaaaacgaaaattttgcacctagaaagaatcaagagaagtttgaactaaaagaatacaaacaggaaaggaggaaagagggacaaaggcgcctgatgatggtcgtggtgatgatggggttcaggcggcgcaaatgacggaatatgtttgatccagatgagattgtcggcctatcagaaataattcatcgcctaacaatcaaatgagctgcactctcctatagcactcgttgagctcaacgttccttaattgtccttgcttccaaataaaagtaagatttcttttcatcttctggtctatctcaattgtttttagtgaagtccatcattctcagttatgggaacattgcaatcgttatacattttatctgatgaaagtttttaaaacttcaagactttgccattcaacgctctgatctcagcaattgggcattcgagcacctcatcctcgtccactccattattcgactcttcggtgtcataatcatgttcaagcctaggtcgaggtttcaaaatatatcggatcgagtttgaatcagtgcagacagaccgaacaagtgcgacgagaagtgtcagttcgggtgtgtatgttttcgggttcaacgttacgtcctggaatatgaaatcgagaagatcacagaacaggtattgagtactaggcgcaggtccacgagcaagacgaaggttgacagaacagattgaaaaaatagaaacgaacattccaacctatgacactaccctgcttgagaccacttgatttgatgtgagattcgccatctagacttccccaggcatcttctaacgcagcccattcactctcccaccctacggtttgttctgatactatgctggaagcagaaggaagagtagaagtagaagtagaaggagctagaacgcgctcaacaccttcttcttcgtcttctccataatctaagaagacctcggtatctgtgcgagtccgacttctggggatggaatcggcctcagcttcgggctcgggctcaggttcaggctcaccgaaataagatgcccaagcaccagagccaacgactctggcccaagaatcagattcaacatctacgcttgacacccacatatttccaggaaggacttctctatcactcggtgcatcaaacctgataaagctcttgttgtgattgttgttattcgtcggagtggtcaccgaattcagttttgcaaagaaaggctcaggacgtgtcggtgtagcgctgacagcggatgcggaaagagaggacgggggagggacagaattgtaagaaattcgagtaggagccgagccagctgcctgcttgcggtacgccgaggacttgtttcgattagaggacgcgttgaatgcgatcgaaagtgggacaacggactcgagtgatcgttgagttggcagcagggttgaagcagctacccgaggagaagaaggagaagaagaagaagaagaggaggaggaggaggaggaggaggaggaagatgaactggaagatgaacttgagatagattccacgaaaggagatggggatgcaggaggaggtagcagagaaggaagcttgggaactgttacagcggctgaacgggcagctgccgcattctctgctttgagcgcagctttctttcgtcttcttcgtatgttgcgctcttgagtagcggttgagcctgcgccgggtggtaccggtgggttagctgggataattggagtcaaaatgatagtggagctgatagaacgagaggaacgagtgggaagattttctgaagcaggcgtcacattcgaaaatgattttggagcaggttgaggtttcttagacgattgaaccgaaggagctgaagatgatgatgaggatggtgatgaggatgatgatgaggaagaagaagattctgaagaggaagagtcttcgctctcacttgactcgaccggaacagacttcttgattgtacgtttatgttccttcctgacctttctctcggcctcctcttttatctgtctctccttctttgccttcttaacttcctttctggcatccttagcattcttcctcgccttcttttttgattccctttccttggttgtcgtgccggcggaaggggggctactcttgcgcgctcgttttgaagctactggtgaggactctggtgaggatgctgacaaggctttccgtttcgttcccgacgcgatcaaggcggtttgtgagattgaggcaagagtgactctaagatttaggattatacaaagtcgattagtgcacacacacaacatgaataggcctaaaggagactcaccgcacgacatcatccggggcaatcacgttgatagacgtgtctgctaacaggtcgaacccatcaatagacaagcgtagtttaggcttggttacggagcctcggtcatcatcagctctgcataaactggggaagagatcgaccaggtaagattccagatgatcaatcgtgcctgatggtagtaggctctcaggaacgagtacccatgccttgagcggacctgtcggtgtgtcggccgagagcttgaagcgcatgcgttacagaaaagagggggggaaagacgttgactgccggttctgagacggcgatatcaaagcagaagaagggccgtaagaaggcagtgcaggaacgatgtaaaagggcgtgtgtatgtgtgggtgtgtgagtgtttgtaggaaaagtggtcgaggtgactgaatcagggcaggtgtttctgaggtgaatatactttgaaacggtcgatctattcgaatttcctcttgacattacgtaatcgcttctctcctggattcattgccggccatctctctcgcagttgggccgcttaattcagggacatttcatcttgtactcagtcgatcaccagctcacccgctcacttgttcacacctgccaggtacagacacccacagatggcttcaccacgggcttcggcctcattctcgaccctgttcccttccaggttccacaagaaggaatcgcagtcgtctggaccgtcatcccaatccgtcggcggcaacagcaacggtaacggtcgttcaagagcggcctccagctcgtttgccatagtcggtaatgcttccaatggtggaggcccaacactcgcccagagaaggtccacagagcctctctctgcagagttcctttcgcccagctcggcaatagggccggcctcgactgtgcaatcttcgttgtcgtcagcctcggtgctgagagtccaaatgggaggatcgttcagacaacaacctgggcaatcgggcgatcaggacgatcagaaggtcgaagacgaggattcccttcaaacaccagttgacgagaaacgacagcgaatcctgcccacagaagtttcggcgtcgcccatgttgagtttcgccttaccggtaccagcctctgcacaggcaccgtcactggcatcaacttcagcacagacctcaccggcactgtcctctttagcaccaccatcatcaccatcacaatcacaactaccagcgatgaccaagtcaaaaacgaggagaggctttggagggatcccaaagaaggcgaaaccgtctcagggagtttccggtgcgttggtcagtatgtctaaagacctgattaacccaaccaacgggctcgctcccatcccggcttttcgttcaagatcaggctcttttgtgtctgaaggcgaagaaccggttgcttctgtcgccgctactaccgccactgctttcatgcccacggaatctcctgttcgaaagaaaggtcgaaagagagggttgactgcaacctcaaaaacaagcgaaaaatcggaaaacacgacctaccctgtctatcctccggtcgcctctccctcactgaaaccatcagtctcgaacagattgtcgtttacctcaacagagaatggggtaaatcggaccagagcgagctccatctacgcgacttccgatcaggacatgtacgttcattcaagttctgcaccagaatccgaacggactgatggcgaagatggcgaaggctggagtgagggggatcataatctcgacggttacccagctggcgacgactaccactcagtcggtcctacagacagaacccggtctggctcgatgggttcaggaaatttctctaataactatactcacaacaacgaccccaacggtaaccacgatgaagatgatgatgaagatcatcacgaaatgtccggtagcgagagtggaggtagcggtcaggcagaatacgacctcgatgaccttccagtcgtgggctttgctgtcgctagtgtcaagcgaaactcagactttcatgccctgtttggaaaagtcattcctgaagatgattatctgattgagggtgtgtccaggcttttcctttcctgccccttccatcaatcttgacgttgcttccccaaactgaaacgaccctttgctaaatagattatggatgcgccttgcaaagggacatcctgctccaaggcagactctacgtctcagagaaccatatatgcttccatgctaacatctttggttgggtcactaatgtatgtctgggtgtttctcatatatttcttgttcagtgttccttcgcgctctccttaccttcatcaatccaacatcgtttcctttttctatcagcttgtcgttccattttcggaaacgaataggattgataagaaaatgaccgctttcgtcattccaaatgctattatgatcaccacgtccgacgccaaggtaagtttatcttgcctctctttcctcatttttgctttttctcttcttacgctctgtatcctctttcttcttacttgtccttcagcacacattcgcatcgtttctgtcaagggacaccgcattcgatgtcatccacagcatctggcgcttatctactccgatcaatcccatggctgccaaccgatcgtcctcatccatccccgatgactcgccccttcagagcctcacctcaaattctcttgctaccgattctaaacccgctcatcagcactcgccctctagcccgttaacgatgggcaagaaaaagattccgagcagaaaacagccgactacgtgccaatgccagctaaacggtggtcactactcggagactgcactggatagcgtgttcccaagcacacctgaaaaactgtacaatctgatgtttacctctggattttcgaaagatttcatgagtaataatcagaaacttatcggttagttcggacgtgatggattagccttctcacaaccaacatatactttgaactcttttcttcgtccgtacgcttaccttcttgcttcatcctttttctccttacagacatccagatctctgattgggcacctcagtcgtctggatcacatcttttgacacgctcgatgtcatacatcaaaccgctccctggtggattcggaccgaagcagacaaagtgcgaactggttgaccaaacggctcatgttgattttcaagactttgtctcgatgattaccaccacaagaacgccggacgttccttctggaggttcttttgcagtgaagactaggacttgtttaatgtgggccggagcaaacagtacgagagtagtcgtcaccactcaggtcgactggaccggcaggagtttcatcaaaggtctgttgctcatattgttctcgtttgtcgtcgccgttgataagcgttgaaaagatcttcttttaacatcatctcaaaaaggcatcatcgaaagctcagctttagcaggccaaaagtctactcacggcgatttggagatcgcaatgaggacatatatcgccgaccatcggactgaattccatacggaaggggtcgatgacggggacgatcttcaagaatccactctcctcaccatcgatccaggttccaattctggaccggccgactcgagctctgccgttcattccaataatctttcttcctcaggaaacgattcttcgattcagaaccataaagatcaagaacgcgcattgcttcaatactcctttgatctttcggttcaatcggtcttcgccgctttgagggcagtatccggaattgttcagtctatcctcaccgctcttacggatatttctgtcagatccggcgtcatgggagccatcgtaggtatcttggtaatttcgaacatatggactctggtctcgttgcgtggcgcaagagatggcatcccgaacgagctcgcgtccaagtcaggatacgaaggtacaaatggagccgatgcgacaggaaggattagaccaagatcggtcctcagacatactgggtttaggtgtaggcaaagcggaaaactgtccgtcgaacgtccggcacagaacgtggagcagacacaagtaggaatggaatcaccagactcagtcgcagaggccgtcagacgtttgtcctttcctgccctctcctcttaacaaacttttttcctttcttcattttgttctttcattgacaggatgatgagattatctgacctcacagtgtttctagaagactatctcccttcagcacacccccaatctcgaccaccgacataccctcacttgcgctccttacccagacacgaacaattctcagccctctcacctcaagaagaaatcgaagaattaagaaactcgttagatgatatcgaacgttggttagagagattgagaaaatcggtcgaccatgtcgttgtcacagaaggtgctgaggagggggttggttcagccgtgggtcacgatccaatcggtcaggccgtttgagtcatatggaaggggcgatcaaatgaggaaggattggcaggtcttcatttatagtttttttcttacttcatattatgttattctgtatacccctcgttcatactgtaccttctcgtatatgttacaatgacaacataagtcatcccattgaacgtgcagtagattatgccttgaacatacgatttgattctttctcctgatgtaccccactgaagatatatcttggcaatgacgaggataatgttatctcgtttatcttcaaatctaactctcaccatatagttttttatgtctcttatagaatgaattgtgataggataattatcaaggggacggaaatataaaatcacatatcaactaacttctcccatcataaacgttgcctcgcatttctaaaacttctcggatccctcaaacagctcggcttccagcccatcatccaccactgtccagtcaacatctctggctgaatacaaagcctcataagccgcagaactggcgtgcgcaaagaagggttcaagctcagatatcgaagagattttctttaaatgggatagacgtggtcttctaaatgctgttgttgatgttgagtgagatgattcgagcacatcgtcaccagattctggcgggtgaagttttccatcattctattcatacaagtgaaagggggtgtcgaaaagaaaggtgtgagtgtcaagaatcagcaaacgatcacgaagaattgatggacaaactttgctgaaatgaggactgtctcgaatgagttcggccagatgatccatcaaggaaccagatatatccccttcgtctgtatccaacgataaaggagtatctcggacgaacgcccattgatgactatgtttctcacgaagaaagggaagaatatttttgatcagaaccccaggttagaaacaatagagaagtatttgagatgaggttgatacatttggaaatcttcggactggatcacgagcagcagatcgaggaacttgcaggccccgaggatctctaataaaagctcagagttatttggtggtaactcctccattagttgttcaaacacccgaagctatcaatatataaaaaatcagcaaaccatacaaacagacgaaacagcctggcgcacaacagacgtacaagctcagtcagaatgataggccacaagttggtgagatcccgggcggcgatccgacagattaaaattcgtagacaaagatagacctcagcccgaacagtcggagataatcccgtcattcttaaaatctcgaccaaactttcttgaatcgcaggcagttgattgagaaaatggttcttttcggcagcaaagaggacaaatgatatccggcgaatattgagcgaacggagaagcatctcagaatctcggttactgaatatgttggctgaaggggccgcaacagctcgagcttgagaacggtaccgagataaatgtgttagtctgacaaacccaaatggtagactcaagcaagataacgtacaaacgagttctgtgaaccgctctttctcgaagtccactagagaacagactagaggtttccatctggcccctgaggaaggtgagccattgaaaaatctcgaatcgttcataaaagcttcagtgacaagagctctccaaaccttgatcgagttgggtatccgagtaatccccacaagaatgctgagagccgtgggatcgacatccagagacctattgagatagatcggcatcagattgtctctcgatgaggaatctcatgaatatattctgactcacttggttcgtacacggagtgcaggggcgacgacctgctgacagagtgtactacaagcggctagaactttatcgctatcggccaagaaggatcgaaggttgggtacagtttttcgggacataaaatcggcaatctaaaacccatagttaacagaggatttatggttgagttggggtatcatagttgagcaaggcaacagaactcaccgcaatatacgacacctctgtttgtgtattgaataccgctggcttttcttccagaggtgtcccggctagatggcaagctcacggtcaatgcacaactcaccatttgacagtacaacatacgacttgatcacttacgaagggcaggtgaaaccattccgttgctgacgtcccttgctcgtcgacggacggaaaattgtccatcgaaagatcgcagagcccaggcagcagtagcgtcaagcaatttggaataagtgtcctgttttggtttgcatagattgtcaatatgttgagcaagacaccgtcgactacaacgatatcaattgctcacctgcagatcacgacgcattctcctgtcttcaagcgcgcttgtggtagcaaccttctcggccaatgctgtcaagcacctgaggtgatgaacgagtgcagggagtcgttcatcaggaggctgacgaaacaatcaagaatatattgatgtacactcacttgaatgagaagaaaacctgtatcttggatgcagtggttgaggctcctacaagaacatccttagtcatagcaaagaatgtcccccaaacctgaactgcaattggaccctcaagtcgactcaaataagcttcgagaaagccataaacgatcgtgtcgttcctttgaagagagtagatgcaggtagtaagagtcatttgacatcagcctgatgtcaagtcatgaagtagcttactcttcttctgtaagatttcctttgccaagtgtattcgttcgtctggttagaagctggcacatgatagacacagcggtctgagcacttgaggctaatgtgtccaaaatttcgaaagagtactgttgttgatgatgagatatgataaaattgattcatcagcctatcttctgaaccatatatggtcaaagtaagctactgacacaattcggattctgatttgaagcccaacaacttgctaagattctaacaacgctcgaaggttgcaatctatagaattgctctaatgccttccgagttcggtcttgaacacgattgtacagatgattcatgccagctgcagctgctgtagaagtggtcaagataggggaagaagaagcagtccaaagagtgtgtaataaagacacggcatcatctagacatcgcagtccagctgatttgggctacgagttatgatagagagtttgattacggatcgagagtgagacatctgaacgcatgacttgagtcagtcaaagaaattttacttacaactgcgccaccttctggagtcgatggtcgagcaagatctgactccgtgaagacgttagaaacataaccaaacaagcctgtggtgacctccgtttgccgcttgtcgagattgggagacaaggagacaggaacagagccagcaggcgccgccagggaaaccactttctctaatgcgttgagaagcatgactatctctgaacccgctgcgttgtgtacggtcgaatgattgatatcttcagagacaacgacatctctgatcgattcagcgagtaggtatagctctttgatcagacaatcaccaagaggatagagaagaggtcggagatgcccttgaagctggggagcagtcatgaggatgaagtccacccaatgttgtagaactagtcgattggatttgaccgagacacctttcaccaacatctgaagtaacagcggactcaaattgtccgatatagagagagagtttctctccacgctaggcttttcatcactaaggtaggccgaagtttttgagaagtcgctattaccagacgagggaagaccttgaacagagatcttcttcttgtgctgggtggacgaagcagctgaagagattatgttttgtaagacgtgaagaagctggttctggatgtcaagtttcgcttcgtgtatacagtacagtagtttagcgacaatgacagtttctgtggtcttgtgactgatggctgagatgtcgccgcgtgaaaggatagactggataatttcgagagcgttgagttgcagtaaaccattggcaggttctagagaagaagagagcgctttactgggttcagattgaacaaacctgaagtagttgaggagtaccagaattcgacacaacacgttagctagcgtgcgcacttcttgacgacaacaatttttttagagataggattgcacatactgtagtaacaactcgacgaggacgtccatgaatgatgcttcggcatggaaaatcttagctgttgtacggaagccaatggcaccaaatcaacacaaatatcaacatcatagatcagacgaaacatttcgcgtgaagacgaacctttggtcgccctttcacgcaatctttcacttccttggctgattggtgtcgccctgatcactcggttcaacgcctgacctccgaatcgactgagactagccaaactttccaaaacgtaattgagccgagcatggtcaatcggccgatcatatcttgatccttgaacctctttgccagagaaagtgaaggttgtcgttgtccggcatatagatggatctaatagaatgcacatgatcgggtctagcattctgtaagaaattttacagtaaacaacaacaggaacatatggactggtaagaaagtttcattctgtttccagctagaaactaacgagcatgggacaaaccgtgtgtatgacttgagatcacacctcaaccaagtttcgcctgctcggcgcaaagacacatttgatgcgttcaaagtatctaaaatgataaagatcggtccatccaacgcatgattggatagatctgaatcctctacgaagcggacaaaccggtgaataaaatttagtgagactagtatcagcctatcaattcgttgaaggtgaagatattgacaaagatgaagctaagacataccgcttagtcgccaaaggactccaaatgcatggatcgcatctaatcttttctcaatcgaggtggacagcatattttggaagagtatagcatcaatatgcttgaatgaactggcatggtgaagctcccacataagatgaacggccgggatatgatagagttgagtgctcgatgtcatgaaacgcaagacctgtgattgattggttcaataggaaacgttgagcctgtgtgatcttagatatcccaacaaaatcttttgtttaggtttcgacgtggttacctacattgttcatcaatgctgacattactagccgactattggtcttcaaagggggttgcatatacggtacccttcccaatcctagggaaacgcgaatcataatctccaacgtatcgaatgaagcggtctggcatataacgcacgaacaaacatctgagcgccaaccaaactctcgaaagatacttgaaagttgtaacacacctggtttgcttgttccctaacttcgttgaaccacgcatcccgatcccattcaatagttccgatatctccctccaaccccacctgtcccccgagatcgatccaatccttcaaaatttctaaaactccacaggtcatatcctctatctgattattgccctgtagagagttactgagggatcttctcgataacgccagcaatttttgaaacggccgtttgaagagctctgttcccgtgaagctcgagcttgtaatctccgaaggaggctgaaggtcagtagacgacgaataataggcggtagcagactctaacggcgtgattccagggtcaccagatgatacagaggcagaaggcaagtgaaggaagacttcaagaggaatctgggggagaatttgacggacgagatccagagcacctgtgatcttagttttctggatatctgtcatgagcgattctgaaagagcgaagaaaactcggtgaagaagctctactaaggtgacaataatgataggtaggtgggtcgtttggatttcttcttcttgttttgaaaaagaccttaagatgaaagcaatcaggtccagagactgatcgtaggttcagaggaaggcattgttagtctgtgagttgctgtaaaatttcaagtcggatgagaggaatgagacctcacgtcgcaaaccagatctggcgattcgaattcattcagtaatccccagaacaagcctcgccagactagatagggatccaccgtttcatacagcgtgcttccagtcatcagacgctgttggaatccaagtcgtgttgaacgaaataagtttcaatcgttctctatgtttgtgatccgagagatacaattaaacagacttgactcacatcactgacaatctcatgatcatctccatttgattcttttagggatctaagcgcgtccaagatcaatacgtcggtaagtggatacccgatttcccatttgtccaacaaggagataaatatccgatagggccgttgaggttctgatagactcgatgatacatcattcatattttcctacgagtgcgttgttgattaggacaggaagagagagacattttgatcagctatctgacttctttgctggaagaaagaaagaaacaaaccttgagcgtattctttagaacgtccagggaccattctcttaaataagcaacctgctcatctgagcttccctctgggcccaatagccatccgtataatcttctacttaaagacaagtctcttctcatgacaactgtcaaggctgaagacataaggattttgcggtcggtctcagtggagaaactgaaagttgtgatccaggtggtagaaacattccgagacgatatcagatcattaagcgcgtacaaactcgcttgtcttcagtcgcgataaacttactcggaggatgcggcgccatctaatctcaaccctgtcactaaaaggtccaatgtccctctctggacaagcagattatcatcttccaacgcggctgcaaacgctcgaatcatcaaccctatgtcagagcctactatcggtgtaatatcttgaaaaatccaaacataattttaatcgtcagcagaacatcatctaaccatgattttgtatgaaatattgaccttctcctttgccaaactttggtaatcgcctgccaagatagcatagaacgtttgttcttgcccctggtgtactgatcaatatcatccagaggttttgaaagaaaatcggtggtgataccgttgatgatacaatatccatgaggtacatgaccttttcgaaagcttctccggcttcctcctccagacctggaagaagggcaagtaagaatgccttgatcgctggaagaagggcattcttcagagggacatagtgtacttcatatatattgaggagcatgggctaagacatgcgtggcaggcaatatcagcgattgattcaaagatagataatctggatgaaggataagaaacgtactttggcggatgtagaagcgtattggaagaatggaaagagaccagacgaccagatcaatagatctctttttaagccttcaagctaagaaacgcgcaatcaatcaacggtcagcgctcaaaactctcgatgtgtctccaggcaggaacaatacgacatgaaacacgatatgattgaaaggtctcatgcatgaactcactccgatgacactcaggatgtgtccgtaaacatctagagctctctggtgaactccactgggcaacgccggagtaagacattgcgctagtctttttgcaatcaacagcttccttgggatttcattgaatccagggaatgtttgaattgtcttcagcagtttggaaagaaaggagataaagtcggcccattccttgatgctctcaaatgattgtagagagcgatctatctgagtctgatatttcttccattgagaatcgtttgatagaagcgagagagcggctgaaagtttatcggcgggtacaagtttgtcattgagtcaatacagagaaagcaggaagacaaatgctcggagaatcagacagacacgaacctttctctgctccctttcctttccatatggacccagttctttttccgattgatcccagctcacccttcccatatccaccgggctgattcgtaccaaaggatgtatcaaccttgggactaacagccgagcgagggttactgatggcaagatggtctcgttttgttgaactctggctgctggttgctgaccggatactagaaagagatggctgatgatgaaggctagattccacactttcagggaggtccatgtggtggttcaattacttctacgtgtattcagatgtagtatatgtgatgaaggcctgaagatatgacaatgacctgtgattatgaaagaaagaggatgtgtctatcggggccaacaggaactggaagccaacggactgaaggaagtgatgaaagagagaagcgtgtatcgaatagaattacgtaatgttcgatatgttgattcatcccatcacactctgtttgaagaccagttccgattccaagttgatacacctttgcgcgcccgactatcacccggtaacctttgacgtagctatgaatcctaaagtacatatacctccatgcctttagcagtctgaagaacagcacaaggagataatcgcttgatagataggattgaatgtttatggaaaagttcagaaactgataatcttgttgttcctcgtctttgtttattgtctgtcttgacagaatcgacatcaaacccaggatccagaggatctttacacccggcagaacattattggtctgttcttatctctctttatcactctaatcgttatagcttcgttcaaatgctcatgacccattcgaatcggctaaacggatcataggcaaaggttctttcggtcaagtatacaaagggtcagtttcattcttagtcaattctgttcgtccattcaatgtttatataaaaaccttctacaattcaaataccatcctctagtatcgagaaacgaacaggagccttggtggcgatcaaaataatcgatctcgagaacgccgaagatgagatcgatgatattcaacaagaaatccaaattctttctcagttggactctagtcgagtaactaagtgagttctgtaattttggatttcaatagtataagtgaaaatcatgtgtctgggctcatcaatcttgtcaaaatcttgatctactagataccatggatcctttctgaaaggaaccaatctgtggattatcatggagttttgttccggaggatcatgttcggatcttgtgcgtgtgcctcttcatggaagtttcagcccacggaaagcgcgcttgttgacttttctcgatttgttgggtcattcttctatttcaaaaactacttgctgaaaccacttggatagttaaaatcaggagtttttagggaagaatatattgcgatcatttgccgagaactgctcaaggggttggagtatttgcatcaggagggtaaacttcatcgagacatcaaaggtttgttctgcttaacttttctctacttggaaactaatctgacatatagttttgtcggattgaacgcatttcctcttacttgtttctctttgacacttattgaatctatcatgaaagcggccaacatcctgctaacttcggcaggagatgtcaagttggccgattttggagttagcggccaactcacatccaccatgaccaagaaagtatgcttccccttgattcattcgaagtttctgagcttctgtcatagttaatgctcatcattatctattcatcttgtctggaagaacacgttcgttggaactccctattggatgtctccagaagtcatcaaacaatctggatacgatttcaaggcagatatctggtcgcttgggatcacagcgatggagatggcaatgggagaacctccatatgcagaattacacccaatgaaggtttgtttcatcttttgttgtcttctgacgtatgtttgtcagagagttgttcggaatttttttccagatcaacgttcatgttcctgttttctgatttgcctatatttgtctttttttctcgtctgcgcgcgaataatctcaggttctgtttctgatcccaaagaacccgccacctacacttggaccacagtttagcaagccattcagagagtttgtctcgctttgcttgcagcgggacccaaaagaagtaggcttgttcttgtatcctttccttttaggcaagagagcgatgttgacttcccgaatttgttcgaaaacctttctagcgaccaacagctaaagatttactcaaacatcggttcatgaagaccgtcaaaaggccaagcttcttgaccgaactactagatcgtcacgaagtgtggaagactgacagaagcgacaaaaagattgaggaaaatgagccgtcaggctacgaagcgtacgttctctcaagtctatcttgctgtttgcgcgacgtatcctcaaaccatcgcttacaccatacgttactcatgtgatattatgttgtttgtgattcatagaggaacgatgggtgacgttggagatctttgggactttggaacgatccgacgggatgttcctcgtctgggtacgatgtccaggtcgcaacctcccccactccccacttcgtactcgtttgccaatgatgactctgtgtcttctcaaccaaaatacatcccccagaaaggatcaacccacataccttcctcttcacctgtggattcatcaggaacctacagctcgctcaacgctcaaaccatcagttcagtatctcgcacacgttcgtttggcatatctcaaggcgatcgagaccaatcggtttctgaaagccaactgccgtatgcatctggaggttcgcctaagaatacgttagcgagatatcaatcgttgaatcccacgcagttcatggagacaaaaacggaggtcaaatcggttccggtggcgcagtatgaaatagaccaggatgctgaacacatcagccattctaatggacaagaaagattgagtgacgatagacagcctctggccaaagtgggccaggacgagggaagagggcccggacacgagtcagagaaggagaaggggaaagcggagtatgatagtgacgaagagtttaggaacgatagagagatcctatactcaacagaatctgagaggatcaggaaagaggaggaaatgagtgattcgaaagcaatactgatggatgttgtctgtcctgtgattgatatggtgggtcattcttatgctgtcatgaacttatttatgcttgggagaattgataggctgacaagctgaaatcgtttgtttcatctcagatcgcgtcgaagataaatgacccggacgcacgacaggctcttgaagttcttcgacgtgcctttgagaatgcagaacgaatgttagtctgttatctccctcaatctttgtattgtgccgttgaagcaggtgtgtgattcaagcaagtcccgatgactgatccgttaacaacgccgtttgacacagtatccctggtgtaacatcggccatcgtagctgaggtttgtgacaatgttgagcaagctgacccagtagaagatgaacagtaaggtgtcaattaaggagattagaaggattaacctaacgactactggagagggaacaggtgaccctccgtaaccttgcatctacaccttttctttctcttgcttttccctatttatattactcgtgttcttttttccttttctttttttcttggctcttcttttctttttctatatacctgcccctcccaaccctagtcatgcataccgtagtgaacacgtccttgttcgttcttttttctcatcttctcttccctcgattgacatcttttgtctagcacgacacactccatcccatacatccattttcatatttcatgtggttttagagaagcatgtttggcacagctgtcacttgacttacagcctccttttcttttgtgttcagcacgaatgtgcaactgtatctcgcttcagttggaatgtgattgttcatcaatgcagcagagatgaaacagcgatccgtttacgattgagatgcttcgacaacagcacagtacacacacatcatcaagactgccatctcgtcgaccgactgaatccaagaaaaagtggaaagcagccggtcgacacaaatgggaagaaggtagaggaggtccctgacaacacaagccggcagtgcagtggcaaggtcatcgtgtccggccgtcgtgcaagcagaggatggccggacgggcaaggcaaaaagaagtaaaccagatgggtccggtggacccatataagtggttaaacttataagaacagatactacacatgatctaagccaaaaggccagagaggatgagggaaaagaaagaagacaggaggaacgctggcagggcggccggcctttatacgtttggtcgaccccccctgccggccggagtgtgaaaactgggggaagggacggcgggctggggggctcacgtgacgtatggaggatcgattcatgttgacttttgccatagtctttccttgtattcagactacaacatgaatcactacacatcatcatctacgatgcgacgtgaatttcttataggaaatatttattgaatcattatgtacaataccatcatagggacgaccctattaagaattcgtattcatacgcatacgtaagtccatagacaaagtacaatcagcacagccctggctctttttttctcccatcgatctcgcctcctcgtttcttgttccccggtgtcgtttcttgtacaccttcttctctctcttcatcatctggaacaacaaacacctttacgatatccatccatccattcatcctttccttctcgcctccactcaacttcaaatacagaatcaacaccatgagtgacaccgatggtacgcttcacgactcagtcaacctacctcgcctatgctgtctttctttttcgctctcgcttctctcttcactctcgtcgacctagaccgtctcgtctttgacgtgtctgccatctgaaagataatctccaagtgaggagaacaaatcagaagttgttcatccatctattctttgtccttcaaacggcaacaatcgctcccaagacagcctgcttgtcttacatttgtgttcacgacttgatcgagctccagctgatggtggtccagagagaatccatcttaatacacgcgtctcgtcatctatcaggcaccctctgatcgttttacctgctgtcaatgtgttggtttcttggtcaatggatgttcaacgattctgacacacaactgctctctatgtcaagaaagtcgacatgccgtttgctcaaccactccgactgctctctactttctctctccctgtgtatcctttcaaaatctcaatcttcgtccacttggccacctgaccgtcttttttccacaacgcttcgattcgtctcgtcctgacactcattcaccttatctctatctgtatcacgctcgccttgcttttattctttccttccaatcttccacccttttcatctgctctcttctatcgatcagaatgggcaacccgagatgagcctgccgctgctcaaccttcccacaaggacgactactcccggggtgggacccctcccccccgaggtagggacagacgaagtgcttcgccttccggagacaaccgaggtggaggaaggatggatgttgatcgacccgacagagggcggggtgatgggtaagctcttgtgtttgacatcctcttatttgctgaattttctcaagagttgactgtgtctactctttgtctcgttcttatctgcacattcgcttggctcatgaaggcctcctagatctggaggagatgagaaccctggaaacaatttgcatgtttcttcgctctcgccccgagtagaacaacgagacttagagactgctttcagcaagttcggtgtggttcgtgcttgtcatctttctctgctgaagcaatcagaattcttgagattgttctcaattgttaatctttcatacctcctgttatatgtcacctttgcggaaaacaatgaattttatatgggcgtctcttagattgataagattcaaatcatgtacgaccctcactctcgagagtcccgagggtttgctttcgtcacgatggccacccctgaggaggccgatgccgccatcgccggattagatggtgttgagttcatgggcaagcccatgaggattggcaaggtacgtatcgcgtatcgagttcttcttaccgctatgcttctacagatgagacgcatttagttaacttttcgtttaccgaacattggcacaaaggctcgacgaggacgagctcgaactcccacgcccggtcgatactttggacctcctaaggaagacgataggaggcccccccgaagggattacggttcccgagggggagagagggagagaccctatgacccccagccgtatgatgctcgatacagctgtatgttccatccttctcattgttttgacaatcggtgggacacagaatgtaaaagctgatgttcgccccgttcttctttactcaatcagctggtcctcctgtccgagctcgacctcctccctatgatgaccgacgaggtgatcgacgagacgaacgatgttcgtatctaaagtcttaccttgtctcagatttttttgatttatctattttcattcgtttgcttattctcgatttcttatttgatcttttatagacgatccccgaggaggttaccgatctgagagagactaccctcctcgagattatgctcctcgagactatcctcctcgagatccctacggctacccttcctccagggatagatacgaggaccgaccgtacgtgccttcttccactcgatcctccggaccctccggaggtggaggaggttactacagcgcaggacctgattatggtgcacctcctcctccaccggttcctagacgggacaggagacaagacgaactgtacgccacacctgctgctgggtatgaccgaagagatttgggagatagggatggcggtagaaggtggtagacccatcctttccttcgtctacctgctcgattgatcttttttgtcgtataggggctgtctttgctcttctcctactttctgttttacaaatccaaccattaaattcgttgtcttttctttctcctttcttcctccttttgagagataactttttcttttcgctccatggatggatgattgaaaaagattacggatgatgaacgctggcgttcgaaacgaaagccagtttacagatcgtcatacaacatatgaacaccttcataaaactatgaagcctttgcccatacctctccgaaacaggaacgagagagtgaattaaagaacgaaagacatgtcgtgaacaagagcaaaagatacgaactgtaacagatacggacgcaaagatcaagatgtatgataaattgatagatgtcaaaacaacgagaccctgaatgataagtgatagatattataatttcacgaagcagtagagctggacgaacggaacatgagcaaagatgtttggttttttccatgttgtgatgcttttcattctgttctggagggcgaaggtaagaagctgaagaaagaatgtacagaagggaaagaagattgaaaagacaaaggaaagagaaaagtaaattaaaaaggaaggctagaaggaagggcgcctatatgaacacgataagaaagcattcgttgctcaaaatatatatatactatcctagataatataaacaacaatatgaatcgagaagagaaaacacgtatgtccagatgaaaagagaacttgccaacaaaaaaaagacatgaaactacaaggtaggcacaagttgggaagcaaccattccaagaggaagacgtgagacctctgtttagaatgcagacccagctgcgaatgaccaaagccatttcgagtttattcagttggagagatggtctcgcaaagagatgaaaagagaagcgagagccaaagatagagaggcttacctccatcaagcatccaatccaggtctgaaagacccatgatctgagtcatcaaatcgccactacttgattttgtaacgaaacgatcaaaacaaagtattctagttcagtgcaactgtttttggtcgatatcggatctaacagaaagagaaaggaagaggagagaacatactcggtgtaaacgtcattttgaataggtaaaggcggctggaaggtcgcgcttgacgcactcgctatcggttgaccggagcagccattccctaagaacccgttgaaaccgtcttgatcggacatgaacggtccttccgtaacagagtcgaaaaagtgttggaacggttgactggtcgcaaaatttgatcccacaggtggaggtcgcattgcaaattgttgttgctgctgtagcaactgttgctgttggtaatgatgaagagggtgagatgaaggaagttggttttgaagatttggttgagtatacgatgatggaacctgataaggcggttgttgctgatactgctgggactgctgctgcacattctggccggtcaagaggtccatattcatcggtccaagtcgctgattcgacaatggtgatggcaaaatcggctgactgagcggatgataagctgcgaggcttgtagtactcctcaaatccgtcgtcgtcgggcgacgttcgtcctgctgagaatttatcgtagaaaatgtcatcagaggctggaggggtgatgcctgatgatcagtcgaagaaaagggcgctgttggtggcgaggtcgccgtcctcaccgctggcattgcccccgtggacgatgagggcgtcagtgcaatggttgatgaagcagaagatggagactgagccccggtgatccttgtagacgaaggtacagcattgttcttcaccaatcgacgaactgctcgttgaagcgcgtgggtatcgtctgagctcgagacagattctatgctacctcgacgactaggatcagctcctaattcttgcggatgtgagctgagcgcctcaagtaggagagcctcaatgacccgaatacttccccttgctggtgatgaatgtgtttcggatattctattgaagacgacgataccaaaaagcgagaggaataaaattagccaaagccgtgctttatctggatcaaaggataccaaaagatgacgcgtacttgaggaatcgcaaagcggcagaaacagactgaagagtctcctcccacttcgcgtctcttggcgtatttagcatgtcgattaggcagacgcaactcgcaaagaatgtttgaagcacgggaatcctagaaaagccgaaatgagtcaggtctgcttgtcccctcttcctctagcaaaatgagctttgaaactgatgaacgtaccaccatcggtttaagaaggaactcgtccgaccagaagccgttccagaattaatcaactccagagagatctgagccgccttgacacattgctcggtagaatatgcatattttttgttcttatcaaagccaatacaagagagactggtcgattagaactggggttgaacagagtgacgatgcggaaggaagggcatacagtgtatccacggctcaaatacggacgatggagtctttgttaaaaggtaaacccagagtaaacaataatgtgcatcagatttcagtatcaacttgatcaatttgctaagaggaacttgaggcgcacctcattcttctcgtctgcaaagataaatgcaacacaattttttcccaatgagccgcttcgggattagacacggagtccggagagattttcatgtcggggcccgtgtttacttgataaaacgaagggaactaaaaaagcaaaccgaatgcaacccgctctcacgccgttaacggaaagcattgatggaatcaggagaaaaacgacagtaccttgagagggatcttggctagctccccgtcgatagccatgatatcttcataaggtgggtgaaccgaagtattcatcagatagatcgtctgatacgctgtctggatggttcggagtcgagccagatggtatgacattggtgtatgaaccgacattggacgcggtcgaagaggttgaccgtcaaccagatcttcatcacaaatctacatttacaagaaagtcgaggatgcatgggaaaggaaaagtggaccttgaacctatgattacgacaaaagggcgacaacaaataaaggaaggaaggaacatacgttggccggaagcgcggtagacatttgttccggatgaatactacgagaaagaaagggaagacagaagtattgatttaagtttacgagggcatgtacagtcaagaaagagaggaacggaccttgtcgcatactgaattatgatcaatcagcaacccaaacccggatatttagatgtcaatagaaacgttagaacatgagggaatttccgttttggtcaagacgactcactccataagaaggagagattgaggcatctaagaagaccatctgccaccagatccgtctagcagtttctcgagtaataatcgactcccatcgacctgtccatttaagaggctgatcgcctggcttgagttcgccttgctccgcgcctaatctatttaaacccatcatttgagcgatcttcgggagattatcgtcaaggtagacgatcagcaacgattaacagttacagagaccagtatagactgcataaatactcaccttcacaccactacccaggataccccaatgagcgtcggcccgatcttgatttatctatttcagaccaattcaatcgaaagtattgagaaagatcagacacaaaaatgatgacagcacgtttgaataaatattaacatgaagctgacagaaggacaaaataacatacaaggtagactccacaaagcacgatgacttgaaggttctcgagcgaatgattcgccagaaagtcactttgccagagggaacctctagcaccggcgaaccacatggaaggcagaatttcttgatcttctttagagaaaccaagagattcggccttatcagagtccataaacgttagactcaactggaatgaggtgataacgtatgacaaaatgaaagagaggagattttagttgtgagctagcggaaaaggcatcagatctagataactccgaaactcacgaggagaagcatcaggaaaagcccaatccatgaaggcgcacacagcgcggctcgcttgtcatgcgggatgtcccagaactcgtggcactgccgaaggacagtgggcacgtctgtgtaattgctcgaaaactagattgtcggttgaagatacaataagatatgagctgatctagaaagcaagtactcacgaagacagtggtggaaccattctactttggcaaagtactatagacattatgagatcaaaaattgtcaataatattactcgatcaaaaacagagatatacaaatgaacagatccaacatacgtgttcaatgagcgcctcctctttctctcttccaggcaaacaagacatgaaagcctccatatggagcctagaaacaggatcgagtatgtcgaaatagagggttagtgtgttcagttttaggtttgattcattctgagcgcgtacgcttactctgatcgctggaagaaggtctcaaatatgagtgtcgggttccctcctttcttgcccaacagtacattcgcgatttcttgtcgttttctcatgtcctcctgcttcgcccgctcctcgtccgcttcatcgttttcgccatcttcttcattgtcttgttcgggatcatcctgatcaccctcatcctcgcgctgaccgcttaaatcagattgacgccttcgttgtctactcgatggagcgagtctgtctttgaatgttgggccaggcatcacgccgagcttattattctgaggtatcaccattgcacccaatgggccaccttttgatatcattggtggcttttgacccatagaggctttcgaaggcttgttgacaagcttgatggccatcgatggggaatcaacttttccagaatttggagtacttgaggcatgtccggttgcggctgagcctgaatgagtagtgatcggggcagaatcttgggtgaaattggagggtgaggacgtgagcacttggttaattgttgatgttgcagcagaaggtgtccggatgggagcagacacggagctcaaactcggctgggtcggctgagtggtcgaggatggttctgttgaatcaagaacggaaacctgggctgacaccgaagacctaccttcggcggcagtcgagcgaggagatttgagtgcggacgaagatgagttgcttccggtgaaatgtagattggtgacctgatctgaagataccggggcggcgacctgggtaggatcgtctctccgtctgccaaaggcaagatgttcgagtgtaagggcggcgccttctgtctctgaatcgattcctgcggttccttctcgactggttccctggccgtcgccctcgcctagatccatggtcgctcttcgtttttttttctgtcgaacctcggaaggaagccgtttaaagtcctcttcgtcttcactatcatcgtcttgctggtgactgctagcttggtcctgtcgatgttgttgtgttgatcgttcttcttcgtctaagtcgtcttcttcgatagcaaattcatcttcatcggcggcttcttcgctattttctggcttatgattactgtcacgacgggaccgaggtttggtgggaacgtcattttcggtccaagcgagtttttcttgaccaacctgagctcttttccttctaggccggtctcgttctaacctttgaacgagggcctcaagcgctatgacccgatgagtgagagctaggagatcgagctgagacgcgcaggccgctgattgaggtgcgtgtttctcgacctctctacaaaccgcagcatctcccctggcgatacatggttggcaagggaacttccggtcgcatttgatctttctgaagagagggagttttaaattgagcattatgattgaaatcaggacgcgtgtaggaacatgaacgggcaaggaaaaaacgagaagccaacagacatcagaaaggttcggaaatcaggatgacccgtttgcgttattcatccgacaggagagattcaagacacaagaaaagaacagagaacagaccttcttctgcactctgaacaactctggacagctcgtttctttcctttatcctttccgctcgtcgtggtctttcgatctttatcgtcctcgctctcctcctcttcgatctccctcctcgctctctttttggcgtattgatcgtcttgaagcgagctgcgtgcagcggtccgagccggtgctggtactgatgcagacgcagaagatgaactcatcgacagaggtgcgcccatcagagcattcaaaggaggcaacgtcgaggcggagaatatgggatgggaggtgcgactatcttgcgggaaggctggccgggagggatg

SEQ ID NO: 303 - DNA, 12169 bp, Xanthophyllomyces dendrorhous
ggaaagagattgagaatgcaagtgtggatgatgtggtggctgtggtggctgtggtggctgctgtggctgctgttgatgggagacatgttgagattggttgtgtggtgggtatggtatcggatggtaagaaggttgctgctgagggtctgggtgctgccgatgttgttgctgatacaggtggggttgctgacccggatgaggcggctgctgctgctggccatacatcctgtttccctcagtgaaagtcaagaactatgcgaagagaagatcagagagggagtgtgttaaagagcgaaaggaatgtgttctcagacagattctgtgaatgcttgttgggtttagaactcttagtcttccctaagaacgttgaacgatcgaatatcggtggatttggccgaaattagttttatcacgcaccaaccagaccagagactaccaatatatgcatggctctctcatcctgtttctttggtctctttcgtggttattacagttgcttgcttcccagctacggtcgtattcgcctccgttgagatgttgtccatataaggaaagaaagagaatatgtaaaaataaaacgttgtataaaggaagcatcatttcacacacatccacacaccctgctctttcacatatacacactctactctagttcgtccgatctgatgtcgacactagtaaacaaaaaaaatcaatcgtcagaaaaacgcccagaaggagatgacaggcagagaaagagatataaaagagtagacacaacccataacacaaacgttcgacggacacttacagatcacccgcgtaaaagttttggctaggttgccaaatcatgactatggttcagttcgggtttttgagtcgattagaaggaaggaaagttcagtcaattttttccatactttatgcttgatactgaacaaggaatctgaggaagaaaaaagagaacgctcaccgatattgtcctctgatgtactgctcaggccccactcgacgttcgggttccaactcagatcgctcggcttacttgtgtgaccaccatggacgaacaatagctctggcgggccatcgtccgcgtcttccggtgtctgttcatctccgatcttggagagatcccaaatattgacccgacgatcggaggacgaagacgcaaaaacagtttcgttatgaggcgaccaggccaactggatcacctcgtccgagtgggactcgaaagagtggagtttgacagataactttcggagatcccaaagaccgatcgtcttgtctccagaagccgtcaacaaaaggttagatgaactcgggctgaacgctaccgcgttgatctcggcctgatgggcctcaatctggtgtctcggcttgaccgagccgtcctctctagtgtcccagctggtgcgcgtgggtgtagttgaaggatcgatgttcaggttctacactctttctaacaaaagagtgacaagatagatacaagactccatactcacatcatcaactgtcgatcgtctccacaagaagcaaaaaggtaatcatgctcgttatgccacgcaacatcctggacagatcaagaattaaaatttgcacaaatattttctttagagtagacatcgaacacgagagtgacagaaattagagactcacctcaacgatagaagtatggcctcggtagactctgatgggatcgagcgagttgtttgttttcgaatatccattgatgtccctagaagaggcgcacatacacataccggttgtttagatagttagttcttcatttccgctgtccatcgtcaagcaagtgtctcgacactttcccacttaccaatggcaaacggtggtgtcctctgacgcgctgagcacgtgtccgctcttgacaggattccaacagagcccgtaaccttctttgctctgtccctttagtcggagatctggccggcttactccatcggcactggcctcgcttgaatgctttgtccggtcaaacacacagacatcccctgataccgtctttgtagccaacaagtttggattctggggcatgtaccgagcccggtttatctccccatcatggttgatcgtctgaatggccgtgactctggcggaaggtccagcgtgtgagcctaattctcctcgatcttcatcgtattcggccaatccggacgacagagacccggacgacgcgtttgggatctggacctgggcaataattagttggtcttgagcctggccagaggtatgcgtcccgagaagaagtcgatgcagagtatagtctgcgttgggaggcctagagacagaatgagtttcaataatattattttcattcccagcagggatgtatgtgttggatcaaggaaagtgtaagagaaggaacgtacgactcgacgtcgggaaaccattggcaggtgagcgatggccaggtcatcgcgtgggttaatacctggtcgtacaagaacggagtgttcttcttccaaatcttatactcctgttgaatgagtaagatggatagagaggacatgttcaacatcttccgcttaatgtctaagaccagaacagaaagatgcggtcccatggtgtccatctctctgtattcgcctctctttagttctatcctctacttgatctttcggggctctccacgttcatagacatgccctcttatttctcttgatcgcaagacaaaacggccgtcgcatctatccagacgagacactcatcccccttgcgtccaactttgtattgtacacgcttcggtcacacaaatgcacaacgtgcaataaaagctaggtgatgcagaaagcagacagaaggtaattcattcaaaagaaaagtttcgaaagggctccaaacgaacctcattgattacctggttctccccagaaggatcgacctcgtcatcgtccacctgaataggcgcaagggaagaagccatcgtgtggtatgtatgtatatgtgtcgtgggtgagggatagagtgatgttgatcgactcggacgcgccgttgttttttccctctattagtttttttctattagacaattgccagatttcttctaatcctaatctttccaacttttcacgaccttcatctcttttcacccaccttcaaccatcccataaccggttccatctttcctctttcgctctcctttcttctctctcacgtccaagcaacatggactcagacgaagatgatgccttcctatatggaacccctacagccgttgacacgatctcctcagctcaggttgcggcagatgccagctctaccgaaggaacgaccgtcggaatcacaacgtttaactctgagaacaccggagctggatacaaagggagcacagagacagccgaagaagacaatgaagaagaagaagaagaatacgaggaaggaagcgaaggggaggaagaggaagatagctctgatgatgtacgtcgccttttcctctcgtgtctcctctctggatacattctcatcggtcttcttacctcctcgtcctctgttcgacatatctgtttcatgtttatatcgacatgtgctcaatggcttcgttcgttttccatcctataggatttagagattatcatggatcctaccgctagtcggacattggatcttcgaaaagcgccttcaaaaatggtcaccttaggccacggtctgggggcttctaaggccgttcctcctgtcgctagaattcgttcgtcactcgctcttcatccatatttgtttaagatagtcttcctccgttaattcatgagcagacctcatactcatgactgttcacatcgcttccctgactgaaacgcaacaacagccggagactctctcactgattacacaccctcctcccgaccgaccgtgacatttgcacctctccctccaccttcgacacaatcgaccacgcttccgtcctccctgccttctcagagctcggctcaacctcaacagacggctcatctccagccccctctggcggctcctcagccgacgccgaacaacccgttcgcacacctacccccatatcttcagacacacatgaacgctcatctacctccttcacatacagcttcgacggacgtacctgtcgatctaaacgcccctccgttcttgccagatggaagaagtgtttatgaaattgacctcgaacagatggagagaaaggactggagggcacctggggcggacgtgagcgattggtttaattatgggtttgatgaatttacctgggggctctacgtccggcgcagacgggaaatgggggagatgattgagagtggaagcttgatggtaagaagtttctatacctctgtgcaattctcatctatgattctgagaaagacagcatcggaaagaacacagagcgtatgctaatgggttgatcatgtatctcaacgggctggtaccaatatcttgctgcaatgtagcagcagccccttttgccgacgttcaatcagcagcaacaacaacaattggagcagcagcagcagcaacagatgatgtcgatgatgggcggttttggcaatgggttccctgggatggacgccagtgggatgatgggcggaatgataggcggtggcatgattcctggaaacggaatgcccgccggtcctagaggtcagtatcttttcttttcttgttcttagagctcaagctctatatctgtggatttacagttcttcgtttaacctattatctctgtcgacgccaaaaaaacggggatgtgttgaattgcgtatatgcactctcagatctccaagcagaacaaggtttcatccccgaccaattcaacacccaaccagatcaacctcatcttcaaaatccgaacgtgatgcgtcatggagctcctaactccaccatcagcacccgaggcgcgtacgccgcctctcgcgggatgcgtggcagaggtggtgctcagtctaacggttctttccgcggtggaggaaatgtcggtcgaccaggaaatccaaatatcccgaccgctccttccggtgctggtgttagtctggctacaaaccctcatcagggaccaaataataacttgaatcctaacttgaatcagaacgtggcattcaattcgaacgtcgctccaccaacgggcccgactgggtcgtcaaacataccgactgctccttccggtactggaaacgtgacaaacgcaaacaccaatgtaaattcacccgctaggggactagcccatcggccggttggtccgtctggttcctcgactgtcaatatcccgaagggtccgagaaatgccggagggagaaaagatcttgatagagatcgaacagagaatgtggaaggattggactatggtgctattagtggaggagcgccagcgccggcaccgacggcaacaataccgacagcaacacccacagtgataacgacaacgacaggaggaacgacggacgacaacagtcctctaagcggcagtcgatccgaacgatcatcctccagccgtcgagaatcttcttcaaaggacaaagaccgggaacgagaccgagagagatccgatcgggatagagacagagatcgaaacgatcgggatcgatccgagagagatcgggacagagatagagatagacattcctcctcctcctctagacgcaggacggaagaagaaaagtcgaaggaaaagacaagtagctcgtcgagtagtagtggtcgatcttccaggcgaagtggagaccgagcttcaggttcaggttcgagttcgagggataagccatcaggaagctcgggcagacatcattcgtctaggaaccacagtcgggagagagattcgatcagagaggaaattacagaggatggtgcttccaacggaggagattccgtcaggttcgttcttttactctcttacccttccctctcgttcatccgtatcactcttcgcttggttctctttgtgatatcatattaactttttctcttttcttcttttctaaagcagcagtagaaagcgtcctgcatcacaagaaccagaaaacgagaacgactcatcatctcgaacctcaaaaaggcgttaaagaagactactttttcttttctttcctccttcttccccatctcaattgtatctatgatcgcgtctgttttggagaagggagcaaatctctgcaaatgattgattttaatgaacctcatgtcgacatgatttgtcttatgcacatacaaacacattctttctctgatcgcagtcgatagaccaagcatagcgacggagggtggaagaaataaactcattatgggacagaaatggacgaaggaaaagtaaagaatagagaatagagaaagagaataggtagatcaggatagactgtaatggcactcgatctttgtcagtctgatcaaatccgagcaccaccactgcttatatcgattaacgccgctcctacttcctgttcgtcaatcaacaaaccccccacaggatcacaacgttctacacccgacgtcatatccacatccatgtcctctctctctcccactccggcttcgtcttctacttctcgtcgatgttgctgatgatcaagctggtcggtcatctcaactggatgatcaaacgggttataatcttctcttctctctctatcctcatcgtcgtccttcttctcgccgctcttcatggttcgtccaaccccattcccgtcaccatccggcgggatcatggcgattgagatatcgttctcgggatggacatacgagccgcttggtgcatccgatggatgatcgacagattgagattgagacaacggttgggaatgatgacgtcgagaagggttggctgacgggtcggtagaagaaggcgttcggtctcgtttggcagggatctgaaattaggaggaaagtgatccgcaaaaagaaagaaaaggaattactttggaattcctttgtgaaacaatacatgtggagataagagcaaaagacgcactttgatggcctctaatgactcgggcacgctctcgcccaatcgcttcatccttgtcttgatatttcgcgcccgatctttcaacgccactctgttgtttgaatattcagaaaatgtcacattcaccgcctctatcaatattctctgtcttgtgtgggagagcttgtattcgagacacgaagggacaggaaccaaggggaaatgtatatgactcacgcatttcggttagagagaatttgggagaccgacccgttaggaccatgtcgatggattatcgaagcccatgggagcgtcttttcctccttgtattccttcatctcgttcagcagacattcatcttcctcggccgtccaacggatccttccagtctggtttcgtccggtaaagtacgtatagcctctcccttttcttgcttgcccctgtccttcgcttgaatccggattgacataaccttcagtttcaccttccatcgaagctcttgtcgttcgttttcttggttttttgacttttacttgagatgatgatgaagatggttcaggttgtgtttgagattgagggtacgcgtgatcaaccgtaggtgaacgtccgggtatctgctggtaagatggtatctgtttcgtgaataggcttaagcttagtcaggtacacgttatcgaatgtcaaaagtacacgaaagatggcaagaaaagaacgaacttgagactgaagaaggctaccgtctctttggccggctgtaaggtgacatctcatggtcagtcgatatttctactcacaacgaaataaagttagaaatcgtgggtgaagatccataagctaacccaaaataaaagccacgttctcaagtatctctctagccaccgctccttccttgtcttccgcgtcccagccgtcctttctctgagtatcctggccgttcaagtctgacgaaaattctgaaagtttttcttccgaaaccaagactagtcggtccgaaaggaggttgttctcttcttccgtccgacctagttctccttcctgttgatcttgttctccttcttcgtctgcatcctctcggtcaaactgtgtggatcgggtagaacttggcctattcttcgagtgctccatcatgattgaatcctcttcactctgattctcgccattttgaccaaagatgaaagtctcgtcccgcgaaagagctctgccctgataagaaggagatggcgtgcctgtcaggataggtgctgaaggttgggtttcattgaagttgaacttgtcgactggcctgtagaagagaatgagaagggtgtgatgagtggcagaaacaatggttacaacgatataaagaggtttgagaaaggcaaaaggaagacaagaaaacagagaaagagtggatacgcaaccgagtgaggaatggcttatagattgaattttgaaggaacgtttctaaacgagaattgagagcatccagcgggaacttatccccaagctcgtccggatgattgatcttttgtacatatgccggttatcaagtaggacattaatttgcgcgctttctcggatagatcgttaatcggacgtaccaagatatcaactctgtccgctacattatcctcccagataccacccatggtttttcgttcagcggtggagcggaaaatgccttcagccttagcatattggcctgacgaaggcggtgggtcgagtagcgcggtagaaaagaacgtttgaatgagatcttctccctccatcgtggtatcatctgggcgatggatggccgactgtcatcaccattcgttagtaaaaagcttccacagctacgtgaccatttctccccttgacttccgtttgttcggaaggaaggggagtaacagttttgattggaaacgaaagagacaaacctgggtacagatgtcaagaagcacatccaaccaatcgctcaacacctcttctctccatgccttttctcttctaccccttactaaagcgctctccacgccagccttttggttgacagatgggtccatcgacgcgtccatcgacataggtcggaggggacaaatcgaatgaaggaaatttgtcgatatggtctcgaaaggggacgcgtcggacagaggcagagacaggatgaggagagcgagggaggttggatgggccgtgcccggaaggaggggcggtaggggtacagagcggatatctatggagatagaggggccgattagttaggaaccattcccttattttataacaaaagatagaaaatagactgaaaaacaaaagggagagggacatactctccaacgcttgttgaccagctttcatgagttgctcgtctttgtgaaaccacccctcaaggatcatgctggttgggtcctggttatgtttaggctctgctggttctaccgattgggactggcgtgattcatctggctgatctgctattgagggatccacgctatcacccaacccgttttgtacgtgttgtttttcatcgtcatggtgagcttggtgagagcctgaagagccagatggagaaggaggggcaggaacggtgttcgaaagaggaactctcgcggtcgaacgggtcgacctagacgaaggaggagccgctgtgcgagccatggctgagacctgtctggactggatggcaatgagtgaagaactgaagggcagaagcgtaggaaagaccaaaagaacgatggatgtatggtttatggctcaagaaggaaacagtggattctgccctctcttgttctttcttactctcttgataagattacagagctgaaggaaacagtgaaggtgagaacgaggggaggcaggtagggttgagcgccacattgggaagaccacgtgagaaacagggtaaaacaatttggacagccatgacatccgattcaagcacagccacactgaaccccacgcgtaatcatctcactccgacacttatatccacctggaccgtatctcatccgtcgtcaaccatcattcactcaaacaagtacacactctcgctttcacattcacacacaaatacacacactataatgtctcaatcagccaaactggttctcttaggcaagtctttgtcatattacattatgaaaggagctattcagaagctccttagtctctctttctccttctctttctttattccccttggcagcaagctccacttgcagtatatcttttcattttccattcccaactcttctcatatccttccactgatctactgcatattaacgtctgtctaatatacaaacacaactctgagatattgaaattctttcgcttgctctgctgcttccttgcatgggcggggtccttatcttcataattgctacattgctgattcttcatccactcttgtattgattcatatgtcctcttgttaattctgttaatttcatcttgtataaccatacaggagaatccgccgttggaaagtcatccctcgtccttcgttttgtcagagatgagtttagtgattttcgagaaaggtatgttgtcttatatccttggcttctcatcgtctggctcgtgcttctacgacgaggccgatcgatgactagttaagaccgggcaaataaggcgcgtttcttccgataccacagaaacatttcaactaattagtatctctctcttttctcccctcttctcttctctcgcccagtaccattggaggtccgtcgttccttatcttgtagtgttcaccttccaacgagatctgccctttagttaacctcgatggacgttccttaaattatgttctcaacacatacccatcggtgcttaactactgccgctgcaacaaatcagccgctttcctcactcaaacacttacgttggaagagggcaaagtgatcaagtttgaaatttgggataccgccggacaggaacgtgagtagacaagacgctccggttcaagattatgaacgacttggtctcatagagcatgcgttaatctctgaaatgtcctctttactgttcttggttgaaatctgttcaggatataaggttcgttcatttttcggggtcggcgcactgcgagaaagaaagattctgacacaaattgttctctacagagtttggctccgatttactaccgaaacgcggctgcttcattgtatgtacattcttcagcacaagatctctcttttgtctaatatgcttactccgatgtcacaaattttagagtcgtatatgatgttacttcgccgattgaccagagttttgaggtatgctccttctgtcatgttgtttttgcaagccgacgaagatggtggtagaaaggtgcatgcccgattatctctagttctgacgacatcgccgctcttgggtatcaatctacattttgtttgcatcttcgctctcattcttgaaaccattttgatgggatgatcgccaacagaaagcaaaatcctggattcgagaccttcgtcgacaagccgacccatcactcgttatcttactctgcggaaacaagtcagatctcgaggccaaacgacaagtcccgaaagaggttggagagcgatatgctcaagaagagggtttggtatgttatttggtttgtttgtacgcaattgtgacggatgaagcccatctcatttacgtatcccttgtatgtttttattttattggacagctgtttgcggaagcaagcgccaagactggagataacgtcgagaatctttttagagagattggttagtcgtcttctttctccgtcttgaggtgttgttcgatatgcctgattcttcgcttcctgtcttacatgtataaacagccaagaacttgccagcaccacctcagcgagtcaaggcgggagggtcgggaggcgtaggaggcaacgctgcacgagctggagttgatttgaacgggaaagacggcgcgggagatagcgcttgttcttgctaaatacatcgactcgtctctttcttcttcacatatttgcctcttccactagatatccctaactcagcacgttcaattgggaaccttctgaattacatcctctcgtctttcactgtctctatgtctcaatgaggtggaatttcatttgttcctcttgtttctatcttcctcttctcatcagcagtgcggcttcagccgagatctgttttgtatcttttgacgtctcctctcatgctttatacactcttgcacttttcttggtcgttttatgtcttctccgctcatcgttctttacgctttcatcgttttatcatggctacttgattcgttgtcaatttcgtctctttttttttttttttt

SEQ ID NO: 304 - DNA, 19679 bp, Xanthophyllomyces dendrorhous
tttttcttttttttttgggtaacgcagctcttcttctctgtcttgaatgaggtagtttaagctgagaatgtcgagtgtcgttgctgtttggactctggttagggttagatcaagctggtcatcaacacgtcagttgcaagttgcatcaaacgtcgaccgtctccgcatactctctccggatagcccttctggtgatgccggtactactcataccacttctcttcctctcagtgtaccttctctccaagagcattctggtcagataccgtcgaaaagtccttcgacagtctgccataaaccttcaaactctcctttcgtcaacctcctcgtcatcatcactcggttctggttcaagcatcaatggacacacggtcgttggtctcttccacccattctgtaatgcaggtggaggaggagaaagagtagtctggacggcggtagagtttatgcagagagttagtaagaaagagaaggaagaaggaaagcaaggaggtctacagattctgatctatactggtgactggcctggagttgcaaaggatgagattttagaccgggcaagggtaagcgaaatattcattctcgaggcaagactgataaatgagaagaagagaccattaaccctttctcttctctctttgttatctcatacgtattagtctaggttcaatatcagactcgacccagcgactgttcacttcgtacctattcggtccagagcgatgatcggcgattcttactggcctagacttactcttctcggtcaagcttggggttcgattatttgcgcttgggaaagtctagcaggtgatcgagggattgtgcctgatatcttcataggtttattcttttgttctctcttttcaagcgaaaataaagcgatcgttgactaagaaagaaggtttatgttctatctcaagatacaatgggcttcgcttttgctttcccagttgttcgtcttctgtcgggatccaagatacccataggcgcctacgtccactatccaacgattaggtcagtttcttattacttcatgccttgagaaactgtccatcaagatctgaccgaattaactcgattgaaacttcttgtttcctttgggggttaaagtactgacatgcttgaacgcgttcgaacccgtcaagcgacacacacaaacacccatgttgcatcttcctctatccgatcgaacttgaagctcatctactaccgctttttcgctctcctctacacatttgctcttgggcttgtcggtcctcaaggtgtgatctgggcaaactcgacttggacaaaagatcacttagtaaagcttttaggagaaggaaatgatgtaaagattctttatcctccttgtgagacgggcgcactgagtgcattggagcttgatcctgggggaaacggacagagggagagagtgatcctaagcctagcacaattcaggtacccaagcttttctacttcctcttccaaaaggttgatttgcagggggttttctgactctttgtatcgtctcttttttgtattgggacgaaaaaggccggagaaggatcatccgatgcagctacacgctctagcagaattgttcgctcgaaaacctaactggaaggagaaaggaaaagaccaagtcaagttggtgatggtgggcagtgttagggatgaaggtgatgagagaagggtgcagggcttgagagaattagctcaaaagttggatttacaggtagtgtgcctttttacatgttgttctaggtttcctcctgtctcgatttgaacagaattttcttgatttcaatcgaattacacgaaaaacgacaggacaacctggagatagtggtgaacgcgtcataccaagatctgttgggttggttaggaagatcttcagttggaatagcgacaatggtggatgaacatttcgggataaatgtcgtcgagtttatggttcgtcttttccctttttttactctgttttttgagcgtgtctttgtgcttactcgtctacacccaactgtgcgcgcacaacagtcagcaggtctgatacctctctctcatgcctcagctggtcctttactcgatatcatcataccctatcacgaccttcctaccggctaccacgcgaggtctgcatctgagtttggtgatcgtctcgtcgagattttcgaattatcgcagaccgaacaacgagatctaaggatacgcgctagagagagtgtcagacagaggtttgggagagaggcgtttgaggatggatggatggatggatgggagattcttaggcaggaactgaggaagaggcaaagagaagatgaacaagagaagagacaagagaaagggaaactagattgaatgacgatttgatccttaactcatttctgatgcttcgcgtgaaagaaatctcggactaaaaaccaccgctcgaaaaaaggaagaaggacacagtggacgtgctgtacaaggatacgacaagaaccattattgagacaaatggaggggagtcattgtaaggtgatatttcataatggtcttttgatgttcaaaataatcacagtccaatccctcctcccataccggtgatacccgtcgtatccctggcccttgcaacttcgctctccgtcatcctacttttcaaacccaagaggcaaccttcccagaacccttctgcgtcctgttccttttcgaattgacccaatccaaaggtgtgaagagcctgccagaaagccggatctgccaagcgctgtacgagtggtaaacaagggagagatcgaacgaatctggtcagtgagagaaatgatgatagaacaactccgttcgaatacaaggcacatacagcatggaaagaagcttctgcaggatggaggtcatgcgccgatgccgaaggttgcgtggtagttggcagaggaatcgctgtggatgaagtatctgtcgagattgtcaacgttggaatcgccgatttagccgtcgggtcgaccgggggctcctccgacttgatctcaccgctcgctgctgagctctgtgcggaggagtctcctccagggatccaacctgctttgatcatcaacaccaagctggctccatcgacgatatcatattctttcagcaacttcgaatctgccaaggcttttcctttgaggagaagccgttggtgagatggcggaggagcgtccggctgggcggccaattgtgatttcagagaagagatcgggtcggaaagtgaaacattggaaagatggtaaaccaaagcgggcttgagtgacttgacagtcaaagtgatggagtctgtcgttattggttcacaaaaggttggtcaatcatagcggcacaattcggtttggaaaggaagcaatttgatgaacaagacaaatccggcatgttgtagatgcagaacataaccttcctagctgaaacgaaagagtcgttcatcttgacgacatccaaccccgatccttttaattgcatctatgaccgtgatctttctttgcgttgaacacactccctttcccatacaatatatttctcatctcactcaacagagacacagagtcacggtgatgccttttcggaaagcgagaaagagaacacgacgataaggagcaaatgcgaagagtaggtccaacgaaccttgcgccggtttggaatctgaaggagcagcttctacagactttggtaactcggccacgtcgatagttacaagcggtgcctttctaggttttttctctgggggagtctgaaagtcatcagggagggcgatcggctgagaagcgatcgtgtcgatataggatcggataaattcgcgttgatctatggacatgatgtcaagtaaggccaagagaaaggagatggtgtagaaggaaggaaagagagagctagtggaggattggcaagatgatagacagcggatgacaaggggacttatataacatcaactcgaataatatataacagcacatgctaattttttcatccattcagttcctcatacccaactcgtccacaactcgtccacaacatcgatcgtatccagccaaatccagagagaacaaacactctctatttacgccatatatcctggaaattgaaacgcgacacgttttcgagcgctcgattgatgagaggagtgatgcgcgatgcgcatctcaaactgtgacactcttcttgtcagagcgtatgtatatacggaagagagcgcatatgattgaagaatccgctgatgagtctgcagattgaatctgacagattcctaaattcctagccagtccaatgtcttctgggcttgttcaggtttcccaggatggacatatactcaaagcggccttcagaggtttcgttttcagacttccgtcagctgagaaagacattacgcacatgcacacagtcaggacggaaacttctttgagtccttcctcctacgtctgctgtaggctaagaagagagatggtaaattctgacatatatatacctcatgataaccccggaagcaataacaaaacaatcaaaagaagcaatatacttggtacagaaacggagagaggagcgaattgggtagatatacagattgacgattatatgctcaagggcagacgactttcagatacatcaccatcctcatcttatccattctcgtccagtgaggtcacgcttgaagcactcgatgttattggcgtcttctctcgtcgagtcgatggagtcatcctgtcggacttttctagatctttctcgaacagagttcttgtcgagcttgagctggacaatctcggatctctatcttgttgagcgaacgttgaaggtggagactcggaggattgattcctgcggatgttccagcgccgatagagaaggtatccgattaatgctgaaagaacaaggcccgttatgatggttgagatgatcacggcgattagcaccgatcgcgataacccagaagaggtagtcccatttttgattgaagcatgagtgtgtgagctcgaagcaaccaagacggaagatgatgccctaggcattgggtagatagtggagaatggaaacggtcgaaaaggtgctctatcgaccagtgtggctgcaggaaaaagtctattcggacaaattcgatcagccaagaccgccttcgtaagagcagctggcaggatatgataattgaagattcaggagaggaagaagcacatacggtgacatgttgtttaccttcgttccaaccaacagaactgtcgaaaagtttgagtggactagggtaagtgagctgaaggacgaaactgaacattgggaaaggcttctgaaggttgatacttataatcgtttggttggtagacgagtgagaacctttcttaaaggtctgctgtccatctgtatacatacaccaagtcccggaaaggtctagatccatgcactcgagaagaggaacatgccgggtttgagattccaggagatacaataggcaaggcgaggcgggcgagaagagtgaggtacatgctttagtgcgacggcgtttcgggctagccaagcatagaaaatagagtgaacggacgcatattcaaacagaagataaccccatccgagactcagttttgtccttcttcctttgactgaccagacggaggtcttgagagttgtatgaatggtcgatccgatattcatgccagagaaggaaattcacgtgtgactatgtatcctgctcccttccctcgacttgtgaagccgagaaaatctagcagatacaacgacatacttgggcggccttgtttattatccactcgggagagggatctttatgattgccatttcatcaccaacagagatgtatacactccatgaaagtctttctcgccgtcagcccgataggttttagggaccgattagtatgaatgtatgttctgttcgtgatcggttagggatagaggtccttcggctgagggatgataagataacagcgtgaatcaaaagggttcacctcagatttacgtcatgagatgaagaacctttctcacctacaccgtccactttcccaacagatgtctctcaattggactcagatagatcattcttcactcaggccaatccctctgccgagtaagtccttcctagttgtcgggcttggtcagattgctcttgactccctgtatactgtgtctacagatgaaatactcttggaaagcttctctgggatagaccttgagctgaggcttccggtttcgctcatgggacctaaggttggttcagatcagtcttagtcttgtcagatggctggacgcttaactgtctttgggcctaataatctgtctagcgaaccactcgatcctctggacagatacatctctcaaatcaacgtgtaggacaacctcgacaatacttgagatgtggcaaagatgttcaccatactgatcaacgcctatcttctatcatcgtccaggtcatctttgtgtcatctacagcaggcttatcccctcctgatgctcctcctccttcgacatcatccgcttctgatactctcggatcaagctccagcccagtggtaaaacaaccttcgacagatgccgttgggttgcctatcttcttgaagagtggtgtagaatagtaagaaccgtctacttaggtttcgggcgatcgaaatgtctctgaatcaaaactgatgctcaaatttctgcctggccaatatttgattgacaaccaagtgtatcctccttcctgtctattcgtcagccttcagacacctctgctgctgaccctcaaatatccacgatctctattcctcttgctcaactactcgatcgcaagttcaaccaaaatctttttgacagtaacacggtctacatttcatttcgtcctacctcagacggaggcttccccagttctcgacaaggtgtagaatcaatcgagatcactctagcattcaaagagggccgggtatgggagctatggaaggcattggaaacttgtttgaaacgcgcttatgccgatgaacttgagagaagaaggcagaggcaacacggggaaagcctgcgtgagcatcttctctttctacttgacccaactctcttcttttaatcttgcactttctaatgttttcacttctgatgtcactttctagccgcttatccaggttctatataactagctgtttctctctctctctctatatctttccatatatgcttcttcagaagaattgcatactgcacatgtatatatgtacaaaatatccaagctctaatttctctttctctttcctccgcccccacctccagctccgtccttcctctttgcgaacttttccaaagcgccgacatcggcgatctgataatctcccgtaccgacgacccccaacacacctccgctctttgtaagccgaccctgtcttctgacggcctcttgcattcgcttctccgcgtctcccttcccttcgtcgtcgtccctgtcccacttggagccagccggtcgaacagcagtcttcttcgcggcagacgaacccggcaaggatgaaggcgcatctctgagggcaaacgctttggcgagatgaccaaggtgaaggttcttcaagtggaagaaccgtttctcctcggacggatgggtcgagtatgatcgaacgtaagattggaatgctttttgagcaagcgtggcattctaagaaataattcgagaaagaagaaaaaagtgatggaacaagaagaaacctcagtttctaaactctgaacaaaaggaacccgaaagatatagaaagatttggatagaaccggaaagaacacgaaccttggtctcccctagaacccatcgttccatcgcgccctgaacctctgtagctcgattctcccagttctttccacctcccaacccaaccttgaccacaccctcgactccgacaggtttcactctgaccccgccacccatctttccttcgatccagggcacccaatcctcttctggcccgtttccaacgaaacaccatgcttcacctccttttcctactcgagctgttcgcccgactcgatggacgtactctgtgacacctccttctgtcggaagatcatactgaacgaccgcacggacgagcggaagatccaatcctcgagaagcgacagacgtacagaacaacaccgctgacgtaggcgaaggcgtggcgaacgatttcaatgaggccaatcgagtctgaagtgggagcgatccatgtaatcggtgaagtgttgtttgagggaggagtacagatgattgggtgattggttcggatttgatcgccaagtcttttttggatgtttttggcttttttgatttctttttggaagtcgtctttggttcagctatttctgactcggaggatgagactgcagcaacatcttcttcgtctttgccatcctcatccgagtcatcaccgtcttcgtcgcccgatctattctcttctccatcttcggtctccttcttgccacccattccaattccacccaacatcttccagtggaaatcaactgagtcagtcgtgctcagaaagacgatgactttcttcccgacaacctgtcctttggcgtccttgatttcctttttaggggagcacaacgatcgtagaagtgcaaccaaagtgacgagtctcaacttgggaggaacgacgatatgagattgcatcagttgagaaggaggagtgaacttttcctcttcctcttcttccacctcgtcttcctgcgcttgtgtgttcctctccatccttggtaaccgtggaagattcgacatccttcttcttggaagcagtcttgacagccgacaccaatttgtttggattttctgccactcctcggaacaccttgggccgcacaagtgccacacccgccagcgcttggacgtcctctctgactgtagccgaacaaagcacggttcgtcttcttatatcccaatcccatccaccaacggtacctcctcggcctccatccttgagactctccaacgcgagctttcgtcgaccgtcgagagatttgaggatacccttaatggtttcctcaaagccgagatccatcaatcgatcggcctcgtcgagtacgagccatcgaagctttgatacgtccagtgatgtggtattttgcaagtgatccaacaatctaccgggggtagaaacaatgatgggcagtccttttcggagtcgggctttttcatgggttcgagtggatcctcctgtaagaagaccaggaatcagccatcgggtcagcctctgttgaggtgcggcgacgggggtggccaatccggtctcgtccgaggaagcagccgtcggaagggaaagattcatcgatagcagaccctcaaggacgtcatagatctgtttagcgagttctcgagtgggaaccaagatgatagcaagcgtaccgatagatcggtcgatataactctgagaggaaagcgggaggagagaatgaatgattggaagcaaatacgtcagtgtctttcctgaacccgtttgggattggatgaacacgtcttgaagagaagcgggtgaggttgaagaggcttgaagcatggaaggaagagcagtgcgttgaatcatcgtcgggttctcgatcgacatcttggcagataaatggtgagccaaaagaggggataatccaaggtcgaggaacgaggcggaggcagatgccgagggtataagagaggtcgactgggtggttgtcgaaggattagaggcaagaggcgcattagaaggttcttggaagcttgaatgattgggtcgataatccatctccgaatcttcttcgacgtaatggcttttggggtttgaagtgaacaaagaagaaatgatctgtttcgggttaattgctcctccaggagcctctgccgactttgtggcgcctgccttagagaccactctgtcttcatagtcatcctcatcatattcttcgccggcgtcctcattaaagtcgaacttcggtcgcttggatggaggagcggcttgtttggagagagtaccattaggtttgtaggtcgatgtggtagctggacgaggagcaggtgcgggtgcgggcttggaagcaacagcagtggtggaagcggcagagatgggcttatcaaagcccaagctggacgaaggaccagctgaggaaggtttgttactcttcttgggaccgttgttcttgttggctttcactctagaaattaaagtaggtatcgatagaagcataaaaaattagtacaaaatagaaatgcaacggtgtacaagaattcaatgaaaggagaggaaagggaaggaaagatttgactgaccggtctgtccatcggccacctttttgctttggcgccttagcagctgattttgaggacgctgagggtgcagcaaagttgagcacgaagtcgtccatgatgatgaagtttggtagtgtatagagaagagagtgtagagagtttaacgaagaggaaggcaaacagaaacgaagatttgaatttgatatttttgaattgataagatctacgtaaggtagaagaattaggcctcattatcttatctatattgtaacccttcgattgaccgtaaccgctcaactccctactttcttcgtccttccggtccttcaaaggtagactatcctagaacaattcaagaagactatccaccagctcacacacacacgcacgtatatatcaggagtgacttttcatcatgtccctcaaagggaaaagccgtcgaatattcacaccggatgaagttccgtcaccttcgcctcaaccgagccagccgccttccatcttggacaccgttcctggtgaacttgttcgtatcgtttctcttgtgtgtttcttgttctcttgcatcctgcccatccgttcatctcttgctgatggtgaccgttactttctgttgggaacgcttcttccttctcttttctcgcaggtgtttcttcgagcattgactcatcatagacccctaggtctagaccgaaactttcacatggtaggccttttgacaactgtcaatagaggcctagtggggatggatggagctgaagaaggcgtgacgagtgaggagctttggaataagcttagcagtatgtggaatttagagagactacaagaagctgttcgtctgctcttctcactttctatcatcttggctagggtcgataaaatcatgctgcagacgcgtccaaagtttgctcaacatgcgccttgtctttctgaaaactcattatcagaacactccaccacaagtgccttctccgacggaatcattccatcttcctccatttccgacatttcagcccctgatggatgaacgtcgcgtacactctgcaagctcggtttccccgcctagccggtcagccaaggcagcgttgaaccgaaacaagcgagctcctagtagcgatagcagtctgagcggacctgaggaagagccagaagaagaagaagacgaggatgatgatgatgaagaagacgaagaggaggaagaggaagaggaagaggatgaagaggagatccctactcctgttaaaaaaagacggaggaggtaggataccactaccattctttgtcttccatggattgcaaggtagatttggatcgtgttgtactctttctgcatatatttgtatattatagaaccttcctcttaacctctatttcatcttgttgaaaattcagcaaaatgagtatacggaacaagaaacgaaggatttgaattcagctgaaaagatcacttgtgagacgtatggcttctctagcaagaaaaaatgaaacgtcagaggtagatgattctcggcgttcatctatttgactttcctacacaatatcacctctgcttcttagtatcattgatcactcacacacacatacatacatctatcaaccagaagtatgagctccacgcctgcaacaatcatctccaagatctggtctcggatcgctccactcaagttagcgggctcgtgggacaatgtcgggctcctcatcggttcgtccgacgttctgcttcgtcttgccctcctctcagatcatcattccatgcatgcttcgttctttctgctgatattgatctttctttgttttcatcttttgttgctccaatgctttgttagaggctccaaatattactcggatctccaaaaagattctcctgacaatcgatcttactccggccgtttgcaaagaggcgatcgacaaggacgttggtctcgttctggcctaccacccccctattttctccgggctcaagttagtttcctttagctcatgtcgcctttcgtctctctgtataaaatccgtcttgtttctgaccataatctgccatcttcctctatactttgggtatgtgactcgttctttctattcaccatcaggtcgttgacactcgcgaatccgcttcaagcctcgttgctaagactagcggcttctgggatatctgtctttagcgcccatacgactttggatgccattccgaacggaacgaacgactttttggtatctcctttcaaagtaggtctttggttcctttttcttcactaaaaaaaacagatcaacacacaggttcaaatcagcacagagttaacgcttcgcttcgctacgttgggtattgggttagccccatgctgatttgagaccctgctcgccgtgtggatccccaccttccggatttgaagatgctggcgttggtcgcatcattgaacttgaggagggtctggcgatcgaggaagttgtcaagcgggtcaagaagcttctggatctagagttcggttcgtcatcaatctcgacttttccgatttgttgccagttcatatggactgactatatttaaatcgttctgtctttgcttcttcaccctcgatatcttttagttcaactgtcaaaatcccccgatgcacccgagcttattaagaaaattgcagtgtgcgctgggtctggagagtcggttttgaacaaagttcaggcggatttatatctgactggagagtgagttcatcattagcttctcttataagatgtttatcaagcttgatggccctcgtttctgctaacaattcgactcatctttcttatcgttgtttaagaatgggtcatgtaagctaatatttgtctcatctacgagaacgaatagagtcttgagctgattcaatagcgccttggatcaatcacatcatagcattccttactggccgccaacgccaagggaacatccgtcattctgtgtaagtccataatcttcgtacatcacccctatcatctagaccaagaaatgcccgtcttgctctcaacatctcattctgtttaatctgggtttattcttattttaaatttgggcacgcgtcttccaacactgggactcttcgcaattcaggcggccattccaataccgagagaccttatctgagtaaagtccttcaagctatgttggaagctgaactagaggctgaggatggagcgggctgggaggtattggtgagtgaggaggacaaggagccgttcatcacagtttgagtggccactgaagagggtgtccctctctctttaattgtggatgtgtaaatggtgtttctcgttggtgatagagggatataattcaaagcaagaaacattgtatatagtcaaatattttgtacaacagctgatggtcacacactatgggaaaatacgcttgaatgatatacaagcattcccgttttacaactggtgtgatttacaagtcaaacctacagccgtctcgctgccaactgctgattccctctttttcgagcacatatttcaaagctttgactcgacatccgtttgttcggcgacttttctcatctgtcccttgttggaccagatgtcaaccttggcgtgagtacccgaagcgacgagttgtccagtatctgcatttcggatctagatgtgagttttccgtagaggagaaggtataagctagagaaaggcaagggacgatcagatatggaaagatgtgatacatacctcacagcggagatttgatattcgtttcccgatattcatcgtgatcgaggtgatgatcaatttggttccactgtggtttaattgccacaccacacaaacatgtagttcatcagcattaagtatccactagcctctcctggacggtcggggacaagtcttacgctggctagttgtacgaaaggcacatacgtgagagagcgccagataaatcagatatatatatgcaagtgtgagctcactgacttgattcagacacagaattattctgaagaggaagggaaagagagagtccttactgctccagcatggaaaataacattcagatttgcgctcactccagaccaagcccatcgatcatccgacatgataagcatcatcggcatggatgtgcatctgttcaaggtgcgtccacataatccattgtttcgtcaatatcaccagcagattgatcgagtatcaaaatgacccggctgggtacaaagataatcatgattcggaggctcacacgtccacaagaaaagctatacatccaccatgaatagatgcacccgaattgcacatttcttataacccatcggatgtttccgagattccccgtttcaaacaacccaatggatttgaatcagtcctcaaatttgtacgactcggaggagtggttatacccgtccaaaagcttcaggactcacttgatgtaacttcaagcccacagacaacctcacatagctctaaacttttccgtccgatatcttcatcctgtgacactttttcctccggtatctctacaaaggcggaaatgatttctagacgagaagccacgtcttcgaacgcgaacgaggggttggcatgaacgagatgaagcttttcgatcaagtcctgtttatgatctattcgcatggttagactaaggaagacccgaaaatgataagtaggatgatggtgatgatcaaaggagctggtcagaacctccgatgaatgcgcatacatatccagtgatctgactactgattatattctaaacctgctccggctatggtaaataaccggctaagtcaccttagataaatcataaataatatagtccgtctagttatatttattgtgtaagtcgatcatcttcaaatcagaacatggcctatcgtattttagagaacaacacaaaaattctcaatgagagagacagaggggagaaggaacaagaagagacgctgataacacagagaggcatgagtctgctacactcgtatgatcaatcatccttcccaccctttcctgatttccttccaatcgcacctccttcaagactgacctcagcagtcgtgcctaaccctcctcgaggggaagattcagacttgaaaaccccatgatcactaacagccctcctgggagcgtttggcggtgttaaactcagtaagttgatatttctcgcattcgagttttccaactcttcccggaaagcgtttctgccaattagagagctcgatcccccaggcgtcatcctacttgggctttgaggcggaggtgacttaaacataggcgccctcatcggagaagacggaagcgaggtcggagctcgctcaccccatggcgagtagacagattgctgatttgctgagggggtgtagggacccgatggtgccgagggcgcaagcagaccttcagtgctccgggacgagctagatcgagagagagagagggtggaaaagagaatagaaaacggggtgaggattgtcttgccaatcgatcgaccagattgaaggtcattctgcgatgtcgttggtgcttgcgacgtgcctaagatatgatagaaagtttagcgttaaacacagatagagaactagcggcgaagtatatcatgactcaccgaatgaaggaagtgcgttatcgttggcgcttaagcttaagaatagatagagaggcataaaccatacgcagattcctatcaacaatcgaccgtgaaggtgattcagagaaggtaacatcagtatcaaaagtggaaggacagcgaaaaaaaaaaacaagtaagaagaatcacccaccaaaaaaggtaactacgtccatgaacccaagtccttccttcccgtatcctcgcatacctgacgtattagagtacgtaggtcgatggtacccgccacttactccgagccctccttgatttaccggcttgacatgttctgagaagtaatagaaccagaccaaatggtcgacgagcacgagcagacatgacgctatgaatgagggcgatgatagagaaatcagaggccatgttttggagaagttttgctggaagagttcgacggaggagtcaaaggtagatagaatccaaagttagaatgaggccaggatagagtagtgtaccgaaagaagactggaagaaaaaatcgaacaaaccagataaactagatggcagaagatggaaaagaagatcagcagtgccggcagcttgtcgaccaccagaaggatgagatggaatgctatgatagcctgattatcagcgtgtcagccgttcatttgaaggcataacgggtttagtgacaagaacaatttatctgacaaaaacaatgcaagctcacgtagaccgaccgcctcccgacgactttggcaagcttcgtgtgttcttctatgacctcggctatccacaataacccacttgctacagcaccaggaaagaacgtgtgtctaatcacttcagccccaacaaaagttcacagctactaatactagcaaatcaaggacaagggtgtatccagagactaaccaagactcaaggtgatgaacaggaacccagcgatggcggccacataggatgctagtgatgttgcggagaacgaagagtgaatagttttagagccaaaacctccagtcatagctaggagcaacgatcagccagagttttggagttgacgaaccagtatgaagggcggtgatcatgctaaacaataggcgtaggaaggcctacagagcgaagacaagttgatcgataggtatcgaaagatgaagaaattaggcgtgagtgtcttgaaggttagaaccgaataccaaggacgcgttggctttgtttaattcctgccttcatcgggattgtttttttcctgtaattatcatcacgatcatctaccagtaggccttttctttctgaatggaggatacataacatatgtttttgatcaacacagtcctttggtacggggtgtaagttcacctgtatacatttgtgttgtcttgcagaaccacttaagaaatgctcaactttccttcgtaaacatctctacttggactatctgcaggtggtttttaaatgtccatgcttctcacaaagctctcaaaccgccaagaagggctagaaagctagttccagggagaagtaacgcggacagaaagcgagaagtcagattagtcgttgagggatggattgtttgggtgagatctattcaatcagctacatagggagatcgtgtatcgaaggatgagtgtgcttatacataagccgaacttgagtagacagcattcatctttgccgaaggcctgaccgaccggacgctctactaccttttacccttctactcggagaccaagagtgcctttatgatctatctgatcctgtccagaacgattgtgagcttaacactataccttctagagtatgacctcttgtagatcgttgcttaccatcatttaccatgtctgtagggaacacacgctatttacataaatttaatccttccaacaatacaccagttctctcatccctttggactattgttctctctcatttatgtcttgacagaagccatggtctctcttctgcctctcgatttactgtcttctctgcgctctacttcttacggtcagcgtccatcgaatgcgcctccagaggaacgcttatcaattgccgaggggaagaatcaagtgaacgagattgttcgaggtatccatgagatgcaagggatggttcggcctctatccagacgagtaaaccagtttgatgggcagaatcaaactgttggcgttcgaaagagaagaggcgagttcacagtaccgacccgtccatcaatcactaaaaacaagtggctcgccgaaggatccattcgccttgaaaccacgcctccttcaacgcgggttcatgttcaaacaccatcgaaccccttgacgcttgctccgttaaattcacagtctgttttcgactctaaaaagttgatgtcgatacctcggctacctcctgccacttatgcttctcctgcgcacaaccaggcgcctatatatccctctcttttgctcaaaccctcacctcatgacaccaacaaaaacatctctgtgaatatacctgcgccgaataatgtttcatcggcgtatcttcctagtatatctccgagtcacccctcagtaccgtcttctccttcttcaaatttctgggcattgtcaccctcaggcctccaacaaagctccagttcggttatccccaacgctccatcttcgttgtccaatgacgggacatcttctccgctgaccttgccagtcttagctcatgcgccactccctgcccaacgaacactccggaaaaccccggctcggaaggctaaactcaatcgcattcagaatgagcttcatcagatatctccacctaagttttcgttatcatctaaggacgaggctaacgcttcaaaaagaagcaggacaactaaggtggtcaaggacttcgagccgggatcaagaagaaagaacgtagagactttagaagatgaggagattaaggaagttcattcgagtttactcaaggaagataacgaagagaaattggagggtcaattcctaaatgaagtgaacgagggatcaagtgggaagagaaagagaggaggagtggttcgtacaaaaaccaaagtgatggagcatacggaagcgaagaatgaagagatggaggttgagttgagtctagagggcggtgatatcaagcgctaccttccttcaatccaatcaaccacccggtctgcaacccagcaacggccaacattggtcgcccccaacgaaaggtccactcgtttcgccccatactctcggcaaagtacaatacctccattgaaaccgacaacggtctccgccgcctctagacgaaaagcctctgtcactacattgtcttcacctcaacttactacttcaacgcgtaactctacaacttcaagaagtaaactgacaaagacaaatgcttcttcttcgtcccgagccatccagacaagtgttcctccaaaggtacctgaggtacctgttttgtcgactacgtcaatgcataaaaatgcgcatgtgctccctacccgatctagtactcgatctgtagatacagtatcgaaatcaaacgctgcctcaaccactttgtcgccaaatgtgttgtcttctaaagcaaatacgacgtccaaatcatcccgacctcttgttagcaagcctagagttgcctctactcggtctagtgcattaaagcgaacgactgatctaacggccatcgaagcgcctatcaacttaagatttcgaaggacaaacggaagtgcttagctagacgtcgtgctatccaatgttcttaatatagatactagtaactgagggtgacattagctgaagagcaagtgccttgaatataaacagagccccagaagggaagagctaggatatacactttgacagtatcggatcgtctatcgaaccgaaggaggatcggacggatgagatcgtcattcgccacgtccagggcggtgcccgttcatggctcacgtgtggcctctgctcttggtcacgtgtgcttgccgtca

SEQ ID NO: 305 - DNA, 738 bp, Xanthophyllomyces dendrorhous
gtttcgtttcgtttcgtttcatttcatttcgtttcgtttcgttcgatctctctctcgcccatctctctcttctgcctcgtcaaatcgtctctaatcatcttccatctctccatcgcattccctccatcgcattccctccatcgcgttccctccatcgcgttccctccatcgcgttccctccatcgcatttcctccatcgcatttcctccatcgcatttcctctcccatcacactcacactcacactcacactcacactcccaaccacctcttaaccccatggccgaccgatcacgggcaatccggaaatccgaaatccatccaatccgatcggactcgcctgacgtcaacgcgaccgaacgggtcctcgacgtagaacaacacatcatgtctggtatcggcgccattccctccatggagggctcccacgtcactctcgagaagaacactctcatcgtcggtaagcaccgtccttgctttcctttcctttcctttccacattctattcttctcgtccccatcaataaaacacacaaacacacacgcacacacacacactccttaaaaaagaacatggctcgccgatgagaaagaaaaaaaaaacaaaaaaaagagaacccccatctattcataccggcaaacagaacggcctttgtcattggccagtgcatacgtgatcgacctcgatatccgaatagtttactaatctctacctttttttttctcctcttcccttccc

SEQ ID NO: 306 - DNA, 3039 bp, Xanthophyllomyces dendrorhous
ccctccccccttctctccaacagaccttccccgctctcttcaagctctacaaacagggcctcctcccccccaagctccacatcgtcggttatgcccgaaccaagatgaaccccgaagagttccacgagagggaagtcagctacatcaagccgcccaaggaggaacaggaagtcgtacgttcacatctggttctttcatctcctaatctttatcctcacccgtccatcctttctgggtcttcccccccccccaaaaggccgaccacgacaagaagcttgaagagttccaaaagatctctacctacgtcgctggagcttacgacgaagactctggcttccaggccctcgagagccacctcaaggagatcgaggacggttatgagggtgacgaaaagaacagagtgttctacgtacgtctgctttctttcttcaactctctagcttggcccaaacttgacattcctctctgcttcctttctcttcaactcccccccccaaaaaacaaacaaacagatggccctccccccgtccgtgttcactacggtcgccaagggtctcaagaagaacaactactctgcctctggagtaaacagaatcatcatcgaaaagccgttcggcaaggacctcgagtcctgcagagaaatgatgcaggccctcaagaaagagtggacggaagacgagacattccgaatcgatcactacctcggaaaggagatggtcaagaacctgctcgtcatgcggtttggaaacgtctttttcgactcgagcttcaacaaaaactcgatcagcaacgtccagatcaccttcaaggaggatatcggtaccgaaggccgaggcggttactttgatgaggtccgtacaggcgtcttttttccattctattttcctttaccccttgtattcttcaacctattgccgtctttaaccgtgtaaccgaccgcgcgcaacggccgtacattctcttccccccactctagttcggaatcattcgagatatccagcagaaccgtgagctacctttctcaccttggtaaccttctcgtgatactccgtctgaacgacttgtccctattctgcctttccctctgcccatgcctccatcccgcctttaaacagatctcctccaggccctcagcgtgctcaccatggagcgacccgtctcgttctctgccgaggacatccgagacgaaaaggcatgtcctctttcctttgaccagttggcggttcatttaactaacatgtctgcctctctctctctctctctccctctcccctttcaaaaaaaaaccaaaaaaacaacccccctaattaggtcaaggtcctccgggccgttccccccatcaagaaggaggacgtcctactcggtcagtacgtcggcgccgacggcaagcccggctacctcgaggatgacaccgtgcccaagggttccaactgcccgaccttcgccgctaccgtgctctacatcaacaacccccgatgggagggtgtgcctttcatcatgaaggccggaaagggtacgtctcttcttttttctccactcactcacccgaccgaaacaaccatcctgctcggggctgacttattgatcccaacaaaaatagctctcaacgaggcaaaggtcgaaatccgaatccagtacaaggacgtcaccggtggaatctttgaaaacattccccgaaacgagcttgtgatgtgcgctcatctcttttcttggtcttgtcgcgctcgcaagactctgacacttattcgccctctggccacctgaatcttttctcaccctccttttttcttttttctttttcttgctctttttccatagacggatccagccctctgaggccatctacctcaagatgaacacaaaaacccctggattggctaccagggcgatgcctaccgagctcgacttgacctacaagcgaaggttctccgataccgccattcccgaggcctacgaggctctcatcctagacgccttcaagggtgatcactccaactgcaagtgttttcttctttttttgttttgttttgtttcctttttttaatcccacattgggcggactttttagcagagactgacttttgtcctcccctccttaaaatcacctccagtcgtccgagatgacgagctagataccgcttggaaggtatgtcgaatcatctctccgttggcatgtctcgggtcaaactgactttacgcgcgtccaacagatctttacccctatccttcattggatcgaaggcaagtccggcgaggcccccaagcccgagtcgtacccttacggttcccgaggacctgccaacatgtgagctccgcttaatgatctctccttgcccttgctgaaaaggacgctgaccaggggttcttctttcctttccaacagtgatgactttgcagagaagtacggcttcaagcgaagtaaccagggatagtacgttttgaatgtcctcttgaatttgacagtatcagtatttatttttggatttgccatactgatctggggtttcttgggcttttccgccgaatcctactcgttctctttagctcttggccgacgacgaacgtaagcgagttgaaacactgaacgcatcattctccctcttccctcttctccaatcttagagtcagttctgctgttctcccttgccttcttttgtccttttcattctttcctcgttggccttctcgagtctttttgtggttggctttccagagagaaagtgcgtttggctgaacaagtttctttttttctttcctcttcctctttcagatcgcccagctctcgcggttgtgaaaaaaccccatggcagcctttttctttctctcgtttgttttctctacatgtcttccgtagtttgctatttttcttcttcctttcatgtctcgtgtctggagtcctatgtcccttctcctcgcctactgccgtttctttcttttctttctctcacttctcttctttgccgcttgcgttcaagttgatgaaacatgtttcgatagtttcccctaaacagtcccctcccccttgccccttttctggcc

SEQ ID NO: 307 - DNA, 559 bp, Xanthophyllomyces dendrorhous
gggtgagaagaaggttggtcaacatccgagaacgattagtcaacgttacagagaaactcatcttttttttccttttcctttcccttcctcatcatcatcgccttcagtgactttcgttctctctgcgttcttctcgctcgctaacggattctcgggctcggaaaggatgaaagctaaatgtgtttaaaatagaatgaatataatttcctcctgttttcttcttctttctctacttcttcctcttgatcgtcctcgaccgttgacccgttggaaagacacaccctccttccgtcttgtcttctctatcgccttgtgctctcgagaacgtcgtgtttgaccgacctagactcactcgtacatctactcacatactgaacaggacatggtatccactcaacgattccggttcttccgttctcagaaacacggtcatgaacttgaacatgaacacgaacacgaacacgaacacatgacgcacccaacgtccgcctcctcaatgccgccaccaaacagaacgacaatgacgacgacgatgacaccaccaccaccaccaccacca

SEQ ID NO: 308 - DNA, 14493 bp, Xanthophyllomyces dendrorhous
ccaccaccaccaccaccaccatcatcatccttgcccgagccctcactcgaacacgaaccggtttaccaggcccctctgaacttactggctgcgttcagatcatgggtcaagatggacgagccagaggccgagagaagcgagcagaggatcttgcgacgactgagtttctagtttggtcccttttcccgttttctctttctttccgctcttcctactttcttgctgttcgtgtctcaagactgatcgctcttccctcgttgtcgctgttgttgttgttgttttctcgtcttctcgtcttctttctctcagtcgactgccggatgagccggatcccgagtatccgtcgctcgtaggtcggtcttgcaagatcccaatctcggatgggacgtacatgaactgtctcgagatcacttccgtccgaccgccccggacgtcgacctcggaaggagcacatgaggaaggggaagaagaagaaggcgaggcaaacgtgttgatacacgggtacggcatgggactcggtttcttctactggaacatggaagagttcgcaaagatgagtgccgcgagaggacggagggcgtacgtgatcgacctgatggggttcggtcgaagctcaagacctcacccgaaagtgtttctcaagaccaaacgattgtccatcaaggagaaagtcgaccttgtgcgttccgtctcttgttgttgttgttgttgttgttgttgttgttgttgttgttgttgttgttgttgttgttgttgttgttgttatcttcttctttccttcgtgaggacgtacccatcaaagcaggggaacgaattggctgacctacctacctacgtgccctcctcttctctcctttacctcccccctccctctgcgcgcacaggcggaagactttttcctgaagccactcgaagaattcagagtgtccaaaaagatcaccgccatgcatatcaccgcccattcactcggcggctacctgtccgccgcgtatgcgcttcgatatcccaacctcgtcaaggcgctcgtcctgctctccccagccgggattccttctcttcccccatcacacggtccgtctggcgccagcgccagcgccgggaagacatcagcggacgacagtccggatggagcacagcacaacagggcgtccgggaaatcactcgccgacaccctcgccatggaggtcgggatcggcccaggcgagatcgagcccgggccgagggagaacagatcgagcagctgggacgtcggtcagaacacccatctcggtcactctggtatgttcctcacccgagactccaccgatcccacggcccaatctgacggagatcaagacccagaggacgatgaccacgacgacgacgacgaagaagaagaagaagaaggcgagaaaaaacagcagacgttcaaaggacccctgggaaagagtgggaagctgacgagcaagctgtatgcgtacatgtgggagtctggtctcagtccactgggtttcatcagaagggtcggtcctatcgggcctctcatgatcggcaaagtgagtgtctctccgccttttgctccatcgccgttcacgccaccacagagttgaccggaaaagagggtgcgctctcgctgctgcttcttctttcttcttacagtacgcctcacaccggttcgcatcgattgccccgtccgaggctgacgatctggcgtcatacctgacaaacatcacctgtctgcccggttcgggagagtacagcgtagggcttcttctccgaccgggcgcgttcgccaggtttcccttggtcgataggatcgcggggatcggcaagtcgatccccgtcacgttcgtctatggagagaaagactggagtgagtgtcgatctctttttctactctttcttcctttcgtttattgttttacgtagagctgatagtcgccctgctctcttttctcttggctctagtggaccgacacggaggcagggcagctgtcaaggtaagctagcctctttcatcttttccaatgttggttcgaagaaacaagctgatcttacttgcccccgtctccatcccttctctctctctctctttctctctttcacaaaaggctctccgcgcggttggcaacagacgttcccaagtggtgatctgtcctgaagcaggtcatcacgtatacatagacaacccagaattcatcaacagactcctttgggagaaactggccgggccgagctcatcagacatgccgagtccgatggtctcacctaccagttcggcgtttccctctaggagtcatactcgaccctcgtcgcctctctcaggtcaggtaactcaagacccgttggcgagcttaactaacggtggtggtggtagtagcagcagcaattacagtactagtttggatcaacgattcccgtcgagctcgtttgatctgggcccacacaccgagcatagactgtccgtctgtgtgaactgattgtctcttcctcttccttttatttattcttatttctcttatttgcaactttttttttcttctttttctttttcgggtctcgtctgtatctatatctcaagctgtacgcatctcatcaacttctcctttttcttttttcctcttgaaaagaaaggggctatatgtatatatttcaaaaccagttttttttttccttcttgcctcatgatctccttttattattttatttcatagaagtcattttctcttgcatctcctgtttgtatcggtacatatatatgttattctctctgcgtggccttttttttctctttcgttttgttttgtttttgcaatagacaaataaatccctctcctgatgatggaccgggaaaaaatcgccagagagagagagagtcaagagatggatagaaattagaagctcaagccggtcacgcgagggcttagatcatgtccgggtgaacggccggccggccgagtttggcgatctcgccctccgaggaaaacatcccccatcgacactgccttcttaaacgcttgctgtactctgaccagaccggttcttcctccatctcaccaagaaacggaaccgaaggaaaaagaaaaaagaaaagaaaagaagaacacgaagaagaagaagaagaagaaaaagacagcacaagcgattccctcttttgaaagaactagcgtctcctggacaagaagcgtgaacgaagaacaaattagacgaacacaccagaagagaacagagagaatcatggtcaagaatatctggctcgattgtgatcccggtatgtcgtccatctctccctccctctctctttctttatatgtatccatccgcgcctcaatctcgatcccaccggggttctcatcgtttctgttcttatgccttctttggaaaacgccgacccaaaggccacgatgacgccgtcgcccttctcctcgctctgaacttgtcagagatcaacttgctcggagtctcgagtgtcaacgggaactctggactcgaaaacacgaccaggaacgcagccaccttgcttgccatgttcaaagccagggaggacatgccgctggagagaggagcgaaagagcccattgcagggccagagttcaacgaaggagccggtaagacctttcgtccttcgcttctgtttcgtttcatttgactttggttgactcctctttgtgcatgtgtttgtgcgtatgtatgtctctccctgatttgatatcgatgctaacagccgaggctatccatggcagctctgggtacgtacaaatcatgggatcttgatgcaatctagagagcaactcctgaccggcgtgctctctttcattcataattgctgccagtctggacggcgtggaactcctgcccccactgtctgatcccagggttcaacacttttattccaaggcgcccgcagggaccgacacggccgttcaagggatggcccgggccatccgagattcgtggaaagacggacagggcgagaaagtctggatcgtcgtcaccgggccttgtacaaacgcggcgagactgatcaagatggaggaggacttggtcaaagatgctgttgccgggtgggtcgtcatgggtggttctttcggtgcgttcccttcctcttttctccttttttgggttcaccacgtcttgtgtcgttgagacctaccgtagctgaacccctccctcccccctttaaataaacgaaatatttatatatatgttacataaacccctccttggcctgatagatatccctcaatggacacccgtagcagagttcaatatccacaccgacccagctgctctgtccgagatccttcgacccgcgcctttcccgccggtcattctcgatcctctcaacatcactcatagcgcgatcttcacgtctgatatccaccaacgactgctggatccgaaaggcaagaacggatcggattggcggaagagaggggagagtgatgtgagatggatgttgagtaccctcctgacattctttgtcagtacagcgttccgttgatcttccctctcctttgctctcttgtatcatctgactgactaactctggttcgcggaaattttattggacgaactgactaggctgatacgtatctgaaagtgttcgacttcaaagacggtcccccgatacatgatgcactctgtgtggcctgggtacgtcccgcccatcctatcctatctcgtcctgtcccatgttagtttctgcacgctcactcaccgagagtaacaccattaactttttttaataaagctgggagacccgtcgctgttcaaaggaagatggtgtgatctcgaagttggctccatcgatgaaggatcggccggtagaggtcaaacccgactagtcaaaggaacggagtggaggaacggttcgtttgagcatggtgtcttaggaaattgtttcgttctagagacgctggatgtaagttacctttctctctttctttctctttcttccccgagaaggaaaaaaaagaaaaagggaaagacacactctgtgtagaattctttgtgaaacaccgaactaatcggtctcctcttccgcttgtcaacatggatctcaagacatccaccttctggaacatgttcttggaatgcgtagataaagtcgaaaaaaagattcaggcttgattggatcaggaatctggcctcatctctttattcgataggcggaagggtacaggatactctcccctcggacaaggggaaaagcgtggtcatccgagttctaaatccaatgtgttcggctacctttttgtacctgtatttatatatttatatccttctttctctctttctctggaagaaataggggaaaaacaggaactgcatgtatgttgtagatgattcagttcggaaaaggatgtgtggatttcaattgcactctgtcttgaagcaacttcgtgcaaagaagggaaagggtagccaagaattccatcccgttaaaggttacaacgccatgattggcacaagagacaaagactagagaacacagaaaacatagaagacaaataaaggaaagatcatcaaggacaaagctaattctcgactagatcgagacaaaaagatgagtaaaataggaaagaacaaggattgcccaaatttcttctcagagcaacgacttcatcttgtatcccttcgcatcggtgatattcgcctcggattcagcataagctctttggagctctgtcttaaagtgatctgcaacctgctgccgcttgaactatagagtgggacatcatgaagtagaagactcaaatcagtcagaatctcttaacatggacaaaggcaacaaaacggcgacggaccttgaagctaggagtcatcacatccggagggaaggggtcgttgctcagatggatacctttaaccatctcatatctgggtataatgaaaaagtgaataaagcagatgaagtctggtttcctaggattcatatgagccagtcttgaaacaagacacaacgaaccctttcaatcctttcgagcgggccaacttttctagagatttgatgatctcgttcttcaagtgtttggcatcctctccgtcttcctggatagccttagcgacatggtcagggtctttcagacgtcgaagtttggagtgagcagcgctttggataaactgtacggcttgttgaggatcttgttcgtttcattttatttattacgtggacgatcgattagaaagaatagatgagtacagccctctctcttgctcatgcggtgcgagatcgagataagagcaatttagttcgactaaccaaccacaccgactccgaccaagtggttcttgagaggatccccatggacatacatcgtcgtaaagaccggatgcaacgaatagacaccttccacactctccagagcaacatactctccctgagccaacttcatgatgttcttcttcctatcaatgatctattgtcaatgcaaatatatggacaagggcgatcagcacgagaacgcatatgtatcaagcaaattgatattcagactgaccttgaagcgaccggcctcatcaacaatacacacatcacctgagtacagatcaagcacaagtgtaaaatatcagtttgttgaactaaattggtttggatttgaaaaatcgcatatagacggaccagtatgcatccagcctgtaataaacacagaaacagatccatcaataacattcctcaaaacgaatatgcacacacagaagaagtgcctaccgtcttcgtcgattgtttccctagtgtttttctcgtctttataatatccactctgtatcaggaaaatgcatagacaacgacaagggcagaagcacacactaatgtaagcccaaactctttctcctatcaactagatttactcacaaacacgttcatccccttaacgcaaagctctcccctagggaagggcttatccttagcagagtagcccatctcagggatatcaactagcttaaattcgttgcagacactacattcacatggtttacatcagttcagatatttaagaagaaagcattcaaggccaacgaggttagactcactgaggcgggccaattttgccgcttgcatctttgtcatgagcgttacctataaaccatcgtagcatgccaatgagatttcatcaagttgatgaagagttgataggcttaatagaaggaacagccatacccttagacccagttcccacagtctcggtcattccccagccctccgaaaagttggcggcaaaggcgactttgagggtctcgaaaacatctttcgaaataggagcggaacctgtcgatatagtgagggctcagaatagattagcatggtacacacaacgagctatattcaaaccggtttgtcgtgctttaactcaccagaactcatgtaaagaatccttcctccgagtagctgagggagctgttatcagcacagatacaacgcggaacaagtatcgagagcgatatcagcagcgagaaagccgaaagacgcgcgtgaacgaaaaggagacacaccttagacaggaagagcttgtcataaacgggatgagtgaaatctcccgtctgatgatatctatccaatttggcattgagactcttggtaaggatggcgcctacatatgaccccatcatcagactggttaggaccaccagcatctgggactttggtttagaactttcgaaacgtgaatatacctttgattccaccaccattggcttgagcctgaaagattgatatgcggtagctttgatcagacccgaaatacatttctttatcagtttggaaaaacctagaagaacgaaccatgatggctgcatagattcggttcaacactctaggaacacttgggagaatgtggggcttaatgatctggatgtcctgcaaaagtcgaagagctacaaagcaaagtcaagccggcgaaggcataagtcaggtctagtttgaacaagattttgtgctaagacaacactcactgtctccagtactgtatgcagcagcacctcgaaggaggattgccatcagatccacgaatcttccatatacgtgcgacaagggaaggtaggaaatcaaaactattcctcgaccgggtaattccgttccataggtctgggctatgatggcagtggtcatatttcgatgggtcagaacgactcccttggggtttccggttgtgcccgatgtgtctatggtggtcaattcgaaacaatacagtgagtaaagtatcgaatgcagagaaggctgcataagaaaagatatagagtcacgcacagctaatggtagctatcgattcaggctttggaaccatggggtctaacaagttggctcgacccaggaccctcacttgagagacacatatacgaccgatatgttagccagatgaacaagttacaacgaagatcatggcagtacgtacatccatcgaaatcgtctacaaaaacaccctctcgccttccccattctttagccatctctccctcagaaccatacaggctctccatgcaaatcacagctttcaccgaaggaacgtcaggtagaagcttaagcattgaaggcagatgagctaaagagacgacgatgatggacaatccagcatgatttgatctgaaagtatgctcgaacatttcgcgcgtgtttagtaacgaggcttgaggtgcgagatatagagggtcagtatcactcacacatattctgatgaaggcagccattgagatgtgaccaggttgtgattgatatcagcaaagttaatcaaaagagccttaaatgaagtcataagcgaactaacgagtagcagtctaaattgttgaagttatcatcaacaatgatgaaagtagaacacgtcagaagagaggtgaaagagcgatgcagtcagtcgggcaaggaataaggagaacatagactgacaggtccaagggtatcgtatagaggtactccgacgagcgaaaaagcgtggcagcccatatcggtgatctgccactcaggtctgtttccactccagataccgacaccccatccaccttccggtccagaatgatggggatcgattcgttcaatcctgctttggtcgccaagaatacccgctcggaagagatgcatgaaagcagaaccaacctatgagacggaatcactcattcagtaaaagataccgatcaacttgatttgttgaagataggagagatagaaacctacctccatacgagccttctcaacttcaccatagctgatccattcgagcttgtcggcgtaagtcactggaagctgtcctcgaggagaggttataggtatgtatcccaacccattgtcgaatggaatttcatcggtcactagatcagaaacaacagttacaacatatagagttaacaatccgaatcaaacccgagtgtcaagagaacagaaccgaaacgtgccttgtttagtaacctcgtataaagtctggggtttaggcttctgaattaggacagactgatcagggtacagtcctataaacggccgaccattttaaaagagaagaattgttcgttaaacgaaatgcattagccaatccaaactctcaagcttggagacataaagatatccaagaagaccttacggtttcggtagtgtccggtttgaccctcctttctagttccaggtacctcctttgatgatccaatcgaagcccgaaatatatgcatgtgagatatattcatttaccgagacagaatgaatcgtcaatggaagaactcttcaatcagaagattataagaaatactgacaattgcctggctattgaaatcaataagagaagcatcatagactggatataacaaatgggaagggatcggattgatcggatggtgtttaaaaacttgatcggtatgaacttgagcagtcattgtaataacaaacgaagaagtagtcccaaatgagagatcgataggcgtgtaatctccttttaagaaagatatacaagagatataggttcaggattgggatgaagacgaaatgggatgaagatgaaagtggaaagggaaagaaaggaaacgttgatgaagagagaagacaaaggagagaccaaatggatgatgtgcaggtcacctggcccggaccgaaccgaaccggctttgtataaccgagcacgcggtttacgccgcttcggccgtctgacttgtatttatggtcgacaaccgatctagtctacattttctttaagaggtgtgtaagaatccgcatgcgtacgggtatatacacgtaaataactagtgatcgcctcagaaccacagaccggttcccgtcggccgttctatcggcaagtaagctatgctgatgtacagacgatctcaggtgttaaatgtcgctcgttcagagatactttcattcaacaacagcaatcatgaattgtctctagcgctagagctaatatcgagatatactttctcttgaggtctttcctccttctaaacacgagtatgagtacgtaattatgagagatgctgcaacaaattaaatatcaccatgttcagtcacttgtgtactcatattcagaaagtcatgttcaacgtaccttttagatactgattctcaaggttgcttgttaaatcaagacattttgttgatgatgaaaaatacatagaaagatgctgtatatacggacgatcttcttgctcagcgcaaccattttatttaaatcataacgaacaaagaggaactcacatggaagaactggccaaggtgagtacgtctacgaagaggctgcgtaggagtagaaacaggaaagggaggaataattatttactaatttagaagaacaggcctgctatcaggcgaacaatctctagcgcaactattaatcaaattcacaaagcgtcaccgaacggaagagcgaataggtcagcgaggaagaagaaaaagaaaaagaaacaaaaaaaaagaatattcagtgcgcgttgaggtataatctttgatgacaatgcttaatagatcaagtaagccaagttgacttacggcctccagccagcaaggcgacaaatcccaatgcaacgatctttgtccatttagcgtttgacgtggcagcctctttggctcgtcgttctgtagtagacttcttggcaggctgtcgctggccaaccttggcagcaaatttcttgagaacagtagagaaattgtatcgagattaagatttggtgagttcttgcatctagatcgaaagaaaaaagaacagtaagaaatatatcagatgctctacctcgtttttaagtcggatgtcagcagcggtaggctgtaataaggagtgtagatgcgaaacaagcaatccgaaaattttaacacacattcataaaccaaccgcactcaagcacagacctctgaggtagaaacttaccatgactgggacaaccaaataggagggagggcgaaaagaaagagctgaagcaggtgggagagtgtagggaaagtgagatggcccgatgaagataagtttgaatacttaatcaaattcaaaaagtctccaaacaacaaagatagtccgtccaatctcattcaacaccttcctctgcttctttctcaagataatctcgatagggaaagaatctttgacagctcgatactcctgaatccttacactcgatatctataaacctcgtttgatcatcaaacgatcatttcgaatttagaagctagcgttcttttcccaacttccgacagctatcacctatgctcagccttcctttccttcttcctctgctctcgaccgcgtccttgcttgtgaaagctcacggaggtggacacgcaggggagaactatgatagccacggcgcggacgatgaaagccttggatatgctgaaagacatgtttgttccttcatttctttatccttgttttcgctgtgtcttagagatcgaacgacgtccatatgcctagaaggagaagggcggaaggacatgggcatgttggacgagaaaaagtagcatttagctaattctacttttgctctatcaaatcatcaccagatgcgttccgagcatcatatgtaagcattctgcttgaacagtatatagctcataagatccgcttaccaattgtccttgtcttccaccccccaaagtgatgctttcgatcctgaagccttgtacgtataactttgagaattcatctcctcatggagcaggacccgcgtttgaccgatttttgacaatctaaaaacatttgtatcttccaaagcttcgcccttcatgatctcaaccatgacggagttttagataaagctgagatcgaggcgatctgtatgttctttcgaccatctcagtgttgtttctttcttttgtgtttcttttttctctctggcaacaagatgtatttccaatatgctgactgttctatttactccctcaatcatctccacactctatgttgccttaagacggacttcatcatgatatctccaaatctaactctgcctctgatgatactcactcagccatggccaaaacggtagttgacaaggtcctgagtatcatggatcgagacaacgatggtttcctgaccctcagcgagtttttggcggctggcgggagcataagtttgcccgacttcaaaggatttgaagagcttggtcaccactacgatgaagaaagcgaatagtatgtctcttctgtttctttctgtgttcctctgatgaactgtatggcgcaactcaacctgcatctctcctatcttttcaattttcctacatagcttcttgcaccacgaagagagatatcacaacactcctgagacacaaacggatgaagcatataaccacccggaagatgttggtcctttttcaagtctcttgtcgagccatcactctttcttccctttctcttcattctatctcacttaacactcaatctccttttcacacgggcccttctctttagatcgctcactttgagcaccacgaagccatcgagtctactgaggatgaccggattcaaaagtttgtcgagggagagactgagacccacagtgaccttccgcatgatgccaaggttgctgccgcaaacaatcgtgggagttcgccaggggcatcagctgcagttgagccgccgaagttgagtcgacaagaagaattaagaaacgagcggattttggcagagacagaggacgaaccgtatgggatgggtgataaaggatacgttcgaccccgaacacctagggacaagttaagacgaaacaccccttacaaggttcgttctcattctgtcgtccttcttctatatttctttccctgtgtcaagttgagtctgatcgaagtctactgataatgggtttgctaacctcattctggttttatggataaacagtacaagttccgacgaacccctaaagaattttaaaacaatttgcgaaccagcttgtcgatgtcaactgttttttgttcttagaaagcggctgctcaccaactcttctttccctgtccttcatcttccctctcactttcatcattgattgcatgcaatcttctcagttcatcattttcatctgtgactctcacttgatctttgtctattctttcaaaaacattcggccagaggttagatgttttgaccataaaaagaacatattccattcggttttctttttatccacctttatttctcattattttcctgtcatctttcatctcgtcacataggctcctatcaagtcgtttactggccctagttctcgcttctcactatattattcaataaatcgtattcttgtcccgcacgcaggtttatggcctccatcaagcgtcccaagatcggagtctatccactctattatcaacaaacgggaagaaatctgagccgagactcttttatgtctcggagacgcggaagaaccaaaaagatactccgaactgacaccactgaatatttcaacatactgcggtgaaaaaaacgcatgtaaatagacttcagctaaacaagagtgagctttcaaagaaatcgagatgatctgaggaaagatgagaatgtgccacttgatgaaaccaggagcatattaaaaaacatatatggataacgatggcaaaagaggtacagtatacaaaaacccgtcctgtgcacacgcgctggtgcgttgcttagaggacggagaacagctacccggcacagcggccagcagcagtgaaggagccgggacaaactgagaataaagcatgacgagacaaagcgaggcagacagaggggcctagacgacaccaacgacgacggcagccgtctatgcgcgctctcctcgcagccgccgggcaagctgcaggtccttcggctggatcgtcactcgcttcgcgtggatcgccgccaggttcgtgtcctcgaagagcgacaccaggtacgcctcggacgcctcctggagggccatgacggccgacgactggaagcggaggtcggtcttgaagtcctgggcgatctctcggacgagccgctggaaggggagcttccggatgaggagctcggtcgacttttggtaccgccggatctctcgaagggcgaccgtaccgggtctgtcgggggacggacgaggagag

SEQ ID NO: 309 - DNA, 1196 bp, Xanthophyllomyces dendrorhous
cccttcacacacacaccctcttggtcacactcgatcacgcgcatacatccatcctcaatcacgctcactttttttttccttctcctcgccttcttgcacattgcccatcgtccatcgtccgtcgtagtagcagcaacagcaacaacaacaacaacaagacaacagcagcagcaaggcctcgcttgttctcgtctcgttcccctccctctctccctatctctctctctctctctcacacgcaccctcacatcggcatccaaaaaagaaggaaagaaggagagaaaaatccgcattctttctcacatacatattctcacacgaaccaatctctatcgcacctactctcacccacaccatgcaacccatctcaccaaggctcacctcggtcggccgagctatcgccaccatccccaccgccaccaccgccaaacactttgcaacttccctcgctaggcagtctggccaaatcgaattcaccgaacctctcccactctccctcggcactcaccgaaagaccaccctccgcatgctctccaaaccaaacccggcacacccagagctctcaccagacgtcccggtcggcctgcccccgtccgtcatgtacgaacgctactttgacgctcgccagttcgaagactccctcctcccagacagaacagccctcagcaccgtcgccgccaggctcggtctcgacatcaatcacacagacaccgcagacagaatcctccaagccttgacccacagctccttcaaccagtccgccaacgtcgaccccaacgctgacccctcggtctcctcccccttggcctcctccgcttcgccctccatcgattttgcagcctccccttccaacacctcgctcgccaccctcggcagcacgatcctcaattttacgctctcagagtactactccaaaaagtttccaaacatcagcaccaaaggtctccgtctcatccacgccggactcacaaactcactcgccatggaggacgttgcagcagagatcggtgtcggcctccaccgaacgaccggacccaccagcaagcgagtcggtgactggagtggttccaaaggtgttcccgtcagatggaagcgaactgtttgtcttttttttcttttcttttttattgtttttgtctttgtttccttctctcctgctcctgcccctgccgcttacctttcctttcccctctttg

SEQ ID NO: 310 - DNA, 7069 bp, Xanthophyllomyces dendrorhous
tcctcctcctcctcctcctcctccccttttttccacagctcaaaccgagcgagaccgacaaggactactacctcgaggccatcacctctgccgtgaacgccatgatcgccgtcgtctacgagaaaaaggttggctcctttcctctcttgcccgcctttttcttcttctctgcctcttccttctccctgtccttcccaagccgaccttgaccaattctttatcttttctcactcctccgtccacagggtctgcctgccgccgccgctttcgtcaacgctcactttatctcccgaagcgtcgacattggctcgttcctcaagtttgccaacccaaaggccgtcctctcggatatcgtcgtaaagtacggcctggagccgcccgtcgccaggtcagtcatccataagttttcttctttcacttagctctctgcgcctttttgctcatatcatagccccgaatatcttgcttcctctccctcatcccaatagactcatcaaagagaccggtcgaatgagtcagacaccatactttgtcatagccatgtactctggcaagatcaagcttggtgagggttggggaacgagtctaaagatggccgaacatcgggtgagaattagtttctttccttcctccctttctgtctactcttcctttttcttccctcccccccttagagaaaccaaaactaacctctttgcctcctaccattcgcctttcgcctcgtctctctctctctctctctccctccccgtcattcttctgcaggcctccacaaatgccatcaaggccacctacctcacagagaccccaaacccggtggtatccatcgccgggttctcgccatacccactgacggacgaaccgttggcttcgatcgaacaaaagtacgcgttcgtggcgcctgccatcggtgaatccgaatcggtctactcttccgccttgaggccgccgagaaggtaccgggctagcgatcatgtccaacccggaatggagcacgtcgtccgaccgaaagcgatcgaagagggcaaggagatcacccaggccgagaggctgaagaggttgcagtatcagaaagaacgacaggtcaactgggaaaaggcagtcggtgacaccaaagaccaccatcgcaaactcgaacaaaagctgaaggaggtcaacgagatggtcgtcagatcctccaggccttgaactaaatataagaaaagatatgcatgaaactcttgggttctcgttcgctcgctcgccgtttattcttgctttttctttcttctcttttcttttcttttcgtttttttttttcttcttttttttctcgtcattttgaacatcaacctgacaagagcgacgtggcagctcaagcatcttgtatatcttctatacaacaagggaaagaaaaaaaaaagaaaaacatacaagcaaggacaaaagaatctccgcttgtgagagcgcacaaaaagacggacggcccggctactctgatctgcaacgcttctaaccctaacaaaacattcacccgtccatcatcaacaccatcaccatcatcatcaacatcagtaccaccgtccattcgtcgtcctgtttgtcattctgtcagtccattgagagaacatctctctgtctgcctaccgaacgacttgactcgagacacgcccgatcacatcacacatggaggtcggtcttgtacgcattcatacgcgctctctctctcttgcccttggtcatcgaagggatcatcagaggcgaacgtttcacagtcgtctgatggcatatcctccatagcatatccagttccccttcttcgctttgatctccgagtcctgattccaagactgacttttgaaatcttccttccgacgaatatccaataggacctgttctccagattcctccgccggccgacggcgagcagagagaccgggagatcgaaagcgaaagggaaaggaaaggacgaagaaggcggagggggggacgaacctatcgtcgggttctctaatgcctgggaggatataaaggttcgttctttctggatctgttcttgttttctttcatcgttgctattcctactgtcgctgccactgccgccgccgctcccagctggcttccggacatatggcatactcacccgttcgagccgccttgactgactgattgatcatgcccgggaataaacaggaggtgctagaacacccggacgaaagagctctctccagagggatccaatcgacagtcgtccctagaagaatacagtatatgatcgatgccctcgtttccgaatccaaccagacggatgaccagtccgttcgcctttcattctttttcctcttcttctcctctctctctctctctctctcttgaatttacgtggccctagccgaagctaaacgatcgatcggtaaccctcctcctgatatccaaacagaacaacgggcgcctgcttggaatacctactcaaacacgacgtgctctccaccctcgaacggctcgcaggctcggacgaaccggagggcatcaaagcagaggtcttgatcggattcaatctcttggtcgccttgctcgatgaaaactttttggttcacaatgctgttcgttgaccctctttttttcttttctttttttctttctttagttttctctttcttgtcttgttcgatgttttctcgctcggtatatagctgacaaccaggtcctccttccccccccctctctctctctttctatcttcctcctttccttgctctatccttgacacgcaaggtccatcgaccgttgagaagacttttgagaagctgcgtgggggacgaaccggaagagattcatctggacggtcaggccaaacctatgggtgctgctgctagtgggagcgcgcagaaaggctcgctcgtaaattacgaaaaggatcgtcagtccccctcttgttctttcttggctttcttcttttcgaaccgtgacaaagtgcttgttgagccatcagagatactgatcgtgtgccaggaggttttgggttatctcgttttatcttctctctccctcggttcatttgcggaaaaaaatagtcttggagttgatgtgagtgtttttgtttgcttgtttgcttatttgcttggttgctgggtttccctcctccactatcgaggcgagttgctgatggcaagaggttcatacatctctctaaaggtgcatgctgtgtaaacggatccgatcctaccccgctcttctcatgatatttttccacgacaaatccctcaacgcccaccgtccgtcgaccgtcacccagaaacttccgactggatccccagaagacctctcgtcccgcgcgacgtctccctcaccttccaacacgctgaccgccccttcatcagaccacccggcatcggtctctcaaccgagcgaacgaaagaaggaacccgagttcctcctgtttgcatatctcctccggttcgtccatcgggagagcccgatcggcgagtttgcccgtgccggcctgatgttcctcctcgacatcgcgttctcaccctccgcttcgctctcaccttccccttcgaacccgtcatcggcaccggaagatcaactcagctcgtccgacccgttggaggatataaagtgctcgatggcagagtacatgctccaaggcgatttcccagaggtcctcggcgctggtctcggcgcggtgtactctctcttgccaaacaagttggcgatccgaccggagcttgggtcggacgcctcgaatggtacaggcggagggatgatcctcggaaggtcgacggatcatggggaacccggcgaggacgatgaattcgatgacggagagcggcaaggtcaaaccggacggtcgatggcggcgatgatcgagggcgaggattcgaccagtccagagttcaaagatcgactcgatctgttcctcaaatcgtgcgagtttatctcggacgtcatcaaccgtgcatccttccttccttctgttcaaccgtcgtcttcgttgtcatcatcatcatcatcatcttcatcttcatcttcatcagcagcagcatcaacaaacccgccgctggcatcaacctcagaaccgctgccaccaccaccaccaccaccaccaccaacgcaggcggcgacggtgctcaccggttatggttcttcgctgtcccgggcgatcttacgagcggttcgctcaacgttcctcgagcacgtgctctacccatcgatcctcgaatgctcagatcaagacggttcggccgtagcggtcatcgcgtacatcgacatcatcctctcctcgttggatccggagagcgcactctgtcagatgttcctcggattcctcataggatcggacgagctcgagttcgaagacggggacggccggtcgggatggacgggcaagctcggttcagacatcggtctcatcccgagatccatgggcgggctcaaggaggaccgcggcgagcgggagacgaccaaagtcgacagacggaagagtagcgcgatgatcctgttggaaaacatgcaggtccctcggtcggcggggaaccaacagtactttacctcccagggacaaggaagattcacgctcaaagatctgatcgtcgacaacatcgcttcttcaaacccgcccacggcgagtgctacgctcaggttgttgaacacgatcttgacgagatatccgaacgtggcgctccatgggttgttggacgtcttgccggactatcggtcgaccgtcgttccgttcgctctccctccgctgtcgttcgacatagacgacgacgacgacgatgatgttgtcgatttcgatatggttgcagatgatctctctcacggcgatggtaacagcgacgatggagacgaatcccataaatccgatctcggtatttcgcggctgaatcttccgacggacgatgtattcggtcaacctggattctcctcatcgaatcctacaccgtctctaccggaatctagcaaggaccgatgtccgtccttcctcgactggcctgttcctaaacgtctgatggccgccgctttcgatcacacccgagaagtcgagctttacctgtcgctcgtggcagatatagatcattcctaccagtcagcacacacgcccgttccatcgacgtatgagaactatctgcaggacgccatgttggcgatcggttccgatcgctcgctcacgaatttccagctaggccttctctctttctcgacagaacagcatccacccccgctctcgtcgtcttctccacatccacacccgcgttcctcgtccggagacgttccagctctcgcccgtaactcgaaactcaacccgtcggatccgttgcttcagctcgtcctggaccgtctgagagagttcttcatacacaccccagaggagaacctggcgctgacgggtgtgctggcttcgatcgggctgaacacgaacctttgtctggaaggatggttggtcttcccatcggacgacgaggtcgatccgtgggctgcgctcgaccgaaagatgaaagtaaagaccgagcgagctgggtccaagtccgtccgtccacaaggagacgacggtgagggtgagggggactctacgactctacgcgagaccgtcgttcggtcgggtgtcacagatgatccgttcgtcgagtccgactcgttcgacactcagccgatcttgtatgtgctgttcaaagatctggtaagcttctggttttgtttctattctttgttcgttcgtttgtgagagctcgagtgtgctcactcttactctctttttttttttctttctttttttttctccttttctctctcttcttttctcatttctattctttatttctacttggaaaaacaaaggttcggaagctcgaaagatatcggctcatggaacccaagttcgatgtctacctctctgagcgtcgtcaaggactctttttcgaagagaccatgaccgacattctgatggacgtttccgaacctagctggttcggcagcagcaacagcagcagtgctttgaccgcagcggctactcctaatgacttttcatctcccgcgagacccagtccgttctctcgaccacaagctccacagagactgatgtcgtcccctcgagcgggtggtaacgctggcggcggtggcggcggcggccctacgctacccactctgagatccaacgtttcctcaccggcaacccctcaagcgaaaaaaaccggatggtctctgttctcacctctcaaacggacacctgtccagacccctccggccgtctccggtgccgccaagccgttcccgtatgtgcctcgagtgatgcccgacggtgggggcgcaagtccgaggacgaacagacctgggccgtcaacgccttatgcggatcattactcggcgacgataggtcgcaaggtagagagtctcgtggctgacagtccaaagagaggggaatggagcccggctcgggtgaaacatcctaaaccgttcaaaccggcaaaaagacggatagggcccgtccatacgaacgacgtgagcgaggagtgtgcgtccgatgacggtaaccttggcgatggcgatggtgaggaggacaacaaggtgcaatcggtggatggaaagagagcagatcaaacggtccaggtgacgaccactcaagtctcgctctctcaagttctcgataacgtggtggtacgtcctgatctgtttctcctatccctttggctcttagactttggcgcgagcgacaactatacctatactaaccgtacggtcttcttactctttcccgcttggtcgatgcctcgagcagatcctcgaggaatgtctgaaagagctggtcgcgatccgtgtagctcgtttatcccagggagctgatacccttgtcagaacgtgacccgtctgtcatatagatttgatgtgatcctttatatccatgtgctcaagatttctttcttcctgctcttgcgctcattatggatcgattcaagtcacagaacatgaagaatgaaacaagtgatatcacatatatacatatacatatatttatttagaaaccaagtacgaaatacaataactcgtctcacgagcggagaacaaagcacgacgagacaaagcgaggcag

SEQ ID NO: 311 - DNA, 40157 bp, Xanthophyllomyces dendrorhous
gccatgaacgggcaccgccctggacgtggcgaatgacgatctcatccgtccgatcctccttcggttcgatagacgacctacaagactctctactatcaacattatgagctttcccccatcgtccgatggcttccccagaagattcgctgaatcctcaatcgatgcaatgactccggatgaagccattcgaagtacagatggcgatgccgctctctctagactgtaagcttttcatcgttccatgcttcgttgatgtgcatacacaagcacatcatctaactcttgtttcgtatcggataatcttacttaagatctgcagtgagccagggatatttagaggatccttttgcttcattcttcgttcgtggtagacccacaaaatcacaatatctccggccgccgcttataaacatcggcactcacgcgcggaccttaggtattgatgagctcgtccgaagtttcttatccgggccggctcaagggggcggccagattattagcctaggagctggaagcgacactagattctggagacttcaggttcggaccgatactctcgctaatactgactactcaggcgacatcaaatcctaaatagcgcaatctctacttaaacagtccgatccagtacttaagtcatctattcacaagtatatcgaactcgactttccagaaatcacccgccagaaggcaggcttcataagaaaatccaaggctctgtctgacccccttggtccaatagaatcgatcaaactcagttagcatgtttttatatctgcctccctcaagcatgttctttagctgataaatcaacttgcattcatctcctacacggtgcaactcgtcctggccctatcacctatcagacgcatcatgtactagactctcttctccatcgtatcatctgatccctcacgacctgcgcacagatcccttgtgctcagtcttaagctctgacatctttgacccatccaaaccaacgctttggatagccgagtgcttgctagtctatctagactcggtggtgagtgagcgaacggtggaatggtttcccaaggtgtgtactggatgggttggaggaattgtgtacgagatgttcggactggagttagtgtttttcttttgatctgctacgatatttgatatgcgatttctgactcgtcaatcgattttcctcatattctcacttcacagcgattcatttggaaaagttctcgtctcaaatctaaaggtacttcttaaccttctgattcgatcgacatatcccccaaatagacatacaattgcctttacttacctgtccttctcaatccgttcatctttttctgaagtctcggcaaatctctctcctttcatctcacctatatcccactcgatcatcccagccagatcggttcacctctaacggatactcctcaggcgctggcgttcaggatatcaacgagattcgacaaatcatcatctcgactgaagaaaaggctaggtcagttcttttttattctatacgaaaaccaaacacttatttgatcaaaaaccccgatgaaattggcgacggaatatatttggaaaataggactagtcgtttggaatgcttagacgaagtagaagagatggagcttctgtttaaacactatggtatcagctggggatggagagtaagttctgaagaagctggcatgtctgaaggtacaaactggggcttgacgactctaagattatgatgatttctatgttctgtttcatcgctatcgccttgctgttcattacttgtttgcagacaggctcgacactacaagctcatgctatgggagattatgtgattcaagctatcaaggagagaagatatcgatatgaagagttcgaactaaataaggaaaatcaaactgttcccccgcctcctaggctcgtcatactgaagcttgagctctgtcttcgtcgagactcaagtcgaggtgacgatggtaggccggagttcatgcttgtaggggacgacgaagaagtggaggatcgaaagacagacgttagggtcgactgaacgttctgaagtgcctgtgatatcagtcgcccccaatcagacaatttccaaaataataaagaccctttatcagtcgtgttatcaaaataacagagtaagaggagcgagactcaccaagtcccttctacctggtggtgcagacttgacgccgaaaagcttaattgtagttcccgtccagagaccaacgggagccagcccggccacgtagatttcaccccaaagtagagatgtctcccagatgagtgatgtaggtgagaactatcgcagatgcagataagagacaataccgttcagattttgagtacattaatctgcacgcaatgtagcggaagaaagcactcacgaagaattttcgagcgacgattggaggagcagatggtaggacatcggtcagagtaacctctcgaagcaattgtaagatctctttgttaggcccttgagtcttaatcatctgccgagcttcaaccttggggagaagctccgagatcataagcagaataggatcgagcggcaatctacgtatcattcgaagacaggggctttcagaatcctctcctctgttaaaatactatctatcagatatctgactcaccctttctgccagctggtcacccaatcttgcgttggttgaaatccgccacctaggcctcctgtcctgatcttctctaactcctcatccaacccatcgtcttcatctcctctctctctttcctctcccaaccctccgccttcttgaatcccatcattcagcccctctcgtctctttcccctcgctttctcgctgagcggtttttgtctcgcgttttctacaagacgcagagaactgtcctgagcggagtttgatcggtcaacctcaggtggattccctgaggacagcgaatgcgtagacagggccgcgttcgacattctttggttgagctctgaattagagagtgtagacgagtccatgtctgaaagaaaggctgtcttttcgttcgaaggcgcgacattgcctcgagtattttcagcccgtttgactatcagtacgagtagtcgaaaaaagatgaagaacattctcaacatacagattgactactgagaacctgataaacttagaagtcatgtttgaatgtgagaagtgacgaaccagcagctaattctctagacttctttatccgctggacctctcttagcccggttttgagtgtgaaagttgccagaaactgaaatgtgtgagaggctcctagaatagaatagattaaatttgggttgcctttggagtagaggttgatcagaagaatgtcagcaacgcatcagaattatgtgatatatattcaaagggattcactatcaagtcggtgaaagatgacagaacagaacgtttccaaacttagacagaagttggatgtcagcaagtatttcctctttgttaagtttcgtttattaatttctctgaaataaactcacagataatttacaagtcgagggtgcccttcatcccgcaacatgaaacctggattagatagcgcggtgaataactggactagcttggttgaagcttgtacactagtatcctgtagataaggtgcgacattggcaattgtgattgtcaaagcttaatcgacgtagcaaaactctgagtcagatggaacatttcgtaaagtccaacacatatcaagatcgaagagaagaagtaataggagcttaccagggaacaaagagttcaactcaggagttgttgcgatagagtatatggacttgattgaaataaagtagcattggatcgaaactgagtcacgccaacggaacagatttgaaaagaagagacaaagacactcacaacgatcatgaaatctgctgccgtaccctggatagcccatttcagaggaagtgccatagaaaccatattcttgctaatggcttgtccgaatgccttctccgaagaaatggtttgtagaatatatgcgcacatcctcaaaagaccatggtgggctgacgaaaatattgataagagatcggtaagtataaccagacagcctacaagcacaataccaaagggaggcgcggtttagaaaagctgaggatgatagactaaccaggatcgtctttcaatctaaggcacgtgaaaactgtgtgggccattatctctactgttcgtttctcatctgaaagaatgaaagctcggaatttctatatgaatagtttgaaggaccaaccggtcagccatgaatctaaacacggactacttcagaataaagaaagctccaccttattaaggtctatcaacttccaaaagagcatgactgtgtatttattcacgtagtttcttttagctcctcaactatcaatactcgagtgaatagatggtaagacaacatacaggtctcgagtaataacagaggtgtgttggagctactcgagaacagtccattggccatttggagatgttgattgaagacgttcaggatgctcttgaggatgaattcgaagtcttcgctccggtgctacatcacgggcacaaccagtgtggattggttctgattgattatctttttttccgttcgtcacaaaacagtggcaagaaaatagggatgataaatgcgcaccagcttggacaagaaatattggaacgagttcccctttcccagttccctatcttcgtcctcataccaataatctagcccacatagaagcacgtctgccgctccttttctcagtctatctctccctacgccgttccctgcatccgtagctgagccgacactccctgtgagaccggccttgactaggtatccgaagggcacattcttcactccatccaaccaaccagcttggctcggattgaggaacgtgttgaggagcgaacagaggagggagagtgtttttcgtttggggagtcgttgagtcaaggaatgtagaggtggagaacgaaggctgggaaggagcggtggaggagtaaacatcggagtggacagaaggatttgtaagaatcctaatcacaaggaagcgaatgatgtatcaaacctcattgagtaataagctcaaagtaacgggggtgagattaaatggacagaaaccgaattcttctacatacgaaggacttcgattttgttggattcatagggcgcagaatttcccagcgatatagttgatccaatccccttctccctgcaaaatcatgcaattgaatataggttgaattactcggacaggtgccagagaagataattatacgaaccaaatacagtaagacacttttccaatctgtgggtcaactgtttccgaagggatggtgaatcctgcgcagaacaatagatccactgccaatgtgaataatctatctgccaacggaggactcaacggctttctaggggtgtctggtacgctttctccgacgcgctccccgccgtcactctcatttacagactcttcctcatcatcaccaaccacaaattgtccgatgctttctggttcttcctcagcctgaacaacctcctctctagcgctccagagcaccagttctacccaaccttcgcctcctagaccagacacagcggcgggaggccatcctatctcatacagcacaggtaatatgcggccgataactctcaagcagttaatagcttcaaccgtagtagaaggtaagtttgcagacgaagatgatgggttagaaggtaggtatgagctgagactagatttggaagatagcggactggggaaggaaggagaggcaatgagctgatctaggtggtcggtcaggtaggaaagaagggtctcgatgttctgaggatttatttgaagcgtctgacggactgaaatgagaggttttagttttcttccgggacgtaaatttagaatgatgcacttgaggagtggggactttactgtcttcgagtgtgatgagagaatagacttcggaggctgagtcaaagagagtatagtactggttcgagcgatagtcatcaggtcaacccggatcgctctcagtgggctataaggccaaattgtacttacttgctcccagtacttgtgatcttcagtgctgataagctgaaagaaagaaaggcacatgaagcgttaagtgaacacgactaaggtaggtagacatcagtttggacaactgaatcgaacctgtctgctgaagagcctcttgatgcctccttgcttcgttcgaaagttgagcttggtatcctctgaggagctatataagcctaatgcagaaggaagggagaacatgatagatcacgcaggacgcaaggcaatggtgatgatcgtgatgatgatgatggtgatggttgatgaattagttgaggagacgatgctgtccatctggatgatatggctgtgtcaggtgtcatcacgttcatgtggcgttgatcagatcgacctccgcccttctgatagactcggctggtcaccattagactaccatctcaatccaacttgaatccttaccttctcttcttcttcgttatctcttagtcgccatgattctcttggaggtaagttagttggactgcatgcgtgaatccgtagtagaagaatacgtgaccgtaagaggaagcaaagaggcgatgctgcaaatgtcgggatatccatataggagaagacttccatctctcttcatcttgttgtgctttacatcccgtgctcgtcgagaatgcaatctttgatggtcaaacataagtaatatgaataggactatgacaggtactgatttctcaacaacgccttttttcttctgatctttcttttccaaattagccccacaacgttatcatccgaactgtccttaccgagaagctcatcaagtatgtctcttccccttcttcctcttctctttcttcaatctgctttcgtcgctgatgttccttatcttcactcgttcgtttacgccagaccaacatctctagacatttcctttgttgattatgactcagtccgattccatctttcgactcctcaaaagaagacggagatttggctgtcgatggcaatcaagtgttgggcggacatcactcaattcggcgcgttagaggtgttgaaaagacagtatggtgactggatcagcgacactgttgaggaggggtttgatgtaacgctcaggctagagctggacagattcccggaagagggaggtaagttctcgttcttatcatctcgcgagacactcgtcgtcttttacctttcagtttatactctcagatcgatactctcaactcatgccttctcatccttgatcttttcctctaaaccctttttatctgaatcgatagaggagcgaacaaacctaatcaactctctctctatgattaaaccgaccgccatctctgctcctttcgagagagctttccatgcacagacccagattgccccgccttccgaaggagaggctatccagccgagcgagctcatgcaaattcattaccgagaggatgaagcaatctatatccaggctgctcacgaccgagtcactgtcgttttctcgacagttttcaaagaggagaccgatcgggtgtttggaagggtctttttacaggttcgttcgcgtatcctacttgaggctggcttggcttaaaacttgatctcacgcgtatatttatggtgtttttattgatgtggctcgctcttgcgttcataggaatttgtggacgctcgacgtctacctggaattcagaacgcgcctcaagttctgtacaccaaccgagacccaccgcttgagatccgtcacttgcctaacctcaaacgaaccgaagacgttggatacgtgacctttggttagttctcctccttgatttattcccttaactccctgaattttgctccgcgtgtctaacgtgcctgtttctgatttcgatctttttctctgcgcgcctctccagttcttttccctcgacatttcactccgatcactgcaccaggaacaatcattcagattcagctcttccgagattatcttcactaccatatcaagtgctccaaggcatatatgcattccaggatgcgttatcgagttgccgaattcctcaaggtcctcaaccgggccaaaccggagaaagaggagttgaccggggacaaaggcagaaagactgttaggttcgttgattgttttcttacttggtttacagaactgtttggccgaagaagaaagacggatcaattgactgggatgtctttgttattgaatttgtgcatcttccatgtgaacgtagtgggcgaactttccgatcccgataaaatattctccctcctcctttttgtcggcctttctttgagctacttttatgataactttgttctataccactggcaagagtatttgccacctctctttgtactgagacatttctctttttgtcctccctcatactttcatcttcttatctggcatgatgatacacaagctcttcccttaccgattagctctagcaatatgaaacactggatggttacgtgtcatgatagtaaccgctgagcgcggctgatgatatagccggccgggcaatcaacagagaaatgatgatcgccttccttctcttcattctcacaacgttcacgccattcagctcctctacgtttctacctttgtctgtcttcgatcactcacagatggaagcgctggatccaaactcaactgtctcagctcagaaccatccatcattgttcgagctccttgcccaagatcagcttcgatcgcttcttcagccagctgttcgatatgttctcaatgtatagatcctctctacttttttccattctttcgtcgaatctatatctcaagtaacttgttgacttggaaccacaacgctttttgaaatgtgtttctctataggttcttgctcattcttatccgagatatctgattccagttgttaatcgacatgaggaattctatgcgctcttgatgctcttggtggagagacatcaccttctcaaacacagttcgtttcttctttcttttcgaattctcttccttatctgtacacactgttgggtatcgatactgatggttcaagatgatccctctcaataggcgcctcattttccgaacacttctatggtttaagacgaaatcgagccagtttattacctacttcgcgatgggacacctttgatgctgatcacgggggatccaaaggtcggcgccgacttcaactcagtaatcaacagatcttgacaagtttgttagaactcgtgagtatacatcatgtcgtaggaataatctctcagtacatatatacttgaatgtttcgactgatgttcatctcgatggatctttgtctaggtggttttgccatatgttggactcaagctacacgatcgattcctctctatgggagggggagctgatagttctgttctctcacctgattcttcagatttctcctcatcttcagatccaagttcttccccaccgagtcgtctacaacatctaaaatctagggcgagaagtctattcttgatattatatccttggattaacctagggaccgaggtcggtcgactggtttggagtctaagctatctgttcgggaaaagctcttactggcgtgtcgagagttggatggttggatatatcataggccgcatcacccgagatgacatcgtaagtgttgtgcccgtctgccctattcttacgtagtctgacatggcgttctacttggattttgaaaaactcaaggagagcccgattccaaaacgcccaacaatcttcacaccattcatctctcggtcttccatcttaaaccgtatcccatcgcctccctcggccctcccttttcttcttctttctcttaaatttctcgaattttatcactccccaacatctcctttccaactcctatcttctacctcctcttctctagacccgtcatccaaaaaacatacgccgatccttcctcctcccccaagaccgatgccttcggtagaaggtgctcgactcctagaaggaaagaaacgaggggcgtgtcctttgtgtggactggcgtggagagcgccaacagtggctggccggttgggttgctgggtgtactgttgggggtgtatttgggacgaagtgggtgagaagggaaaggccgatcctgtatcgggagagggatgggtgacgagagaaaccttgagaagagttctaatctgagcaacaagtgtttcaactgaaagaggaaactgactcgaagataaggggaagaggagcacctaggagaaataaggaaggaatggcggcatactccttataaaccccatcaacccggtcatcgagaagctcttcagaccgatatatctctgctgcgtcgtttcgagcttcaagaacatatatacccaactcagcgcatacaacccccctcttcatctgtcctttcctcttgagctcaagaaccaaacatcaccatcccaacgttcgcctgatcggtcatgtgaactagtcctctctttcgagaccaagtgtctcaagtatctccgcactttgtttgccggtacatgcggcgtactgtaaccaaagttgagtcgagggatagattgtgagagaagatgaaacgcagagagccgataagtaggagagatgggtcagatcgtatgatcatacacatatgtgaagattaatgacagggaagaatatgtaaaaccttttgaatcagattcttttggccaaacccaatccaaccaagaaacagattccatgagttctctagatcatcttgtatgatattgatacattttgtaacaattgtcagcggtctcacttacttgcacagcatcccgacacttgttttgagaagtcttgtcagtcaagatcgatttctatatctgacagttgtggggtgtatgcgtcctcacgagtgataagatcaaagtattgacaaacctcgttgtagatatgcaatccttgaatatgtcgatcgacgattttctttgcttcttgatctagatctagacttgttgagacaggaagagagacatcgatgtgatttttggactgatcaatcgttggatgaaggatagtgagaagctgggcctgcaagacattcaattgagtttgtagtttctgatgtttctcagaaagagcattagaagatgtgatagccatgtagggagatggtgagatatggacggatcgatgagatcgaaagacgaagttagagttgttgggagaggtgaaagaggagacaggagaaccggtaagagacaaagaagatctatcccgcataagtctgtctggaccacaattctgtcaagtagtagccgtctgctgattgttagcaattggcttttagcatgtcttattcagttgtgttcgagcctcctggtcaacaatgtatacgttttctctatgtgtaatacaaagataacttgttgaattaatctgaaagcaaaaaaaaagcagtgaaggtccagcccaagagatatacacaaagagaagtccattgatcatgaagccgcctcgggtccttctccaccaggtacgagctggtttcatgacaattaatataaaatcacagacaaatcacagagtgtcaaatcagacccatcgtgatcgagttaaagcgcactctataagatacgaaagcagtcataacaaaaagatacaaacaaggacgtacgatagcgatattcgtgccgttgagaagagtttggttgagagaggtctttatgcgaccttctggagtggagtgactatatttggttaaaccagacaaagtgttagccaggatgctcttgaacctcttctagcaataactcaagatattgggtcagaatatatggaatggatgaagcttactattcagtgacattctcgaggaccatgtctacaatgcaatgataaagatggttccaaattcaatgtcatctatttctccagcattccaagggtggcagtgacagcaatgatggcgacaacgaatggtagaagaattagccaggacttactgacgtagtcgtcgaacccagtcaaagttccgacaaactctcgatcacctttcctataatcgtccatgtcagagaagaatatacacacacagcgtcaggttatacacagataacagaagaactgagcagaaacagagaacatacatgaccacccagatcttggatccaatacatctatcaatgagctctgtgtatccaacccagacgagtccggccgggcggacgaagaacgaaccacatgaatgaatagaagtcagccatcaaatctgccactaaatgtatcagaacagaagacacataccgagagggagaatctgggaagccattctttaattgaagagatatgaagctaggattaagtagatgatgatacaagtgcagagtgatccaaagatgagtgaagttctagtcgttggatgtttgtgtgtagagaaagcgaaaaagctgtgcatcctttctcttgatccccacaaggcgagaaatgacgatgaacagagaacagctagacagataaagactgatcagatgagctgaaagtctctcttcttcttgtttctttcgatatacattgaacatccatcttcctgcacaaacgaacacgatgtcttctgagccagatacagatcttgacccggtcgttttggacgacccggaggatgaagatgaagatgaagatgggaatgaggatgaggacgaggatgaagatggagatgaggttcaatatattgaatctgacgtgcgttcttatctcttgttttgtctcttccttctttctttcctttctgtcaagtcttccggaaccatattgactggccatctaccctggtctctgacggatgattaacagtcagaatttgagggtgaattcgtcgaccaagatgggccaggcctcgagacgctccatgtacgtttcgaagatctccataaccctaacatatacaagcctgcgatttgttcagccctagtattcatttctcaagacggtctctccctacgtatatcaatacatgctatgacgcacgaatacaaataaagggagacgatctctcggatgactctggaagtggtgatgagtatgatgatgagttgaaagctcagggaccagacgctggaacctatgattctggagcggaggatgaggtagagcaagtccaggaggaggttcgttcgcttactcttcttatagctcttatttcgaaaattgcaaaaagaacagacatatgctgttctcagagggattagctgaccgactggttgccacttattatattgtttgcatgatcgtcactcttgataaactggtaatgcacgaaactacagtcgacagtagcccctcgttcgaccaaacgagctgctatcgatggtctagagacaatcgaccaagaaggaacatctcttgctgagaaagagcttgaagatcctcttgcagctgaacctaaagatgcctccttaccggtggtcgacgacgtggttgataaggatgaacgagtcgtcaagaagacgaagcttgaataaagatcatcaggctgatctaggtgcgaaagattagtcgttcgagagcaaatgtatcgattgaatgaaagcttccctctttttacttgttagaaagaatgcgtgctctatgaatgtgttatcctggcctgggacggatcagaaagcattggtgagaggtactaagacaaaaactcttccgttaggtgttgattgagtttaaccagcctaaactgctatccggtgtctcgtcgaatgtcaaccttccgttctttccatgtactaaaaacaatcatcttgtcaaaaatcgtcacatgctcattacatccaacgaatttcctttctgaagacgacacccaaaaaagccaaccctcttgagaaagttgcttagatgtaagtctcgtatcggacaggggcgagggtctgggggatgttgccctcgagggtgatgtggtgagcctctcggggaagggcaggggatcgcttaaggttagcgtgctctgcagatagaagatagagtagagaatatcaatcagccgtttgacctttcaaaagagggttgaatcggaacaagaacgggacagggaggaaactagtggactgacctcccttggccttggcctccttcttcaaggcggcgttcctcttgactcggtccaagaactcctgtcggcacttagagtgcttgacgtgctcgattcggaggttgactcgcttctccatgtatcggtttccgacaaccttgaagacgatcactccaacacctcggggggagacgttgtagacgacaccggtctttccgtggtagaactatcatggtcaagagcgacgtaagagaagatgttcgtgtgaaagggttggtcgagggagcgaaagagatgaccgggttggaaagaaaatgaccacaagcagtagaaaccagacaaagagatatgttttgtcagggcaatggctttgatgttttgtggggaatgggacgtggtacggaccttgtggggcatacccttctgctcagcagcgttggccttgatatcaacgatatctccgaccttgtagatcgtaaggtacgtagaaagagggatcgtacccttctctgtttaaccaagatgatagctccaaagtcaactttcacgtttcttccctttttttcgaatgctttcgccattcaaaatgctctgctgtcctttctctctcgtattcatagtctgagaaccaagggaacgaacttctgaagtccctagcgaacatgtggcgcgttcgcgctcggtatccgaaggagtgaggcatcttgaggaaactatgttgaggcggggaaaattaggacaagacagaggcgtcgggttgggtatgtatgtagaaggaaggtcagggtggttgatgtagaggatgagtgtcggtgaagaaagaagttattttttttgccggtagagaagatcgcgaggagaggaatgataaaagaaaaaaaaaacgacgtagagatcagttcccgaaagctcaaatttagagaaacgctcacaacggacgggtccacagcacacagcacattcgagtctcgctaacatgttgcacttgtcgtcccctcgacccaaacacaccttccagacttcgttctatcacggtcttcctgcttttctcctttttcacaatcgctcggccatactgtatttggctacattcaacattccgcctctccaaagaattttctccccaaagaacgaaacgtggatagttttcgaccagacaaatcggatcgatacaagagagatttgtgtgctgtctgctgctggactctggacaacgctggagctgttctcctggatgggacacaaaactgggatactaaccttgacggggatggatgtcgagtgagctgggactacgtctgctgagttggacctttcgcacagaccgtgcaggggcctgctcgtggctggccggctcgcaaagcaagcttggttacgatcagcaaaagtcagatgacttgtagccatgacttctgagaagagtgatagacaacgatagatgaatgtgtataattgattgtttggcttacataattacgttggtttgttcttgtcaagtccacaagcgagagagaaatttaaagtcgttcgatcccgccgccttctttagtttcgaccatatcctcaagatgcccaggtaagttcacgttgttgatctagatggatttcctgtcatacatgttggcgtcatgggagttcttctcggttgctgatatgtcgctttatcagggctcctcgaaaccactccaagagttagtttgcacaccatgcccttttttacagattcatttatacgttgcaagaactccccgtagaggggagtggagtgaagcattcatgcttataggtcgattaaattccctacctcccatacagcctacaaggttccccgacgacctttcgagtccgctcgtctcgatgctgagcttaaggttcgttctcttctgccgcgttgtaaactgtgtcgatacgcgaaatgttgattcggagtttttctcttcatttcttggttagctcgccggagagtacggattgaggaacaagcgagagatctggcgaattcagcttactctctccaagatccgacgagccgctcgagagctccttaagcttgatgctaaggaccccaagaggcttttcgaggtttgtgttctgcttttcttcgccttcgtttacctacatagaacgggccgcttaccttatttttgtttgacaactcatgtgatctagggaaacgccctcatccgacgacttgtgcgaatcggtgtgctcgatgagacccgaatgcgacttgattacgtcttggccctcaagaccgaggacttcatggagcgacgactccagacccaggtcttcaagtccggactcgccaagtccatccaccacgcccgagttctcatccgacagaggcacatccgagtcggcaagcagattgtcaacgttccttctttcgttgtccgacttgactcccagaagcacatcgacttcgctttgacctcccccttcggtggagctcgatccggacgagtgaagcgaaagcgagaggccgccgccgcctccaagggagacgacgccgccgaggacgaggaggacgacgagtaaacttttctactcttgtcaactattctcatgggcttccacaccaatttcttgcaaatctgaattacatggcacacgagttgagcgacaccaagtcaatcaagagagaaagaaagctcgatggcacgattagctgaatatcttgaatatagtctacaattcaggcccagatatctgtcatgtctagttggccatatgttctataaccacgaagaaaatcttcattgggccatatcgctaaccctaacagctggattagattagatccaactggcttcactgacgagaaagttacacagatccgaccttctaagacacatgtcgaccagctctttaccctccgttaaacgagctctccggaaacagattcaaacgatcctccggtccatcccgccggagggtattctcgctcagtgttcgtgtttggtttgacccgatttgagcactaaacgtctttgtcgtctctagtagttctcctttgactgacgtacttgtcagaacatgatgaaatcctcttccctctcactcctttttcttgcacaaagcccggacggtaacggatcaattgatccaatcgactgtctatcggtcatcacgttcgatttcagtgtacctgcctacggttcattcagagatccaaacctttgaacttattaagcatgctcttgacgctggaaagagcgtatatgtaccgttcatcccggccggttcaaacacggatatgcaaatgttaaggctatacgaggaggacgttcctatgacagaagatgggtccaccgatagtggtttgaaaggagatgggtggaatagagacaaatggggaattccagttttgcctttgacgagaaaggacactgggttggaaagagaagatggtacgttcttctccaccttgaatgtgttgcttactagacatgtttgacacgctaatgcatttctttccactttgacttttgaactatggtggttgggcgatccccaaaatcattagcttctacttcagctcattacctcgatctcatcttactaccaggtgttgcattctcacctacggcctcttctttgttctctcgactgggccatggaaaaggatattacgataaatacatcactcagtatcggtcgatctgtgcaggcaagaatcgacccggtccgaagctgagtacgcgtcttctcttttctcgatacccaacggacgctattttgtgacagaaggatgagactatccaacagctcaaacaaactaacgctcttgattaatcacccgctcaacttattgctcaactcagttggactggcgctgaaagaacagttcttagacaaaaacatggtccctataggagaatgggatgcgaatctggatgaagtgttggttggagatcacgtgaggacattatccgaggacaattaactacttaagatatatacatgatttatgtcgatcggcatccagccggggattgatcggctgatggccggaaatgtgatgatggtcgaaactcgatctctctttttttgttcatcttctcatccctcttctctctttctactgacatccatctccaactgtctagatcagttcggaaacaagaagtggacacagagagatctttgctgaagagttgtattccagaaagggaaaacaaaggaaagaagcgccgaagcacatcaccaacttcagcaagccggtccagcccgatctcggatagacatcatcttacccaactcgtatcatccccaacagatagagtttttgtcgcaatgacggctctcgcatattaccagatgtttgtctccatacctcttcttcgttttgcacaccactcatgtgtgcatatgtgtgtgcgtccttccaaatctttcaatgactaacatctttaccgtgctcttcttcttagccatctgatctatactctcccaattcttggtcttctcggcctgctcacttccccgattttgacaaaatttgacatctacaaaatatcgatcctcgtatttattgcgtttagtgcaaccacaccatgggactcatggatcatcagaaatggcgcatggacatatccatcagcggagagtggccaaggcgtgtttggaacgtttctagagttagtcgaccgttaatactcttagccgcgcgtcgtttccgcgattacatttaacatctgaatttatccctgatcaacagtgttccatatgaagagtacgctttctttgtcattcaaaccgtaatcaccggcttggtctacgtcttggcaactaggcaccttctcccatctctcgcgcttcccaagactagatcgtccgccctttctctcgcgctcaaggcgctcatccctctgcccattatctacctatttaccgctcaccccagcccatcgcccgacccgctcgtgacagatcactacttctacatgcgggcactctccttactcatcaccccacctaccatgctcttggcagcattatcaggcgaatatgctttcgattggaaaagtggccgagcaaagtcaactattgcagcaatcatgatcccgacggtgtatctgatttgggtagattatgttgctgtcggtcaagactcttggtcgatcaacgatgagaagattgtagggtggaggcttggaggtgtactacccattgaggaagctatgttcttcttactgacgaatctaatgattgttctgggtctgtctgcctggtaagttgatctcatcctctcttcctttggtgaaaaaagctgtttggctgattgctgcgaactcacccatcggaatctgtagcgatcatactcaggccctatacctgctacacggtcgaactatttatggcaacaaaaagatgccatcttcatttcccctcattacaccgcctgtgctctccctgttttttagcagccgaccatactcttctcagccaaaacgtgacttggaactggcagtcaagttgttggagaaaaagagccggagcttttttgttgcctcggctggatttcctagcgaagttagggagaggctggttggactgtgagcacgcattctttaggtttgttcggtctttcaccttcatgtgcattcgctgatcagttttcttggtgatccgggacctgcataacagatacgcattctgccgggtgactgatgatcttatcgactctcctgaagtatcttccaacccgcatgccacaattgacatggtctccgattttcttaccctactatttgggcccccgctacacccttcgcaacctgacaagatcctttcttcgcctttacttcctccttcgcacccttcccgacccacgggaatgtatcccctcccgcctcctccttcgctctcgcctgccgagctcgttcaattccttaccgaaagggttcccgttcaataccatttcgccttcaggttgctcgctaagttgcaagggctgatccctcgatacccactcgacgaactccttagaggatacaccactgatcttatctttcccttatcgacagaggcagtccaggctcggaagacgcctatcgagaccacagctgacttgctggactatggtctatgtgtagcaggctcagtcgccgagctattggtctatgtctcttgggcaagtgcaccaagtcaggtccctgccaccatagaagaaagagaagctgtgttagtggcaagccgagagatgggaactgcccttcagttggtgaacattgctagggacattaaaggggacgcaacagaagggagattttacctaccactctcattctttggtcttcgggatgaatcaaagcttgcgatcccgactgattggacggaacctcggcctcaagatttcgacaaactcctcagtctatctccttcgtccacattaccatcttcaaacgcctcagaaagcttccggttcgaatggaagacgtactcgcttccattagtcgcctacgcagaggatcttgccaaacattcttataagggaattgaccgacttcctaccgaggttcaagcgggaatgcgagcggcttgcgcgagctacctactgatcggccgagagatcaaagtcgtttggaaaggagacgtcggagagagaaggacagttgccggatggaggagagtacggaaagtcttgagtgtggtcatgagcggatgggaagggcagtaagacagcggaagaataccgacagacaatgatgagtgagaataaaatcatcctcaatcttctttctctaggtgctcttttttgttttctattatgaccaactctaaaggaactggccttgcagatatttctcttccccccatcttcctcctttccatcgtttgttctttccatttttgtcggtttactatgtcaattctttttcttgctttttcttatcaatctagacaattctatagatgtttagaatttatacattgacaggttatagaccataaagactatatggctttggctactagagagcaaccgcaaccgatggtggtcgatacgcggcccttttggacttgggtgccctcagaccacagaccaccaagatccccgtgggtcacgggcttagcttgtgccagccccagcagtcatgacagtcccagccccagccccagcctcactagcaacagcgtcaaagcccggcgtccttgccaactggttctcctcctgatgcagggctaggtgcagcatgttgcgcgatacgtcgacatacctgttccaccaagtctgagagaacacagtaagcaaacatagagagtagtgagcaaccgacacatcatcttgagccatacaacacatgtcacttactcgacagacgcttcgacactcctagatcgcccacgctttgcctcttccagagaactcgccatgacacttcgagcacactctcgacgtccgatactcccggactttgcgagcctggatcagtaggtagatcctcagcttggcaaacagcaccttgacaggaccaggagcctgcccacgagaaggcgccgtcgccgaaggccaggaaggtgcgtggacgtcctgctgacagacggacggccaccttgcggtacgtttgctcgcggctgatgtgcgcgccccagtggagacgtctccaccgccgagcggcgaagaatgccgcgagccaagagaaggactgatagcgcgagacgagagcagcatggagaccatcgagactggcagatctgaaggaaggtctgaagaaagaagccgaagaacgataccgaggtgggcaaggcagtttgcgaggtgagaaaggctgtttgcacagttagattgagcgtaagtgcgagcgtaagcgacactcgccacggagagtggttgacacttccgcatcgttcttcatccacagccgctgttcctcttaagcatcattggcagacaaatatggacatacataatcgagtaagcatgtcagaatttacatctgaatattacagaatacaaagtcttgtgtacaaggagttcacctattgtatactctaccgaaaagctgccacggaacaaggttaaattatcaagcttgtccatgtattactatgtatctagtggttgtttggcgattatacgaatggatatgggatggaagtcttttggaaatggaagggaaagcacgatggaaggaagagaaccgaaggagagaggggagggggaataagacatcaagagccccacggtattcgtctactctatcgacctgggctcctctctcagttttccatccttctccgttcctttcctctggaattcatcctgggagcttttgagggtggtttccgaaggtcttctggacaattcgctccaaattgtctcatcgatcgttgcggttgcggctgaggttgtagtaaccggcgatatatgcatgcgtataggtgcagccgaagattcagctacactcgcaggcgattgtgcagggggtcgctcagatttggggacgtaagcctctttaagggagtaccgctggatgaagaagctcatcagtagacatgctcccaagaaaggacagtagatcttgaacagcatctgttaaattgaaagataataagcagagcaagaagagataaaaaaaaaaagtgaacatcggaatagaaacgtggagagccaaagatatcaaagaaaactaaacgcacagataaggattcagaaaatccgtgaaggacttcctgtcgaacgcttgcaggctgtaccaactgaagagcatgataatcatccgacgtcgttggcgtaccagtgaacgtgtacccgtctatccgatcaagccttcgagcgagcgaggtggagaggacggctccagagatggaaatcccagtggtggcacctagagttctagtcaacaggaatgaagaagaagtcgctgccatatctgaaactggcattgcggcttgaagcaagatgagaggtggttgaagagactgcatgacgagtgcaatccgtataccacacaaaagatgtatttaagtagagcctcaagaaggatgaaggtacaaggacaagcgcaggaaacttaccatcccgatacctactccaacctactcataattaaagcagaaattgcagatactcagaatgccggcttatgagagaattaaaaagccgaaggaacaagagagtatgtgtgcatgtctctaccaatagaggaaagatctcgttcactgccgtacttgaactctcattcataagattcatcaatccgaatcctattaaaccagagcatgatcagcatgcatgctttacaggatcaggaagccgactgtatgttcgggagagcacgaaagaaacgaacctaagcatgcgatcgcgtagccgactcggataaaacttcggatgtggccgtaccgggagatcagccagccagtaggcactgcatacaagcatacagacgcctaatctcgtcaacagaatgtcatagaaacagatgacgaagggtgaggacacagcaagaaagacaaaaacttacgactgactgcgctgaccgttaaggagaaagagagcagatgcacaccagacatcgtagcagatgtctaaccccaggaaaaccattataatatggttaagcattatcatccaaagcatttcttcctggatgaacacaagcagaacacatgatactgactcctttaataccctggaagaaaataggaaggtaaaatctgagcgcagagagcaacaactgatacgatcagccacgtacgagcctggaaggattagtcaaagagaaaagcacacacgtagaagacaagaacgagaatgcttgcagataactcatcagcaacaacagaactgtcgttgggttctacaggagccaataaagaatcagtataacatcaaaaaggttggtcagatcgcgcttcaacatgttgtgttgaaataagaaacattgccatgccttgaagaggcgaggaggaatgattgccttccgtttggtcgttagaaaatgcccgatggtaactccgaacatggccgctcctaccacaattaaagctatcgaagctgggctaccgactaatcgaaccgaacgaaggaagagtaccagagactcagatggaaggtcgtgaaggacaggaaggcaggcaataagattttaaaaatgctcggtaacttacatccatggtctgtagcttgttcaaaaccgacgacgatacaccctagagacaccatcagcaatcctctattttgcccaagacaccgagacaagaagcgagattatatacacagaagaagttgagcttgcgcatcttttagtcgcttcaaacaagcctaaaaaagagatacgagagaagtacaagaaataacgtacaagccaataaagtcaaacactttcttaaactctggccatgtggccatctttcgagttttgatatcgaggaagaagtagagcacgacgagcgccaaaccgcatgttggtaggttactgtaacatttggattgtatacccgagtgaggataggatactcaactgtagagacaaataaagttttcatagctgactgacataaagaagcaccaacgccctgatgttcatagaagagttaaggttgaacgcacactttaggactggacaattcacagcttactgagaagctagtcaaactcgatgatacatacaagtagattggtctgtaataagaccacccaagataggcctgtagcatgatataacgatgaaggtctttttagtagatatgcaaactcaacataagccgcatggctgctcaaacagtacatgccccaagacacttgcaatctatagttatcgtgttaaatcggttagtcgtcatcatcatgagagttcgatatgaatcaaagagaagagaacgagaatgaataccgaaacttactccccagacacctcctaaaaaaccttggtattctttgaggagagaaacgttcccaggataagtgattttgaacaaaacgttgggcaagtgagttggaacagagagcgaaatgatacttactgccccgctcagacatcggcacgatatctgatatatcaagaccaagaccacattgaaagaatcacggaacgaaattgatgaatacgaccctttctgcgcttaatctggagcaaccaattgagactatacgtaccactgatgataactgtacacatagacatgatccctccagcacctaagttggcacaaattccgagcgtgtcagaaagacatcgcgtcaccatagagggtgagcgcggtctacagagaaataagtatggatcgtatttatagtggcttaccaattccttgaagggcccgggtggcgattaaccactgcatactttgcgctgctccacatagctaaacgagatagcgtaagatgaagagaagaaggaaggggatctagcctgatagacgtgggtgtatctataaagagatatagataagaagaagaaggtcttacggcagaagcgatcatgaagatcaagacgctcatctcaagaatgatcttccttcctaacatatccgacaatctcccatactgggtccgggaacaaaatcaacgtccggccatatacttatatactctgggaaggatgatactcacacaaggcgtcagagttgttgtcatcaacatgaatgacgtgccaacccaggagtactgggaactggttgcatgcagatcactagctatcgagggcaatgctgtcgagataactgtaccagataggatgcaactgtgtgattagtaatgagtcggctgaggttcccctctaacagtcaaagccttatacttactagtctgatcgagctgagaagaccaatcaagaatatggtaaaatccagcttaagtcagccatcggattgcactcggcataactaagatgagacaagggatcggtcgtcatcgaatattctatactgacggcggccaagaacatgcaaaggatcagactggacgaccacgatatcaagtcaaagaaccaatcagttacaagacatgtagacgcaagaaagtttcaataaagagcgcatatcatacaaactcatacttgggaaggaaatgagaagaaatggatacctacgctgagaacacgaccgcaaaattctttccttccaaactagtatctactaatccttctgactcctttgaaagcgtctcctccggtgacttcttactctgagcttccaaatcggacggcggcaactcagtttctcccatatttagatgagctcagaaatcgttgcaagagatagctgaagagaggtgattgacagaaatgactggatcggttgttacttgatcggaggcaaggattttctcatgatcccaccgacggagaacgccgaacgcgcagccatagttctcatgacgatatcgttaggccagcatgtgtcttggcccaacataaacactctttagatttctctcagacgatatctttgagggtctacttctgacggccttgcccgttaaggcttggtggtggcttgaaatgtgcattctataccggatacacaccttgttcgaggaacacggcccccgagacaccgtggcgagacggactactcgtcgtcgggggcatggcctccgcctgttctcgctcctgccgctctcgtcccaccggccgttctacgtctttttggacaccgagattctttcaccatgcttagagcataaaacctattcaagccaacaaggaggatacagttgaggatattatcagtttcttgtccaactcgtcatctcatatttatcatcatctgtacacacatctaccataaaagaagccttcttttctaataccatgaattcattaaacatccagtctgtagctccgccgttctgagatgaaacctcagaaatccgggtacaacgttctcggatcgaccatgttcaaactcggaccactaccggatgtaggaggactacctgattggctacgctgagttttcagaatccgaatgatttcggagaacgaaggccgctctttagggtgttttttccagcagctttgggtaagcgcttggaggtgtggatatatcggcccttgaaaggacggtcgggtgtctttatctaatgagccgtggcgccaagaattcggttaatgagaaataagaaccaagagaggaagaataaggatacacggtcgatgaagaaatatctcgtttcgggagcagagagataataggggtcacgaaaaaacaaagaaagacttgccaatgatagcttcttcaacccaataatcatctctaccagggaaagggattgaccgggtgacgagttcgaaacatgtcatcccaaaggcgtatacgtctgatgatcggctcggtttctctatcttggatagaacctctggactggagataatatatgaccgaatgataacacggtcaggcagggtcttgataggattcggctctttgaagaaaaaatgaaaatcgaaggatttatacgaaccttctccatcgaggttcatcttctggaaatccaggaatatcttttcggagttgtcgctttatccttcgtagcccaaaattagcgacgagtgcatgacctgtgaggataccatcgttcggaccgtaaagattagcgcgatcatcagcattggcacaccgagttcttcaaatatttttctctttaattcgatagacatgatgtagaaggagtcaattagatgctctagcgtaccgtcaggggtgatatatatgttggtcgcctgatcgaggatttaaaggaagataaccgataaactaagtgagatcccgtttatctttctatgggacaccgttgagatcgaagatatagagcacttactctaagatcttcgtgaaggacttcaggtttcatatggtggagataatgcatcgcacccgcaacttccaacagctttttaacacggccaacaggaggaaaagtagaagccccgaacacacaagtctcagtcaaaacatgtacaccgattgctatccttctctttatacatatctttcaaacaggatgagtgaagaacttacgatagcagtaggattcaaagatcgattctccataaagtacttatcggctgttcgcgcgaggtcaacatatttcgtaacgacgtagagtccctttccagccgtggttgatgaggcgcccaaggttgcttgggtggggacgaggaaggtgtcaaatggacaaagagataaatcagctagctgaaaacatttgcttgtacgtgtggagagaaggtaatcaacatacttaggatatgtggatgcgtgacttggacccaagatcggatttcatccagtaacaactatttaacagaacccaaggaccgaggtttaaccatctcatgcttcttcccctacttttatcttaacatactatgaaaaagagaagtaacgtactcgtttatctgtaacaggcgggaacttcctaacgatcacattttgggatcgatatgagccctgacagaactgagaagcatactctgttctgtagaccgatttcaaagaaaaagcacgataaggtatatccacatcatgttggttttgcacaaggctaatggattaaggggggggggcggaatcgctcaaggtggaacgtacgaaatcacagagtcaatggcgatctctcgcctcgagattgaccactacacgaccaaaacatcagatcaattcagatatcagccaaataattgggacatcaaagaaggagcagaacgaagtctcgattttatggccgcacattcttcacaagagggatcttgccatcaacgaaagaacgttctgaggcttttagagcggcttcgaggatcatattttggactgatcctgagcttggctgactgtaagctttcagttgttgaaaaccagcgtaagcttctgcaagttctttgtctgaacaccagagagacaaaacgatcgacggctcagcaaacgagacaagtacaagggagaaagagaaatcacggaagaaacgaaccctctatcttcagcgcgtccaagatcctagcatcactccgagctatcagtccgacaacctctgcctcaagacctttctcgtcacttttcttgacagcttttgcttcatccataaattcgactagacccttggccattctctccagttgttgttggctttcctccgtgcgagctgcgagggatgagctatcatccgttttgatgcgaggggagggtccatacgctgtagcggaagaaggacgggatattggagaagaagaaatgggcgaagaggaactggaaccgggacctgaaactacggggggagaagacacagtgttggaaccgagtgtgacggcagggaaggcagatagacggaggaaaaattggtaagatagcgttctaaaggtgatggccatgtcaagaagaagacagagatctgtggaatgatcccagcattgacgccaaagatcctttttgtttagtttagaaagcaaggaccggctttggtcgagcgctctatgtagaaggcaaattttggtaagataaggctgatggaacatagctttgattaaagagctttaaaagaggatagaaaaataacgtacgaatggagttgtgagatcgtctcaacggtaatacattccaatcgatccttgtagatgactgagggcaagctcgatgagtgatactttgccagttggttcgttacgtttacaaacacgctgatcgcctccgagaccaaaagaagcgaggtaagcgggctgtaatccacgctcttagggggatttaaccgaaacaaagtccttgtaaggtaggtaagtaaccgcgggtggaaggagggagagcaagaaataggtaagaccatcgcgtggtatgaaagaccgcacctttacgatctcgcacatctcttccgcccgttcacctgcctggatccaatctgccgacctagccagccttccatctgatttgttgaggtcatgacggacgaaacccaacctagagctcgctctcacgatgtctgatttcctttgggcgaccaactctagatagttttggttcgcgtggaatgtcggtttggccaaagggggtggaacatgaagagccaggttaccggatgatgacgtcggagacgaaagcgtggaagacgtaggaaccagaagggcttgtggtttctggagtctgaatgaagaagatctcgaatgagcgggacgggaggaagacaaggactgatgggtgggggacgaggagagatcgacagtaagtgaggacggggcatcgacagtggagggaaatggaggggttgacacgcgtgagatggtatcaaggatgagctgtcgatcgtgttggtaactagaaagatcactggcagatgctcgttcgatggccttgatgtcgagcacggccaggggaaggtagatgagaaaagtcagttcaatcccggagggtttatggacaaaggagagaaggacggaaacaggacgagaaatagaaagaacgaaagaccaacctgatctagatctaagatggcggcttgatgctcgttggaagcgttatacgcactcgcacgtcctataaaatacgtcggttcggaaggatcaagtttgatcgcctatctacgaaacggatcagcagtttgtcggattgattgggacgatgtgcaaggagaacaaacgaacgcacctctgagaaactacgaatggcttcggcgatattatttttctggaaacatctaatcccgtgtcggtattcgaagcttgtgtaacccaaagcaagaacccagagtaagaacgtgagtcgttttggagaaaattgagtcgacacaaaaaggcgatatatgagagtcggaggaagctcactctggtcgagaaggatccagtttcagagcctgtctcaggagagaagagaagatgaagattcaaaggttcaagacaattcgtttcgcgtaaaggaatgaactaaagaaaggcttaccctatcaatatcctccgaagcggctttcaagtcattcttgagccgaaaagtgtctgatcgcttgacaaatagataggattggtactctagatctagtccttgtggatgaagttcgatggcctaaagcaacagatgggattgagagatcggaagaatgtgagaacgagatgtgtcggtacgatgcctaaagatggaagaggacgttgcctttgtgtatagcttgagagctccatcccagtttcccgctgcaaacagggtgtcaccctctctggccttttcactatcgatcacgattgtcaagaaagaatgtggagtaagcagacaaatcttgacgctctcttcactcgaaagagccaggctacagtgagaactacccactatgctttggagcaattgaccatggctgggagccgttgtggttgtttgatgtgaatgtctgactagaatataacgttcgatgagaatgtttgacgatattgtttgatgaagattcttcttcggtttttttttttggatcaagctgttttacttcttcgaccgatggtctctgtgtcgcacgtggcgaaacggtgttaactaatgtccgtctgtttctgtttttcactttgtcggctatctaatcttaggcctactggcctagactttatgtgcacatgtcatgttgagagcgttgtctgaggccaactctaatcatttagtaaagttgaacatcaataaggtggatacagagtactacaagaataaagattgcggaacaaagacaacaacgaggaaggagtcagtacgtatgtccagagatacacaaccaagacaagacagaatgtgtgttttctagtgtgcccatcagcaaaccacggcgaagtggcgaaaaaagtgtcgttcagagcccggttaggggttcagtcgcaaattaccataagacatcttttgggtggatagaaatgagggaggtcgaaaaaagaacagcagatatagagttcaaattttaaagcaacgtttcaaccctacatctgccgttgtaattccatctcctttttctccttggttcattctattcagaagatagaagtttcaaaggaagaggaatggaggaagatgaaacgaataaatgacaacaacaaatgctcacctttgaaggaaaagtaaggcaaagaacgattgatcgtgaagaagagagaaaaagttgtgatagagggacaaacaaaagaaatttaaccagcggaagtgcgttacagtaagtaacggtatacgagtaggtgttcgatccgttacttcgtttccgctcacagatcagcgtcccgttcactcgatttgaggagatggaaaggacaaaaatgtaccgggtttgcaacttgcgcatatcttggatgggttgtctccgtcttcttgactatctcatccgtcagatctgaaccccgagaaatacatcagagaaatccatgaggatgagtagtcatggcgctgagaaagtagccgaatatatgtttcctatttcttgcctcgcctcgacttctcgaaacgagtcaagaacgaggaagcatctagacgtacgtgattttatcagaaggtattctagtcaagccactggttaatctaataatgaagaaactaaagagataagagacacatattttggtgaaacaagcagaagttggtatgcgactcaaaaataaggattccgactttatttctatatccttctgtttctttgtcactttgtcactttgtcactttgtcactttgtcactttgtcactttgtcactttgccactttgccactttgccactttatctctctttatgttcatgtctgtctgtggaatgtagagcctttaccgcgctgttcatcataatcgacagccagtcaaaccgaccagaacggtgcccgatcaaacgagatctccggccaccaaggaggcatctatctcggcagcctgcaagacaaaaagaagtcggagtgacgaggacaagcgtccgggatgagcactgatcggtgctgctgatgtttgccactgctgctgagactgccatgactgttgaggatgaggctgaaattggcacaagctaagcccatgacctatggggatcttggtggtctatggtctgagggcacccaagtctaaaatggccaggtatcgaccaccatcggctgaggtaaccctcaccatgctttacgcacagctcatccggatcaactgcggatcaatcggaggaagatagacgctctgatgaccggaagacattaaccggggctcggcgaaggatgtcggcaagtatcgaggcagtcacctcaaccctcactgcgcccgtcagaagaatcttttaggttcggaccgcggatcaacgcggacggccttcctgtaggaacttatgttcctggaggaaaagagggcagttgttctggttagtatttttcgcacttttccatcattttttccttctcttccttctcccctttgcctcttcggatcaaatacagttgcttttggattctcaccctctttttcctgccttcttccttcccacgttgctctttccccctttccatattgttccttttctttctttccttcctcctcccttctctcctccatttatccccatagaacctatccacaggtacatcatccacaccgacatacaagtcggaatagaaaaatctaactacacgtccctcgatatccaacatttctcatcatgccggccgcctcgattcttcttcctgcccttttgtcttctcttactttggttcccagattaaccaacgcgctctctgcagcagagtggcgagacaagtctatctatcaggtcgtcactgatcggttctccaccggttctctcaccactccttgttatactaccgacaaagcatagtcagtctcttctttcttcgccaagatccgacgcgtgttactgataactcgatctttcttcctttgttttctttccgaacacgtacagttgtggaggaacttgggctgggatcagtatgtgttctctttcttacatatacttgctttcgcgcaaacgttcctttcttccttctcgtgtccaatctcaaacgaagctcgacgcggtctgaccacttgctgtgttgttatcttctttttggctcgtcttcgtcttctttgaatttgtagccgccaggttggattacatccaaggcatgggattcgatgctgtctggatctctcccatcacctccaacatcggtaacacgactgagggtcaggcttaccacgggtgtgtttttccttttatttccttgatccaccaagcattgtgaacacctttttcttatcatttcggtatctttttgaaacagctactggccgatggactttgctactttaaactcacacttcggaactgccgacgacttgaaggctctctccgctgcgttgcatacaagagggatgtacctcatggctgacgtggtcgtcaaccatgtggccaccactcaaggttctgcggccttcgttccgacctccgactatggagagtttgataccagcgccgatttccatcccttctgctgggtcaccgatgacaaaaaccagacacaagttgaacaatgttggttaggaacctcgaccttggctctcgccgatattgacacggagagcacgagcattgtcgcttacatgaacacctggatcaagacgctcgtttcagactattccattgatggtctccgaattgatactgtcaagcatatccgaaaagatttctggcctggtttcgcctcgtctgctggagtgttcacgatgggtgagatcctcgatggctcagtcgcatacaatgctccttaccaggatgtattggacagtgtgttgaactaccctctctactaccagattatgtatgtttattcgtccatttcctttcttgaatcatatcaaacctcttcagagttctcgatttggaacgtgaacacccaactcatttgcctccctccccccccctttcttccctttaggtacgctttccaatatgtgaacgcaaacctgggagctttggtcgatgttcacaattcattgctatcctcaatgaatgacaccaccttgctcggaacgtttgtcgacaaccatgatcagcccagattggcctcgcttatcaaggacacagctctgctcgggaatgcgtatacctaccctttcatcaccgacggggtccccatcgtatactacggacaagagcagggcttctccggcggtgccgatccagctaaccgagaaccgatgtggacctcaagctatgccactgacggtattggctacgctcttttcaaaaaattaacagccgctaggaagcaggccggaaattcatcctccacgttttacacaaacaaggccacggtctcttactatgacgccaatgagatcgttatctccaagccgcccatgctcgccattctttctaaccgagggtccagtggaagtggtagcgtgaccgtgccgtcgaacgcgtctttgcccgaggcggccgaggtggttgacatcttgacatgcacgtcttggaggacggacaagaacggagcgtcggtagtgtccgtctctaacggacaacctcaggtgatcctcccgttggcgaacattggtactctctgccctggaggagttactgcttctaccatcaccgccggttcgactgataccacacctgccaatccatcgtcctctgctgctgtggccagtgcgagtgcaagctcgagttcgacaagttcggccgctacgcccagtgggtcgaccgcctctggttctggggccgaaaagtcgatcagattgggaggttggtctaccgtcgggctcgttgggctcatcggcttgaccactttgctctagttttttcccttctcacttctgctactattgatcatccttcatgttgcatattcggacatttttctctattcttgtttccttgcctcacctgtcgtctcatttcttactggtctgaaagaaaagagaaacatccacattcccctagacgtcgaccgcctggcggcttttctatgttccccttttctttactttcgttctttggtctgtctcggtcgactatcatagactttttttcccttttccactttaaatccgtttcacttgtgtgtctggcatttcactccattccgcaccttctgttgttttcgttctcttgttttgaatttgtccgatcattctattaataccaaatggacgccttttggctggatccagcctttttattcctttccattgcttccagatgattggttgtcagaggcaaactatcaaaggattagaaaaaaatgataataaaggagcatacggtgcaagcagagaaataatagaaaatctggtcctctagcgggtttcctcgacatttatgatgatgaaatgatgatagcaaatgaaagtgatagtcgataaatagaaatgaaatgaaatgaaacagactcagaagaaggcaagggtggacagcgaacgccggtagcttattatttccaccctttcttatgatctgacgaccaaacagcctaatgtgcctggtgagtacctcggcgtgtttagactcgacgaggcggtgaagcggatcagaccggccagcggccagcggtcagcggtgtttgattagattgattagacaagcggtcaaagcgatcagaattttctttgtagtgtatatagatgtatgttcgcacgcggagtataaatctggattgactatggcctgaacgtccagcaagagagaatagcgaaaattgaaaaaggttgtttgcgtgtgtttatcaaaacatctgcgatgtgtcaactgtcttgggtcgtgtggcgtaagagggagggggaccttgtacgcctgttaatcgatcaatcggcaactaaccgccagatttgatcgaaaaggcgagcttgaacgcctgcttggtctacaattttcttttctttcttttctcttagtaatgacagaaactcaaagtcaaatcttagtgaacgttgcacacaaggccctcttgcctttctttcgctgctagtagctgatgtgacacggtaggttttgtgattagaactctgtggtcggaacaatcgaagagtttccctcgtacgtatcaattgttttcctctcttcgaattttaaatatacggggaatttaaatgataaaaaagactcgggtccaactatctctgtgttatctctgatcctgccgcgcgtacaaagatttatatctagatccatgcctgccgcccggcagtttcctcgtttcaccttgcgctacctgttggagtctttaacagcaagcacggtcgtgtttgtgtttgtacatgtgcaggaatcttctttgatcggtccgactgaccgccggtcaacacggacacaccatggatgccacaaactcagtacacagttctcagacaatgatacacgtatacattcacacaatttctctcctattggcaaacacatggacagacaaagacccatatacaccgttagcgtttctttccttgcgcgggtcctcaaaaggtattctttgttcagtccctgcctgtttctggaggttaggtttcgtttcgtttccttcccttccgaagagaccagggtcttcttcgtcatagttagttactctgtgtctcttctgacctgatcaaacactctttatacaaccgataaaatgttttcttgtcttctttcgtttactgttgatcatccaccatcgatagtccaaagagagaagaagaggagtgaaacaaaaagagaacagcagaaaggactgcacacacacgtatcaacacagtgagtcgttctctattcaattcgacttttggatgaaacaaatgtaccagacaagaacagttttgaaggaagaagggagaaatgtgccggagcaaagtgttgcgcgaataagcagctaagacgaagagacttcttcataggatgtctctcaagtctttcccattgggggatggggttggggacggaaaaaggagagaggcaggacgatattagattgtcagactctcgcagtgaagtgtgcccgcagtatatctggtgacagaggaggcggcgacaggaagaaaggaaaagacgcgatcgaccgcattgacggaataaatgatggaggcaacccaatggatctttcactctgcgaggcttcgtctggctggctgcctggctgggtgaataaaaaaaaggtatatttgaatttaggtctcccttccagcctcttcctcctctaccgcctgcccctctactggtgcctttctcagttcctcggccctgaccagagtttgtgccttgaggtctctgacctcggtgctgaactctgctcactcatcccgttcctctccttcatccttctttctttctctgggtttcttctctcttctttctctttgacctgtcgaccacaaaccacgaccacgcctggtgctcactcgattcttttgtgtgctctcttccaccggttcatcactcgtttccccttcctcttgctacttcttgcatctctctactcgcttttccttgacctggctggcttaagggacctctttagtttggtgagtagcttggattggagtttttcttcttatattgcctttttccctttcgtctcttcccgagtttcctttcattcggttttgccactcttcgttggtgtcgcaccaaacgtcgagcttcctacacaacactgacattatcacatctacccctgctggtttcatataatatatcaaaagggtactcattttcttgtacaaagactagcaagcaattgtcgaacgtatcaaaaaaaataataatcatatacatacacgcacagagaaaagagcgtaccgcttccaacaacatctcgtaagtctttctccttcccatttgctttcttctttctctcccctccacccatcctctcggttacgtctgagccgagaaagccatcaccggatgagatcagcccagactgttctctcggctcagtacggtccggtcaagcgagagggacctcggtcgaatgggggaccccactcttgaaccggttttcgtctgtggggaagcataggaaaaccttggggtttctctgttccctctccctcggccgcccaatttatacctcggctcaataccttgggtcacttcctctctcgtcatcgacgacgatctaacgagtttcgttctgtcgtatttttctctgcatggcgtttgaataccatccatctgctttccaacccgccctgaatcccgagtaacgaagggagaactgagaaaagtctacgcagaatgtttagccggtctcggatgctgacggtcatcgattttctcgcttgcttcctcctcctttccgcacagaatcgatcattccatcttgctttccccacacacacatttcaaacaacagatccaaccggtaaattagatacatgccttatctcgacccatccgcatctcccaaggctcccttggtgactcctcattcggttccagtgatcactcgaacagcaccatcgtcatcgaccccaacagagtcaaagcagaatctgtctaacaagtcgactacgccttcaggaacgccttcggcatctccctccctcaggtcacactatttcttctctccatcggacgatcattcggctgtacctctcacgtccgccatgcctggtctgccccgtcgagcaaggagccatggcagtgcttcgtccagccccgtcagagttctcagcccaccgaagcctccagggtcgatcctgcccagacgggcggtaacagataagacagtaggcactgatgaggtcgaatcccgcgatagcggcctcggtctctcattcgacggcagtcccaacacgcccgcctcagaatctgcaccgactacgccaacctaccttaggcccacctcggcctctcctgggccgatacaacctagacggaaaaattcatcacccgccggcttgccctcgaccaacattctcaacagacgaaccggctcggccacgtcccttctccgggtcgacatcccaagcccgccgagcggtggcagccgagggccgtccgtccagggggtcatgtctgcgccgctgccgccgccgctgatcaggaaaaagtcgggcgagctggtgaagccgtcgctcaagcggcggtcgacctcgacgcccggctcggctgccgtgtcggacagcggggagaacgactcgaacgagcacgatgcgtactggctttgtgcgcggtcggagccggcgacgccgtgcgaggacgggctgccgtcggtcgagaagaagacgcttcgctttgcg

SEQ ID NO: 312 - DNA, 25147 bp, Xanthophyllomyces dendrorhous
gacgcgtgcgctcgagggggaggatgtgaacgggcttggcgggacggacacggagaccgaggtcgaaggcttccggatctcctttcacggtgcgttcaataagtggggctctcgacctggagtcggttcaccaggggctggatcctctggcagccgacgaagctcggttattcaggataagattgagttcaggcgagaggcaagcagtgtgattcctcggagacaaggtcttaacctcgccactggccgagggaaaattgtccttcctgctgaaggcgaggacgtcatgctcgagcacgtcaacctggtcgacgacggaccagagaacggcaagctgtcgctcaaaggaacagtcgtcgtcaggaatatcacctttggcaaatgggtcaacgtcagattcagtacgtctctcctcgtttgactgatttctcttttgtttcctaatccagccttttgaccggtctcgttctattctttttttcgtacctttagcgatggatgactggcatactgtctccgaggtcgctgcttcccactcagtccacattcctgctacttctcttgggcctgttagtagtggatctcaaggatgggatcgattcaccttttccatcaagttggacgatgttcgacaaaaaatcaacgaaaagactctccttctcgccgttaaatactccattgacggtgggcaggagtggtgggattcgaatgcaggtgcaaactatcgattccagttcaacaagcagccctccccgcttccctcgccctcaattggcggtccaaagagtgtttctagcaagcctcggaagacctccatggaaggtagcgctttcttgcctctgttagaatcccaaggaattagtgttcagccacactatgctcctgggacatcacccatcaagaagccagccagcacagaatctcatgcttcgcccaaggcgcccacaaagtcggccctggtaggcggatggccgttcccggtatcatcctattcgtccacagctacccataaggctaagcccagtcctggaggaggtgttcagaccacaatgtctaccagtccctcacacatcactctcaaaaactattgtcctcccaccaatgctttggatcacgatcgaccctcctcgtcagcttccgccccttctcccaacgttctggccgttcctttcgcccagccaaagaaggtatctccttcgccttcgggagcatctactccaacggccgatcgaccgggtttccctcgaaagcgaacgtgggatcgagaggtcactccgttgacccatccaaaatcagtcgagtcgacctactttcttagcccgacaaagccacgatcgggtgtgtcgtccccgccgtccagaccttcggtaattgcttcgtctcctcaggtcagaaagctcgctctggcttcttcaggcttgcctagcccccctacaagtgccgaccagtcgcctcctagcccgggtcctagtcctttgccagagactccgaactctgccaggttagagcttagtcccggagtcgttccgtttgacctgcctacccagccgacaatgccaacgaccagccctctgttgaaagacaaggcagagcttgatgaaaagtcgagatctgcggcggatggaagcaagccggatgaaaatgctggatcgaactatgccgatttgtgagtcttgcttggttccttcctccttctctattttacttagcttgtgcactcatagactgactggagttggtcatttctcttttaagcatcgacaagtattgcttcttccgaggcgaggaagcttctccaccgacctcggttccatcgtcccacaacgcctcaccattgagtcatccttcatatctccctctgctttcccgcaaaggacagacgttcttttctccgacctcgagcgccaaaggatctggacagtctaccccgcagcttgttatgcattccggccagtcgtcccctttgggctacggcccggcacccaccgcctgggattcagccggccttgacgttaggctgggctcatccccgttcgtcccatccgaatttggaaagggatccttatggggacagaacggagaaaggccaggcactcaggataggtcttcagaaggaaacagcaacagaatggtcttctgttgaaccaaagcctcgtgtattcttcttctttcttcaaatcaggcatcatccagacgatagtctagttcgctctagacaccatattttatgctccttccgctctggcgggacgatttacccttcatatgtatagctctgcattgtagccttctctactttatcctccttacatcataattttccaacttcttttccctctgtgtatggtgttgcctatactattttttcttcaatttcaacatttactgttgcgtttctctcctccttatctgggcatcccgttgtttgtttgtttgttttttctttgtactgtttccttctttcttctttttctcttgttctgcgtacatagatctctcctctctacttcgttctctcttttctttcttcctagctgtaactacatctttcagatcttaaatctttctcctgtttctcttcttcatgtatgtacgtacatttgtctgttaatacatccaccctatcttgccttgtttcttatcccattctaactcataccgatcatacatcctacgttccttctttctcatccatctttcgctacccgttgttcgaaaacactcttttcctttttcttagtttttctcgttccgtgctgtgagatcgaatcatgacgactctcatgaagacaacctgaagtcaaaatgaagcaaagtctcaagtcatagatcgcaaactgaagtgacctcctctttctattcgttctccccccttttcccaagtaattcggtcacaccgtctacgatcagtctgggaggataatctctctcgattgaagttcaaatgatccgaccctgacgtttgtctgtttcattagtttccctttggtttccttctttctttgcctgatcgtccgtgattgtttcctcgttctcgacccccttcggtgttctcttcaacagagaagaagagaaaagaacatgtagatggagaataagaaagcaagatgtcgatggaaagaaaagagaaaggaggaagaaaagaaaacatctgtgcagagaaacggggttagggagcgggatctgggaaagaatgaggagagtaaggggtgagataaagagtggagggagggggtagtacatcgaacaaatacattcaaagttttcagtttttccttcttaaattatactaggcgaaaaaagaaagaatataacagaataggaaaatggatagaggagaggggggaatcaagataggagacagagaagaagaaaaggatagcgaaagcaggcgagctgagttgatagacaatcctatttggaatgaaaagagaagaagaaagtgtatatgtctgacggtgtcgttaaaggcatgtcttgaggaaaaaaggcatacgcagggtcggtttggaggaaaacggggtatgtgagattttgttttgtataaaagataacggatatgtttgaatgggtggaagatgcgacgggttggaaagtcaagcaaggggatgaagagaggataggcagaaacacgcagaacgtctcgagaataattacgagtacgagaggtgctctttttttctctttgtaaagtgagaaagtggggcgaacacgagagaacggcgaaatgtttttaacttcctctttccaaagaagaaaagcacaggtccaggacagaggaataagagaaggggaagacaaaatcgatcatccctccctctacatcgtacaggtcttgaacagggtcgtcagctctggactcctcgtcacgaactcatgggaccagaaggtgggcaacttgagcatctgaatgaacgtcaccaacagaccccaagggtgaggtctagcgacgaccactcgttcaagcatgaccctcgcaatgatctctggtagtttcatattgtcccctccgccagaggaagaagtagaggtaggcgaggaggaagacccgttcgggttcgggctcgattgaacgggatgaggaggagagttgaacagatggataattaggtgggagaagaaccaggtgtgcgcatttgggtatcgaagatgactagcgatcgacgagatcaaatagtactttccttcggcatcgagctcagcagccaacaattcatacaactttgccactggcgacgcggtatcaaactcaaagtttgccaaaccctctgcattcgttgtcgccgctaccgcagaagacccaacgaacaacacgacggcgttcaagaagggcaggttgtacactagaccgttcgatgtggcggtcatggccgccaaggacgatccatccgtttggtttgctcccccaacaggagtaacgattcgagctctcaaagcgggtaccagggccgggacggacctatccgagtagacgcaatcctccaacgccgctcgaagttctctagactggagtactgcgaagtaatcagacaggatgacggggacacggtgtttttccacgtcaccttcagcaaagtcgtacaggaacgggtttgggagcgaatgctttctagggaaagcagcgatgataacatttcggatctggacgcaatgagcgggaatgacgtctaggagggagtgatagtactcggcaaggaactctgggaaatcgtgaagaaggacaaggatgattcgcatggctcctttgtaaaacactcgggaagcctcctgcatcttggtcgaagaaaggaagggcgcgaggaacttgaacatggacaaaagcaaattgtgatactcgggccaacactaaatgcgatagaagagaagcggaaaagagcagtaagtacaaaacaaggtcgaactcaaaatgacgcaaaaagaaagagacgaaccttctcttcgcttccctgaagcaacttaggcataaagtgacggtgagatatgagagacatccaagagaaagcaaatccaggaagaagggtgggttgcagcatgcttaaggtgttgctgctgaacgcctggagacaacccatataggcagcggtatggatgctaggttcgatcgagtaaagatcatttaagatgctcgagaagaatctgaagaaaggtcgttgatcgaactcgtgttggaggtcttcatgtgattgaaccaacacaagaacgacgatcgagaggatcttattcaagtatctgattctcgactcgtccacctctgctccgtttggatcgccgtagtttttgaggagcaaagtgatgatctttgaaagagcgtccatagggatcaatgcagctgcgggttcggtcaccttgagcttggcgtaaccctcgacagacacctcagcacaaacacggaagaacaaaaatgtagcgtcgtcccccttcagaattccttgggcttggaggttggtgacgattccaacgaaggcttgttcggcagaaggagcatgctggaacattcggacccattcgagaaagtagaaagcgagtcgatctcgaagtccgttatcgtcgacacctacggcatgctgtccactagccgttggctgagcattcccagcgatctcttctaagaaccgaatggtagcgtcagaagcttttccagcttgggcagctcgaccaagagcctcaatacagtgtccaaactgtgctcggctggcacagggcttctcactcaataagcattcccggaggaactcaaccgtaaagtcaataacactcattctgagatcccggagaatgaagcttgatagctggacgtcctgctcggctacgttgatcaaaccggctcgcaacaaagcgacggtcacagggacgttgaacttacgctagatttataaagagaagggttcaagaaccatcagcactgttccctatccaatatttaaactaagagctaagatgttcagagagaaagacgcacctcatcctccgcatatatcaaccaagtagaaacttccttgtgaacctttgagaacgcctcacagagtctctgcaggatagcgacgtagacttctcttccaagcacagaatccgtcttgaaaagcaactgtacgaccttctgggagaacgacagcgcagtctcgtccctgttgacagattgagcggcgacaagagggatctgtaggatggcctgtcgaacatcatgggtaggtgtcaaggctgagagaccaggagcggtcgattgagcgaagaacttatcgagctcgagaaggagaaggttaaatttggcgattgcctgttccgcgtttgatccacccatgctggtggtcggagctgacgctgaattctcgagcagggcttcacctccgccagaggagggagagggtgttctgtaggtagctcgaccgccaccgctgacaggtcgagtacctcggtcgatgatgccagctctctggactttcccgtcgatgactgtcaatgatatcaacaaagtaagaagagaaaagaggccctggtcagaacctcttctctaaccgaatctacagcagagagaacaagagaaaacataccattagggagtcgagaaacgattgcaggagatttcgccctaccgaactcttcgtaaacctcgagttgctggaggagaaggccgttgggtcggatccgaagcatatcgggcaacatgttgatgttgacagaagcctgtgtcccatcccagaacggctggttcgtacgttgctatatatcaagagattgagcagaaagaataagcacatgataggcgaacgagttgaagaataaagctgaaaacaagacgcacttctcggtgttttcgtcgaagagcaaaggcaggcgtcaatgtctcgtccacatcgtacaccgccttgtcctgagcagctttcttgataacggacgctgcaaggtctaagttacaggtcaccacagcaacaaccgactcggatggaattgaggactttgaaatcaagatcgaagagatgtttagcaaaccggggtaacaattcatgatcatgactatcacgcatcgcaaagaagaaaagaatgaagagaaagatatacctcgttaaacccgttctgctgcaacaacgctctgacactcgtggtgatgctggttctcagaggttcttttgaagtaaccatcgccaagtttccagccaggttctgaaccatagaatgagcagccttcctcatctttgactcgtcgggctccatcgcaaaatctttggtaatcagatctctagaagaaattccagcaatcgtgactgatcgttcaaccactggaacgacgatctccctgacagcgcgttcgatggcagtatacacaattcgtttcaaactagcgtttgaactgaacggagcggtctccaaggggaaagacaagaaggagggaagttcggcgataagttcatccacctttcggttaagagcagcttgagcggcagccgccgcggcctcggtctggtacaactgaacggcagacattcgttgagacgcgtcggtaccgacgcctcccgctcctccgccagcggctccagcagcgtaacctccagggcccatggagagtcgttcaagatcttgaacgagtgatccaccgggcaaaccggaagcagcagcggcggcggctgtcgcagcctggaggatctcggccggtcgatctctgatgatcgtagtgggtacgaccgaaccaagatcgatctgaagagtcttgcaaagaacttcgatctcgaatttcaagttcaacttcaactctgccgtttgatacagctctaccaacaacctgatgaccgccatcagccaggggtttggtggcctaaagatctttgagtcgatgcattgttcgaggattttgcacacgaacggaatggctacgatcaaccgttttgcgtcgaacccttcgaccaagagatccttcaacgagagatgtttgaatctgatcggtttgtcccgagccaaggtcaacctaccaagccaagaacctagattcttcaacgtcgatcgatcctgagcctgagttaccgtcttttcagagttcaacagcacaagcgccttggcataggtctcgtacaacacgtgttgttccaacggagctcctcggtcgagtgactgaaggaactgcatgtagagaacatggttgtttggctcggccgacacccgagcggtgataaaataatgggcgaaccaacgggaatgtctaccctggaaggcgtctttcatctctgccacctttgtttcaaagttgctgggagcaagattattcacgataaacaaaatccgatctgatgtatcctcatcgggttcttccatccgttccgagctcacatcaaacgagtccaggtcgagcgccttgaacgtcggtgggggtggaggggcctcggcgatcgaccgaccaccaccgccaccaccaagggtaccgtcggcatttcgagcggcatgatccatgtcagccaacgtcgttctgacaaactcaattagatgaggatgactgtcatgcaaattctgaatgctgagaatggcctcgcagacttctggaaactcgtgcaatctggattggaaagcttggagggcggtgataccaaaggtgaagttcgagctgacggcttcaggaattgacttgagcgcgtcgatgacgaagcgaacagcgaccatgagagggattccgtccaccaactttcgaagaattaatgaaccaaacagctggcccgtcaacgagagctctctaggcgggtaggtatggaagaacttgtattcgtcaaatagagtatagagcatgcagctgaagatctgctgtctttgttcgtccggtgagtccttccaggcgaccagatggctgacaacggtctcgacagggatactctccgcgtcgtggtacatctgatggtaaatgttatcgacttcagcctcgatgtcctctgggaaagtggcgaccgtctctgcgtgggcatgttgtctgttgggaagtatgttcatcagtcgggggtatagttgaagggaaagaattcgaagctcgtcgagaccggaggtgtcgtctgcagtgccttgatggggggctcgatcaagttgatgaagaaggacgatgagagtatgaggagtgagagcgaccgtttgagcctcgctatcctgtcgttgtcgggcgagttcagaagtgaccttgtggagggtaaagtcaaacaaggccgaccggaactcgtttccttcaacctcatccacttcggtaagccactgtttattttatatccgaacaagaacaacaaatcaatattggcgatcaactggttcttgaaaacagagacttggtccatagaaagaaacacataccaattctaagtcagacagctcagtcttgaacgctagacaggccacgtccaaagcgagtgcaaaaggtcgctggccgagcacggcatcgacggcctgcatttttccagagtgaaaacaacaacgttagcatccaacccccaaggggaaagctcgttccaaatatcaacgaataatggagggaaagaaaagaaaccgaccttgacttgttgggcgacctcaaagataccggtgacattcatgtctgacgtagcgtagaccctagcaaagtattcgagcaacagatcggattccacctgccacaatcggagaaagaccactaaatgggtggcatagtgggcaaagaacatgttgagtagtcgggagatcagatccgcatgaggtgccggccagggtttcttcacaggttgagaaaaggacagaaggagggatgaaggtgcaggccagcacaagagttaggtgacatgacgatacaaataattgaaggaaggaagaaaattctgtctacataccggattcatgacgagaccgagaaagacgagctcgattctggccttcattccgttctcgatgatctccttgctcttttcgccaacaatctcgtcgacgtcttctcgtgctgctttcgcacagagctcaaagatctccaacgcgttccactgactggtagtgatcaaaccgggggcgtcgttgacatcttcgggggagagaatctttgtcaacgttgggagggccgcgaggttgaatgtgtctgggggcagagagagaagagcattgagtagagttagttgtgcggccggatggctcgtccacagtgggctcgacggggtggacggagtgagaagacctcggatgggcggtcggctcgattgggaagggataaagaggatcgagacaaaaattgaaaacaaaggtggggtgagcagggcgagaggtgagggcaacgagtcgaacgtctggacgagggccgaccagtcgatttgtccggttgggtccaagctgtcgatcgcgcggataagagaagctccatcggggggaacaactctggttggatctggtccgtcgagcaaggagtgaataagtccattgatgagagtctcgactcgggtctggagcgtgtcttcctcggccgaagcccaccatcgttggaaaacaactcggagtgctcccgggtcaaggacatctctgccgagttcaagaaggaacgagtgaagggcgatgtttgggatgggaagcgggatcgagccgagggaggaagcgatgaacatagggccaaacttgagggccaacgcgtggaaaagagccatctgttggggagcctcgagcaagagtggctcgagtggggagagcagggtggagagcagcagggtacccataccgggactgatgtcggcatcgtcgtcgaaaaagccggacgggccggaacggaggacatcgatggcatgggcgaaggagtctgtgatgatttgtctggcaggttcggccaatctgacggatcgagaagagatgatgcctgctccaaaggtgagtcgttctccgggtgataggttcaatcgggataccagtagcggtagggaaagtgttcgcgatggatccgagtcaggagcctgatcaatggccgtcgcgaaatgggatgctgtgacggaaaaattagggaagaagttcagaagagatggaacaagaagacaggaagaagaggcaaaaccgggaagagagagagaggaagagatatcagaagagaaaagaacaagggaggaagaaatgaagtgaaggaaaaaaagaagagagacatcagggagaaggggaaaacagaagaaagaaggagagaggtaggaagggaaggaaggaggaaaaaaagtctgacaacttacacaacacaatgtctctggcgactcgtctaccctccaaggtcatcaacctccatccgactagattctgagaagacccggttgggccagattgaagagcggcgatgttgttggcgaggagtctgcgaaggaagtattggtagatatctgggccgtgatggtcgctcaacgctctgatctcaccaaccctgctaccaaagttgtcctcgttgatgctgctgagaagaaagacgatctgtgctttgacgatgccgagcagattcctgtcctctgcccgttctctcgtgccggatggattggctgaggtctgaccattaccagaagcctggacggaagctgacgagttcgagatggaggcggtcgaggaaggggacgaagacgcggcgggggtgacagcagaggatggggccgcaccggacaaccctggcggaggcggaccccctaggcccggcggaggggcgagtcctgggggaagaggcggcagcttgggcggagggaagaagaaaaagagggtggagaagaagagtccctatcgatgagggaaggcagaactgaggatgggaggtttcaaaagtatgagattaaggaaaggtaaggacaagaggagaaccctgggcttgacaagggagaaatcacaaaagaaaaagaaaagtctgccaaccaagaagaaaaggtcaacgatgggtgtatatgtgtgttgcctctgggtttatgtatagcagatgggaccccagggagtgtgtgtgtgagagagtaagagagagcgagggggaggaaggtgagtgaacgcaaggaggagaaagatggacgaggcgaaaaaaaaagagagaaggcggccgatcgaagggaaaccagggctgaaaacggttttgtagtgttttgtaggaacttattaggaagcgctgtagtcattttgtggtacttttgtagtctttcgggaacaccacggaacgtgactatatgcgcatcttgaggtcaacacacatacatatatcctgtaaggcatcgtactacccttgttgagatcatcgtgtgaggtgctgtatgcagcacattgatgatttgtgtatgagagaagagaaggcagatgatcgcctggacggaaacgcctgatgtcgctctgccttctgaatcatctttccctctcatcagggtgagcaaagatggccatcatcgtcatccagatgctggccaaggcagagagtacagatattggaagatcgtacatgctcggaacatccaacatgctgcatacgctgtacgtagtagatgcatgcatatgttggccaaacggagtagacactggacaacacacagaataggcgaactacaaaccgttatagtcaattgcagatgattcactatagatcgttcactcagacactactactacgactactactacgttcatcatacacaaacttccaccttcacccaaaatccatagagggaccatgttctacagcactttataaaccctactctcgccatagatatcaaagatgtcgtacacaacacccgtaagagatgatgactgcaacgcgctccagagttcaccacaagaaagcccgccctagggatgaccccaagggcatggacacgtgtctgtggcgagtgtagccaaacaggctatgcagagctccgtgccttgatccatccgtaaccaatgggcccccatcggccctgccgtaaccgcgtccaatcagacctcgtccttcttcttccttccatcaacgagcttcaccaaagaccaccacggatcttccatcgtttcattcagatcctcagacgctctctctccccctctctttctctactacacatactcagagcctctcgtccgtgttcacgtaatccaatttatcatttgctctcatgctggccaccactgcatttcgtaggctgccattcagacagccagcatcgatcatctccaggtcgatcgctagctctttacctgccctggtcaggaagcctacctttgaacctctcatctgggagagtgagccagagttgccgactattgctaagaagagctcacgcaccaccgcgtctcacacggtcgaagggtcagtgtctgattcgcatcttttctcgccttcgttctcgccttccacattgttttcttccctcctctctcttacgtgtaatctcccgatctcgtctcgttgactttaccgtccctcctctcaatctcatccagacttggtaaactgtcggctgctgagcttctcgaagagaccggcacccgagaggatcgaaagatgcgtcactttaccgtcaactttggaccacagcatcccgccgcacatggtgtcttgagattgatcctcgagttgaacggagaggtatgtgctgccgtgttcttttacatttgtcgtacctcttcttctcggaatgaggatgttctctccgatctcaaaccgggaaccactatttctcaccgtccatcatctgctttctgttcaaataggagattctacgagccgatccccacatcggtctcctccatcgaggaaccgaaaagctgatcgaatacaaaaactacacccaggccttgccttactttgatcgattagattatgtatcgatgagtgagtctctctcccggctagacatcgtcttgtcaaaacttactaccggtgctcaacgacttccttttgacattcttctccttgccttcctggtcttattctaccctcatgtaccctcatcacatccagtgacaaacgaactctgctactcccttgccgtcgaaaagctgcttaatattgaagttcccgagcgagcgaaatggattcgaacactttttggagagattactcgggttcttaaccatctcatggccgtcctcacccatgccatggacgtcggagcactcactccgttcctttggggtttcgaagagagagagaagctcatggagttttatgaacgagtgtcaggtgcccggatgcacgccgcatacgttcgaccgggtggagtcgctttcgatctccctcacggtttgttggatgacattttcaagtgggccacccagtattcgaccaggtcagtctctgctcgttttttctagccaggccgtgttggctctatctcgttcttccttctcaacaagcttctcttttttttgtacatctcatagactcaacgagatcgaagaggttgtaacggcgaaccgaatttgggtccagaggactagaggagtcggtaacgtcagcagggatgaggctcttgcatatggattctctggtgtcatgcttcgtggatcgggtgtgccatgggatatccggaaggttgccccatacgacaagtatgacgaggttgagtttgacgttcccgtcggtgtctacggagattgctacgatcggttcgtcaacttccatcctgtctttttctttcctgtgggggcatgggttcttcttgctttcttgacctaacaacgagttctctcttcttttcattacttctatagatacttgtgccgagtccaggagatgcgagagtctcttcgcatcattggacagtgtctcaacaagatgccactcggtgtagtcaagacggacgataacaagatcaccgctcctcctcgtgcggcgatgaaagagtcgatggagtctctcattcatcacttcaagattttctccgaaggatactctgtccccgctggtgagacttactctgccatcgaagctcctaaaggttggtttccctttctcgtcttttctctttcctcattcgtccttcttattgatctaacttgcacgtacacgccctctttcttctaggcgagatggccgtttaccttgtctcggacggatcgaacaagccatacagatgcaagattagagcacctggttttgctcatctcgcaggtctcgactttatgtcgaggcactcttatctgccagacgtggtcgcgttgatcggaacgatggaccttgtctttggtgaggttgatcggtaacccacaggtgttttttccttgttatccgtttcttttttccactatcacattgttcttttacctttcttttcttttttatcttgccttgtatgttctctatctgtttttctgctccttcttcatttgttgttaggcattttcaatgtgtgtgtaacttgttcttcacttcccccttgaacgtgacgttgtagtcttttcttctccttttgtttactttcctgccccttttgttcattacttccatcttctttccatccgttcgatctgtttgtattgaaaagatcagatggcatttgaaagaagcgcaggaaaccgtctctttcaagatttctttttacatcacttctgcctgctctgctagagattctcggagtgatgaggagaaaagccagaacgaaacgagagaagagagtccatatcacatcacatcaacgaccctcatggacctcactttatccctcaaaccaatcaaccgatccgccagccgatcagtctctctcctctttgattccctctctcgttccgaccttacacctttgcccatcaagaatacaggtggattgaggcctggtcgaggactgacaccgggactagaactagcggtgagctcgtcggtcgtcgcagatggcacggtcgatacggcatgcgctcgtggttcagtgtcccgatctttcttccctgcactgccctcattcgtagtctcgatctcggcctcgacagcgctcgttgcagcagtgggagcggtaggggtggagacgccgatccgacatcggccttgagctcgagtcgcagtaagatcgacaacgagtgaattggtggagagtgacgtgatcgcctttaagagcgtcttgctctctgctcggagtgatctgatcgactcggtcgtcaacaccgagtcatctggagtgaatttattggtgggagtatcggcagaagcggaggtcgaggtaataccttctacgatgggttctatcgttggattgtcgagtgtttgaaggtgtgatcgagggtggagggaaggaagggaaggaagggaaggtagagtccgtaaagtcttgagcagagtttgagatttcaagaaactgttttcttgacggatgtatcgaacagtggtccgtaaggattcgatcttggtgtattacaaaagattttgtgatgaagaagagaagtgagccaacagaaagataaaaatcaagagtgtaagttcaatgcaaaaagaaggggatggcaaagaaaagaggagcgatgaaacgaacctggtcgatgaggtagtgtgtttccaaatttccctcgacagtcgtcatctctccttgtcctactcctgttcctttcatcgtcgattcttctacacgttcatttccccaagaatcaaaaaaagacaaacacaactttcggtttcttgccttgtactatgaagagaaagcagaaagaaatggaacgcgtacctccatgaacagcttgcacttgggtctgcttcagctttgtaacatccgcctctgccttatctagctcagcctgcatgagttcgattgcatcttctaatgccctttcatgcttcttgactttccctagatctatctctaatccctcgatcgtttcggcctattcgtgaaagaaggaaacagaacatctcgagtcagtatgctggatacccatgaaatctaggcagccggttttatgagacagacctgttgtttggctgtctcgacctttcgctccaaaacctggaccttgacgtcggtttcctgactcaaacgctcctatagatgatagatgaaagattcaaatgaaattatcgaagggatttcagttcgaccaagaaaatagactgaattcgagaaggagaatagagagactgactcgtttcttgatctctctcgatagttcttgaacctcttcgttgaggcggacacacttctgctcggaatctgtgttgatcatcgcctgagcggccatcttctcagctcggactaaccaaggtgcgctactcgagacttttttttaaatccaaagagaaaaactgtcagtcgagaggattcttgatgtgcgcaatatttgatggacttactcttgatggcattctcctgctccatcaacgtaggcaagatggcagccgcttcttgtccaaggttggcgatcaagccagcaatgacgtcccatggttgacctacttcacctgtcacgttgagagtcatgtctcggagtaatgagacaaacgtcgacagttgaagagtcgatttagatgatttgatctcttccacgtgacctttgatctgttgagcgagctagacaaagtaaaagtttgatctattagtgctgattctgcttcaggcgccgtcaaaaggattagagtgggcggacttggatggcaaaatcaacagcatttgagactcgagtaaccagagagttgagatggggtaagagtgtaggctgtaacgcagacgagctttgaacaaggtcttcgactcgttttaccaatttcctaaggagtgatcgtcggtcctatcagtatgtcatcttttgctcgtgtctgagtcagattaaacagcaacttacttggaagccaatttaacagactttactaactcaaagaggtgatcgatgggagcatagatgacctcatttaagctagtagcacccgtttcaatatgaatctcggaatcttgagcggcagtgacgatagcgtgcttggcaaatccgacagcggccaaaaaattgtcaagatcgtagtcgaaaccaagaaccatatccagctcgcgttctccaagatcgaggtccgactgattaaagtaagcctcttctagatgttcatactgagcgatatgcctgttttgtcaagcgattgtacgtgcaaaacgatacattcgagggttcgcgtttaggtcctggtggaggcattgtttctatctagtaagaacaaagactgacttgataagatcacccatgcagtccgtatccttgaactcgtcctttcgaagaagttcaatgtatccatccattcgtttctcaattccagagagctcgtggtagactccacaaatcttgacatagagctctggagagcatcgtttaagaatagcagcgaaccgtctgttgagtagactgaagtgtgataatttacctcgcatcttttccccagaaaatataaccagatgattgatgttagaaacgggaacgcatttgacacggtaagaatactattcgagaccatacatagaaagaagggggatgactgacctcgcaggtgataaccagagtgtcggatgaagccacatagaggtcttctggcagattttggttttggccaatgatagagttcatcagaagggtcttctgagcgagccgatcgaagaagaggacgcaattagtagcatctgcatcaagctcgaagtagggctttggaaggtaggcctatagatgatgaaagtcggatcagtcgtgcgggcatagaaccgacaaggaattcgcaacatacctgaaggatagagatatgctctgatgcctgagcattttgaaatttcagcaggtcaagatcaatggctttcgactgtgctttggccacagttgactgtaacttgaggttctgattgaggactgattgggaatgagaagtcatgttctcggttgatgattgctgagaaacctgtcgttctcgtagatgctcaagctcactactctcgccggtttcagtttcgacatcaaataaagaagcaaccgccaagacgagatcaacaactctgctatctgacgacgtgttccaagcagaaagacctgcgcggactagcaaacggataggagcacttacgcttgaagctccatgactaactcccggaattgagagatggttccttgatgatcaactaccagatcttcaagatcctccgactttcggacttgttgcttgtacaatgattctcggatatctgtccaaaagaatccatcaaccaaatggaaagtcaggtcagtctcaatcttctccaattatgatgaaagggccaaagatagagaggttttaccaatttcctcttgtagttgcttctcggtctctacatgattttcttcaagctcatcattcaattctttaagcgcttccaagtcttcgatcgtgattctcatttcctccaatttctattagataaaaatcaaggaaaagagagggagcaattgaacccagatgatgaatcagcacattatcgacaccgatctaaatggtcaagtattaaagaaatccgaaacatacctcgcccatggccaaattctttccggtaagcaactcgagcatctcctccgctccgagcgcatcatccaactggatcttgagatcctctacctggagctctgcattttccagactattctttactaactcgtattgagcttgtttttcgataagaatgcaacggcattcgtctccatccggtcagacgttgtcttcttcaatcggaaggaaagggagaaaaggggacagactttgcaaaccagcagtctcggataaatccttctcaagttctgctatcttcatccggttttctctgtctgtttcacccgacaaatcgcgtagcctgatgtaatcaaattcatcgatcagtgtcttatttcaagttgttcaactagctacttgagttttgaggatagagaggaaaggagcaggggcaggagatggcgacgtaccgaagaagagcatctttgagtcgatcgttatgtttttctagttgtatgaaagctattgaggatcgttcctctccagacccgacatcgctcggaggctgttcgtactcatctgaagcagaacaaagcggagtgattcacgatcgttttaagttacagacgtcagacaaagaaattttggatactagggacatgatgagaaaacaggataaacgaaccgttccttgctttgagcgtctcaactgccacctccagatcaacgactctctccttctcgtgctctaactctagctcgagcgactcccctcgttcctccgccatttccttatcgagagtggccatctctaattggtcgttcgtgtcttgtagacgggcttcgagagaggcgttgtgcgattgaagagcagtggtcgtcaggcggaagtgtgtcagctctgtctgaagcgtttggatttttgctattcgtttatcaacaagaggagctaacagaatcagtactctcactctcactcttctctacaacaaacagaacggagaagatcgaaggaagacggtgacatacactgcattacccctacagctctccttaactcatcgacttctctccctttcatctcggccgcccgtaacttttcaatctcttctcctctcttcgtctccacaacccttagcttgatccttaattcttccattccttggtctctgataagtgtcgtccgatgaaccctgctgctctctgcatcctccgaggccaacgcagactccattggaagaggcaccttcggtttcggtggtgaaagtctagaaaatctcaaaggttgtgtcgaggatgatgatgacgatgacgggtcgttcgatgattgaggtagatatggaggtagtgctgataggcctctcgtcggtggtggtaatggtaattcatccttctcaatatcttcggttggttgactaatcccaccgactctaggtgtccgtttgtcgttcatctgcccgcgcctatctgcagagttctctgcactatcaccatgcccttgctcttcagcttcctgctcaggttcggcctcctcttcctcatcagcactcacaacagatcttgtcggttgacgatgttggttctcgtttggcctaatgctagggtatggaaccgaggttgaaccgatcttccgggtggatcccagggttgttttagtcgagcttgaaagaatggtcggatctgatggtctcagacttgacttcccgataggcgtgataggtggagggagcggactgatcgattgtctggattgctgcgctgttgttgttgtcgccgccgtcgtcgtcgtcgtcgtgtttgaagaaggtaccctaccgagcgcgctgctcgaagatggacgagaagaaagagtagatgcgcctgtggctgtggttgtattcgtaggcgtaggtggtatagatggcctagacgccaacttctgaggtgatcccgctcgactgataggaccagagttcgatgttgaaggtagatgagatgactgtctgccaatggcatatttggtgttgggagtcgaaacagagccggctatggaaggtcgggaagaaggtcgacttcctgtggtagacgatgacgcagacgatgatggcctggactgcttgtttccccatccccagacggagcaaacaaacaaaaagaataaagaacctgagcgacgaccattctgcctagtacagtcgcgctcgaaagaaagcagagagaatagggaacacatacgagtggtagcttgataaccgtcacctgcgacggtcgaacgaacaccccatacttttcacgacacgaaaagtaactctcgccagctacacttccatcgttcttcccatcaggtccgaatcttcccatgccccatacccggcccaatcccaattttatgtcagtctctgtaccactcgaaccagagaacgtgcaacagaagagagagcaagttatataagtagaggtacagggagtagtaaagatacatacagctcaacaccgacccaacgtcctttggcaaaggtaggattcgtacccgtccatcttatgattccctgtccagcagaaacagtgacttgagaaccgacgatcagatctgggccttgaggcggtacgctcgagatgacagaggaaggacgagaggccatctattaacacgtccgtgagtgtatgtatgtgtatgagcgaatcctcgtagaagggacaagtaattcctcgttctcgtccccgttcctatgacgaacgaataagggatatataaggaaaccctcccgtattcaaggagcgtatctacctatctgtttatccggctgactcggtatccgacgttggatatttgacgccttgacgtgtatacgtatgcgttgggtcgaagagtcgttggttcttgaggttgtcgtcgttgatggtgatggtgatggtgatgttgacaatcgatccgaaccggaccctctccgacgattcaaaaacaaaaactcaaatccggcctgacatccaccatcctatccatcaggccttctcgcgctttcctcacgtcctcctctttcatcatcttctcgccttgtccgactttgctgatgtttcgatgagccttgtttcttcaagctctccttctcagtattctcaacaaattctcagttatagccaagggtgtgtgaataaattgagatagatagaagtacaagaaacggatctaaaggagaaatagagatggaaagatttgtacacaagaaaaccccactcgcttctagccctcagccttcaattttgatagactgatcagaaggaaagggccagagtgcatataaaaagaagaaagagaatagaggatgagtcatagagagtaacgaagattaactatagacacaggaattaaataaagtgtaggtgtgaatgtgaatgtaaagcaagacaacatggatgaacgaaagaagagggatcgttagagaaacaagacattttgctgacagaagggacaaggtggaacggggaagggctctaatggccagaaacaaaaaagaagaggaacaaaaagagcaaaagtttacaaatatactcgttcttctcccataagagatcagttcaagggggaaaaggaagaaagaagaaaaaatcatctaagaaagaaaaagaacacactaaaggtgaactctagagagaaacctttcgttcctctccccagaagatcccggactcttcaaggaatccggctggcctgccagcggcagtccctgtagacgtcccgtttgaactccaaccggcctgtttcccagggctgtatcccataggcgagcttggtcctgaatgaagcaactgaggtgtcgtctggcctgaagacccagaatgagaatgtgtgccactgagtgcaggcgagaagaaacctgaaggcccgacaatccgtttaaaggccgaactcgagctaactgcagacggggtggtcgacgcgtacgatgaggccgactttccggtcgatggatcgtacaccggtgacatcgagcttgacgtggagagggatgaaggcgaggaaaactgatcgcctctatagaaacagtacttgtcgatgaaagcggcatagccagcggaagaagcttctgccatttttccaacctctaccgccaaccttcctctctctcccggtgcggccccaccggtgactctgacaggttctcccagaacgacgccgacgtcggtctcgccgtctgtctgacgttcaataggcaactcggcggacatgactcccggactagattccaacaaggcggatgtcggtgtttccggtagcgtcgggctgaaactcgggcttggggaagacataggcggacttggcagatccgaaatcggtccggtatatgatgacgatgacacctgcttggaagataaggaagatggtcgggatcgagactttgtgggaggaaacgatccagcatggttcataaagtacgacgaaagttcgttcgactttacctttgtctggggcggagcctgtgtggccaacgtatcggtctgatcccatgttttctgtctggaatgactcggcctgacggttcttttgcccgatccagagggaaggacaatggatgcagaaggaccgctgacctcagccttcggcgtgatcgcctccttctccagacgagggggacagtttgtggtaggagtgggagtagagacctcaaatagaggaagaggctcatcatttttcttcgagggcggagaagaagccgtcactgctgtggtcgttgatgaagttccaggaaaagaccagccggaacccaagatcggacgttgtttatcgatcacggatatgtgcgtattgataggcaccggtgccgttaacggcttttccccaacaggtccagtaaatagggtcgaggccgtgaccgcaggtatcggctgagggtttcctcgtggaggttcgaggagaggcaagaatgtgccttgttccatcaagggtctcgctctcggtctttttgggattaccgggttcggaacggtctgtgctgctgtcgacccaactatcgatcggatcaacggagacgtggtcacaaagccaaatttgtagttggatccaccattagaatcccaccattctcttcctccgtctattgagtatttgacggcaagaagcagagtcttttcgtgaatcttgggtcgaacgtctgcgaggttgatggtaaacgtgaacctatcccagccggacgagtggttaggtccaagactggacgctgggatatgaacggcatgagatgcggtgacttcagaaactgtctgccagtcatccatggctaaacagttgaggaagacagggaagtagagaggaggccgattcatcagcaaaccacgcaagcaatcaaagaggagacacgaatgaggctcaaaaaggactcactgaaccggacggtaacccatttgccaaaggtaatattcctgacaatgacgttacccttcagcaccaacctttcaaccggctgagcctcatcaattagatgcacactttctaccatgacctcttcgccttctgcaggcagtacgatctttcctctacccgggtcgaggttgagccctttcgttctgggtatcatcgcagaaacctccttcttgaggtcgatcctatccctagcggatagctcgccgttgggataactgacttgaccgccggaaggaccaccactacctgggaggaaacctgtgttggatcgagggttccatgtactgaaagcgccgtggaaagaaaatcgaaagccttcgacctcggtctccgtgtccgtcccgccaagcccgttcacatcctccccctcgagcgcacgcgtcactgcggtcaccttgtggtcc

SEQ ID NO: 313 - DNA, 2667 bp, Xanthophyllomyces dendrorhous
tgggaggggagtggtggtggtaacagtagggatgggtgagagttctctaccgatcgtcttgtccgcagactgtctcctcggaatggtcattcccggccctggcgccctcgccggactggaagacccgtgactcttggctcgtctgggtaacccgggcatgggaccggattggaaagcaggtggtgcgtcgtccggggaggcaaaccggtaggctgatctcgagctgggagaatgctggtaggaagatctacggggaggtgtcggttgagtcgggacgagcatggtgtcggtggtgatggtatcggctgtcggacaggacaaaggcacggcagagtgcaaggtcaaatctttaatctttggggatggcagaggcgacacgtagggcatgatccaccgtcaagacgatttgaaggtgaggcgtgagaattgaaggtaaggagaacaagggatgatctgctttaagattttctctgtgaacgagagacaaaagataacaccagaagttaggatggacgtccgaaaggaaagaaggacgggaactgggaacaatctgttgattggatcaatatgaacaaggacgggacggatggtcaaccagggatgccctgccgctcttggagttcctgggtgtccatctcttgtatgaagtaccaagagatcaaggatctgttcctggggtccagaaccacctgggctgttcacagttcggaccggtccgcaacaacatacccacaacacatcgtacacccagaacaacactcccacaccccttgaacacacagaggaactatgacggcctgctcttggacgtcacccgctccggccgtgtgtttcatgatgattcccgcagtcctaccggccgagcgcttccgatggagggagtttcttacgtgagacgcacagtgaacaaaaccctaattacggatcttttccttctttttttcttccccttctttttcagaactctaagggaagacgatggtccgagagacaagaggggaaacgaaaacaaggagagaaacgaatggcgttgggaatatagaaatagacagaacataaggaactcacagagagaaagagtatatgtatatgtgtgtgtgtgtgtatgcagatagatgcaaactcgaaactcccaggaatcggttctttgcaaaagtacggaaaggggaacgacgaccggattaaactggcaggattaaagatgatgtgcacgttttgcgtgcgtgtctaggtctggaagatagattaccagaggatccgtcctgtgaatgagattaggtatgtatgcaaaaagttcaagacaaatgcagcgacggaagcacgccaagatctatctacagtgtaagttggctggcacacatgtatacgcacatatccgcacacaacacgcacaacacgcacaaccattcacacaaaaacattagcaaacaacgaaggagaaagcaaacgaacgagcacttgatggatgaaaccatccatctgtacttacagaagtctctgtgatcggagtgtgtatcccaaacggccgaaccagacgatctgccttgggtgagcgtgagtgtggggaaagaaaagagaacgagaggaggggcaaacaggaacgagaggaaagaggggaaccgaccggatggaagaactggacagaatgttggggagaggccgtacgcataggcatacgcacgcgtgtgttttccaggtacaagggcaagcctaaagagacattcactgcggatatcatatgtgtgtatgtcattcgcagaatctgatcgtgttatcgatcatgatcgacatgtctgctcgcgccctgagatcatgcgcagtccccaagggtccagaccaagtggacgcaaattgctttcccccgcccggccctctctggcgctcggatccacgtaaactcataacgtcacataccttgtcctcgggtcccatctatttatgccctaattatgttacagttttgcgtgagtgtttacgcgtgtgttgtgtggtcattgtcatcagggcactcccacctatactggccctgttaataaccctaacaggatgtttctcttcccttcatcccctttcgcttttgcctccgtaactttcctccggctgttctccttgctcttccgggatgagtaaccgatcacgtgccacattgtttacattcatcaggtacacattccggtcgcacatcacacccgccgagcctcgtaccttctgacgagatcatccctctctagttcccagtcccagcccatcctggcagagacatacgttctcggtccgacttcgtagccttcgctgccccttctgatctttaagcccagtggcttgtcgtcatcatcatctccctcttgccatcgttgctcttccacttggtcctcatcagaccatccgtcgtcggctctgatggacgccgaagaagcgtgtccctcccgagatcgaagaagatcttgtctcatttcagatccaggacggtaccgactggacgtgggttggagcgcagggttcaatatgtctcggccatagacaaacccatgggatgattcggtcgttccgtcttcaatcaccctcctcggtcgagagggaacgtatgatggatcgggcggtggccaagagagcgcttggtatggatctttatgtagatcgacagatggaagaagaagaagaagaaga

SEQ ID NO: 314 - DNA, 22557 bp, Xanthophyllomyces dendrorhous
gaagaagaagaagaagaagaagaagaagaagaagaagaagaagaagaagaagaagaagaagaagaagaagaaaagcacaagaacatggcgtgtcaggattatgcgcggggtgggtttgatataaaacaatgaagagtcggggtgagggttgctatcaaggatgggaaagagagaaaggaaaaaaaaagattcaaaggggtcatccccttttacttttgtatgcggattccctgtttcgtttgttctttacacgagaacgacagagaactcaccttccgatctcctttcatcccctccactttttccactccccaaaccctcagactgcttgctcgcctacccaacttgtcgtcagccctgtctctccctcggtctcggtctcacatccaccaggtctcctccgttgaggttccgtcccaccttggagagcactcaccactgcgcccaccatcacagccgctgcacctcctaccgagcccgatagacccgaccgatcggcccgccttctgtctcttcccgtttcttttttatcttctcctagcccctcttgatctgtctttcgtcgatggaagctaacccactcaccagtcccatcggcaatctcgaaagagagcccatcgcctggtgtctccgtccacggaaacagccaagcaagaggggagctcccaagaacagaaattatgttgaaccagggactaatactatatggatatcttatgtccttaattctacctcgacggatcagtgtcgctacctagaaaaggcaaacggattaaactttgagattttggaattttcggacagatgtaaagaaggaaggctaccttgtctttctcccatgcttcgatcgtcgtcgtatttgaccagagtgaccaataatgatacattctgtttttgatccacatccatattcaactcagtcacaccctctcttgtcttttgtcctttctgcttgaacgttgagagaaaaccagagaaacaggggaaacttacgccatcatggacacaccgatcaacaccggcacgcatgccacaaagtttaacaccgtcaatacgacctctgccgctgtcggttcttgctgttttgccattaagtcattgtttttcagtcaaacagccagacttcagcgatacgtgcctgacacgtcggatagacagtggaaaagaagagaagaatacacgaacaagaaaggtgttctctccgccttgagcaaaatcccacactctatatgccatcatccagaaatgatatgtgcctgcaaaaagtttccttttcaattgtccgtcaacatacaatgttcgatctccttaaaaactattcaaaacagggccaaggcctaaagaagacagaagcgaatgacttacatgctagtaccacgtaggttagaaatcggacaaaagacgcgtagttgtgatgaccaatgcagttcgccacccacggacactaaagatgtgaacatgagaggggagaaaaaggagcaaggggctgtgagtataagaatcaacacgatattatctaaagagcataggcttcacgaacgtgatgatccattcgaagaacacatctattcatggccaaccatcacaaaacgtagggatagtatcaggcgggttcctcaacaaattatgcgagaaagaaaatgggtaacagaccgtttacatcttctgcaatgatgggctgtgaagtcccgcaagaagagcttgaatcaaatctgtcttgaggtgcaagatgcaagatgcagaaacatacctcgtggaggtttgtagacagagcatttcgaacagaaccggggaccccccgtgagcttctttacctcgacatcttccgaagagaggtccggttccttcgatggagatcatgccagtacgtaagaagagcgcaaggttaaaggttgagccattgaggaggcatcggtagagaaagttcaacggcatacccagtttggtggtattcttcctggctctgttgtcacacagagatagtagcaccaaaagattaatcccaccaggacacttcacagagagttgaggtaacaaacagattagttaaaattccttcgggagatcacacatcggatgatcatacaagaaggaaggaagtcttacttgaaaggtactagaagtcgaagcaattcgatcgaccatctcttcccatagaacggccagatgatgaaaatctgggaactatatgcgatgaacgagatcaatgagatcgcgaatgtaatcctgtagatattcaagaaagatgatcccagagtcaaacggctacctgagtttaaacggaacacatctggattcttaccatatcttttcccacttgtctgccatacagagagctgccagaacaaagttgatgacaacgatgatgatggatggtgatgatgatcaaagataacgtcggcaagaagaaaagtgaaactaccccggttgaaatcgactctcatcttcttccttgccttcactcactccaagcggtcctatcgctcctcatccatcttctcgcgatgagctctccgtcatgggattagtatgtgctctatatgttttcattcaaatccacacgcatagacatgctaatcatcattgtgtctgtccacctgtagtatcatgaagttcgtgtctcaagtttcatctctatgcgctctgttttctctgatctgttttctctgtatatatctgtcttgatctaaaactagattcgtgatcgcgggtgaagcagctacaggcaagacatcaatattgtaccgactcaccgactctcgattcttgacgacacccgacccaacaatcggtgtcgagtttggttccaaactgttacgcgtggcgcctctacctcctaaaccttcttccccttccgttccatccggagattcaggaaccggagatgtcgccagtcaagcactagtggcacaacctgaacgtgatgagaccgccgagcaattggcagcagcagtaacggtaccgacggtagagggggaaacagccgaagaagaggaagagggagccaagtgggtcaagcttcaatgctgggatgttgccgggtcaccaagctttcgaagcatcaccaagagttattaccgaggagcagctggtgcactactcgtctatgtttgtccatatatgtctaactttcgtttcggtcacttgaatgccaatgtggatgtctgactttgtcatctgatgggaccactgggggtgcaatcgccgaccaattaccacaggatgttacccgttcgcaaacgtttcgagaactaccactctggctgaaagatctccgggcgcatgcagacccatctgtctccatcatccttctaggcaacaaatcagacttggattcttctgctgagacgtcgacgacaacacctggggaggacgcgaaaccgagaagcgggaagcgggaggtctctagggaagaggcacaggcgtttgcagagagagaaggcttgatgttcttggaatgtagtgcaaagagtggagagggtgtcaatgaggtttgtctttctcttctaaacatgtggtccagataggcttgtgccgatgaatactagggtctgacagtttgtttcatgggttatttcaacaaggcttttgataaaacgggcgagtacttcaacccttcaaagtctttgatccaatctagtctggtctgactgtatgtttctataatcctatcgtttgatcaatattacttcatgttctccagctcgagaaattcttcagaagatcaatcaaggtctcttcaagggtgatactccatcatcgaaatccaaggtatgtctttgcttccctgaaggcgatgtgatcatcacctgaaatgttttgatgctcaacgatctctattctgggttgctctggacaaaccgtttaatcagtcatcaggaatcaaactctcagcaaactcgtcagctgatagtaagagccgtccaggagagagcgcgagatgttgctaagttggattcgaatacagatctgtctacccgccctgccttgtttccggtttgtttgctgaagagatggggatttaatatcagtagtagatgcactgcatctctccctttccttcttataacctgttgtatcatatgattaaatgcgtgtctttctatgttcgaatctgagtcctgtccaaccggaagcatgcctgtctatcgagtatagaagaagaacagagaaaaagagatacgagaacgatggatcttggcggaacaaagcagaaaaagagacaaacgcaaaaaatcgatcgacttttgaaattttctattttattcttttcttttcctctttctcttcttacaacccactccccttcttccatcgtccacacacacccactctctccttctttgtagccaaacatgtctcctattcttgtctgcatgggtaaccccctcgtgagtttctgtccccttgtattttgtttttgaaatcatgtcagagaacagaaaggaaagaaaagaatggaaaagagatgaagaacacacgttgatcgatcgcttttctcctttttttcctcgtctatacctcaccgttgggtgctcgataatctagctcgatatccaggtcaccaagggtgaggatctccttgagaagtacgagctcaaggccaacgatgctattctcgccgaggagaagcacatgcccatgtatatctattctcctcattctttattactttgatcaaagcggtcgggagctcaccctaagatccatctctgttcgtttatggactgtgataatgtcggtatcagctacgatgatatcgtcaagagaaaccctgtctacgtgtatgttctagttgacgtcagcgatctgtcttgtcaaaatattctgatactaatctctttatgctctggtcaacacagtgccggaggagctgctcagaacgcttgccgaggagccgctgtacgtatcgttgtcatatctaaattccttaatcagttagaaccactcatccgtctgacaaacatcttgcgtttggaacaatcagtacgttcttcccgagaagtctgctgcctacatcggagccgtcggagatgacgatctcgcccagcagcttcgagccgctaacgacaaggagggcgttcagtctgcctaccaggtcttcaagggacagaagaccggagcttgtgccgttgtcatcaccggtcacgatcggtaagatcttccttttctcacgctactttgtcccaagctgtcgtttgcattttcgccgtctaaatttgtttcatctcggtactcttatcagatccttgactaccactcttcaggctgccgagtccttcacccctgagcacttggctacccccgaggtcgaggccttgatcgaagacgctaagttcttctacttgggaggcttcttcctcactcacggaatcgagtccgctcttgttcttgccaagaagtccgcttctgccggcaaggtccgtcttttccacttgtacattgcgccttgttatcaggagatgcagatagatcctaatctttctttcgttccctttgatagtgtttcgccatgaacttgtccgctcccttcatccctcagttcttcaaggctcaggtcgaccagatgattcccttctgcgacgttgttatcggcaacgagtccgaggctgaggcctacgccgagtctcacggattgagcgtcagttatatgtcccaacttctgcaaagcggttaagtagctattcattaaccagcgtttgtttcacgaatcgacggtatgcacagtccaaggagcccgcatttgttgctacggccatcgccaacgctcctaagcagaacgcttcccgaccccgattggtgatcatcacccagggagcttcttccactatcgttgcatcctccgatccttcggttgctgctaccaacctctctgcaggtgatgccaaccccaagacctaccctgtcaacaagttgagcgacgaccagatcgtcgataccaacggtgctggtgatgcctttgccggtggtttcttgggagcccttgcttctggaaagaacttggatgagtgtgtcgaggctggacacaagctcggtcagatctgtgtcggacaggtaagtggatatcagacctgtctataagatctcacagtatcgacatttcatgatctaaacattcttattgttattcttttttacttatttgtaggtcggaccccagttcaagttccctaaagtccagatcctttaagcgcttagcttcaagattcttcctttctagatttttccccttttccctctcgctttcaacgctatcttcaacagttgcccttcttgcatcttccttccctttctttcttggaattcaagttcatctttttctaacaagtgtttgattagtctgtactaaaaaacatatatccagtcctctctgaccgctcaactcgggatttttctctatccttcttttctcatattgtcttcctcataagaaacaacatagatttctttctcatcgtttcctttcacataggtttctttttctccactaaatcaatatgcagaaagaacgatgggatcctgagacacaagtttagaacgcattttaataagaaagaaaaacatgagaaagacgatgcatagacatgacgagccgagatcccggaaagagatgaggacacaagataagaaaagaaaggctgatggaagtaagggtacgagtacatgactaaataggacaggacaagacgagatggggttgaaaaatcgatatatcgtgggagaaaacaagatgctcaaagaagttggagggatatgtatagtagatgtaaatgtaaatgcaaagtgcaaaagagtgagattgtgattttaagtgacgaacggactgtattacgctttagtaatgatgcaatgaagatcagaagatcagaagataagggaagaagacgataatcaaggtggcagctccatggagacacacggtgtgtgttatagaaagacaataataacaatagagatatagatggcaaacaagaacaagaggcgtttatcgcgaaagaagatagagaaaagcatagcaagaatgatctttcagtcgtcttcgtcgtggaagctccatccgactgtcaaccgagggggttgtccgtctcctgatagagttccttgaccatcaggaccgaaccatctgtcacattagaggaaaaaaacagaagaagaaagagaaagagaagttaagaaaactcagtaaatctcatctttacttagcgattccaaaaaggagagatcgaagagaggaagctcttgactcactcattatactcgaccatcgtatcctccaactctgccaacatcctgatcgcatacggatggagtttcctatcatatcctttcttactcgacctctccttctccttttctttttctgatgtcgatgcattctcttcctcttcgcctaacatagcgagtctctccaacaatgtcgatgctaacggtgtcaacaacgaagatcgctttgaaaacgatcggctcatccgaggtgtggccgagacatggccaggtgcgagagctaatccgtttgaagaagatccagcagctgaagagactgatgagcccgacgaagttagttgggatgagtcgaatgagtcagacacgggcgtctgtgcaaaatcaaaggagaatacaccagaatgggccgcaggggctgtcgataaatcgggagacgtagactcaggagtcgagacagtgaagacgttgtttgtggccagcccggaggatgattcattcaggggggctcgagcagatacagcggatgatccatagggccgttgattgaagttcttctgttcgatatccgagaagttggagctcaagggggatgaagaactagattcgaatgaagacctcacaggagaagagaggtcatgcttgtaagaagtcgttgtgggggctaggaagacaggtgtttgaatagggggaggaacagatacagaagttgaacctgtaggaacggatgctgacgtggaaatcatagatgagcgagtagaggtactcttggtgggtgacgcgtaaggatccgagtcaatctcaagatcatcggagacttcattgatgccatacaatgttgatctcgttggtgaaggcattccttttcctgcgcccgaccgtttcttttttgcgccgaaactcttcttgaaccactgagtcgccttgcctagagggctcgaaggtaacccatccgtcggaatgctttcagcagttagagaaagtgctcgcgcatcgagctgttccaccttggcaggcgcagacagggcctcttcagaccgttgcagtgagggttgcttgattaggggaaccatcgcgatagtcgacttgcttctatggatacccccgccaactgtctctgagtcttcaccatgagcattctgccctgacggacagtcctcttcttcgtccaagatagttcctagtacagaaggctcgatctccccgtgacgaactcggattgcctcaagtcgattgttgagaagtttgatcgtatacagttcggcctctgtcggttcactctccacgccatctcttttcttgatgtgagaaagtcggaagacaagaagccggacgacgtacgatcgaacggactgactccagaagagaacgagacgctcgaagataactggatcaaacaataggccaagaacacgcagacggtcttctgggttggcagtcagcgaatcccaatgctggaagataaatgatacacatttacagagcgtgagagcatgatctccatctcgaagaatgatctcgagagtcgacacaatgaatttgacagagaaggcattggtaggtgaggaagagagagagagatcatcaaaaagatcaggtggagcactagcaatagaatcaaggaagtcgaacagacagctaaccagttcaaaaatagaagtgcagaattgagccaactagaattctaacggagagatagtccagataaatgatagaaacactcacaagacgccctttggctcatacatgtttgtcctattgacaagcaacctcgtccagatgtcactcatgtttccccagaccttcgctccgtccgtgtctgtaccgaactccggatcaacaatcatcggggtgttcaataggtagctcacgctgtcacttaatcgtctgtttgcactttccaataccggaggtttaccaggtgaccctccaaaccctgcggtctcattcgagttgaatgaattcgtagcagcagaggtcgtcacggagactatcttgccttggacgtacgacaaacacttggtggcgaatgccgcagagatgtctaatacgatagccgacccgaagccgagatttcaacttgtattagtaaagcaagcttgaaagataggacagtcgtccgtacagatatagaacaacaggcttacgagcataacctggagatgcaaggacaactgaggactgtagcctggcagggttctcaggatttcctaatgaaggatagaatttggccaaattcttatggtatgctcggaagaaagcaaagaacaactccgagtcgtcggactgaattgatgaccaagccagaccaatgtgaatacaaagacatctcaactgaaggtatgaagaaaccggaagctgacctgccatcgcctcagccaatttcccataggaaacctgaacgcagcctcgtcttctgagtcctcatagacacattgtgttgatctgagcgacgccaagtaatcccttgggtcgtctttggtaaacggcagcaagtaggatgggaacggttcggactgatgtacataagatggtccagaccttggcggagaacgcataatcagaaaggttagtgaatggcaagagccaggcaagtcagagtgttcgacatctagactcactgagtagattcgacttgagcaatgacattcatctgtctcgtcagcgtgacgcgtgagatgggcattgctgctaaaagctgctgagcaatcccttcaattcggaagaatgaaaaagctatgagaaccaaccggaacatcacatatcaatatcttgcataacaaaagccttgaccaagacggatggaattgcacaatacctaagattcgacctccaaaactgagagtgttctgaaaaattcctttactactgagcttgttcatcacgaatgagataacagttctcatgatctttcggaacatcgcttgatcttccggatcagattgaagagctttgattgacaacacaggactgcaagtagatggttcaagacgaatcaaacatcagtgagtgagtaaagagagacagagacaatgtatctagaacaaacctctcgattagcgaagcaacagcttccaaaacagcccctctctcacttggtgtctgctctagccaaatctcctttaccacgaacatgatcaacccttcgaaataaaccgctcgaagttttttgttgtcgattactttctcagaatcgaatcctcttcgttcggcgtcgtagaggatcggtagaaggacacctcgtatgatcggcgcacggatgggtgcaagccttaatctgaggtaagcaatgaatccggatgtcagcaaatgagctctaggggacggtacagaaagagaaaggggatagactaactcttgcagacaatcttcaagtttcccttgcaaatctctcacctccacgccgttctctctccgtctcttcgctctcacctcttcggtcaggatcttgataacttctctctcctttgtctttccttctgttgccgctccagccttgcctcctaccctcttcttggaatcaaacaatccatctagtggctcatctcggtttgatatcggcgacattatttggtcgccaatagcacctaccacggatggatatttcgtcggcttgcctggaagcgaatttgaatcacgccgacgggtgagtgtcaaaggttgcacaggtgtgggcgctgatgtaggcatgggtatggttgtggacgacgaagacgtagaaactgggccgactgggtgactctgactggtcgtttctttctctctcaaggatatttctggtgggaatattgacgagagagaaggatgtgttgagttattaagggctgaagggccctcgaactgagcggatgattctcggggagacaagacggggcctaagactgtcgttgagaataagccaggttgaggtgtgattaaagaagttggggtcacactaaattcaggatcggcaggagcagcgataatagcaggaggagggagcatatacggcagagatgtaacatgatctgacggagacgatgaatcaaatgtcgttgaagcgagagaaggaagagttggaggagagggaagataggcaaaaccgaccctcctcgcctctgctgctacccccctctccacttccagctgtagatcgtccaacgctttctctacatctccttgcctagatccggcccaggagcccttgccggacctacctgaatctgctgaaccccaaatctcagaactggatttactcagtaccctccgatgcgccggccctttctttcgagatgaagatggtagtagatggctatcggaagagttgccatattcagagaggaaggccccagagaatgagccactcaagccggcattgaaggaaattcgattattgaacgttggcagatctggtaacttgaacagctcggatgatctgtttactggcttattgtctgaagagagtgaatctgttgatatttcgctaatctttcgattatgttgagttttctgttgcgatgttgggtgaagtgacgtggcagaatcggagccagggaaccctgctgatccggctgacgggaaggagggcaacgagatttgaggggatggaggagtagaaagcttaaaggcaggggtgatgggaggtactttggcaggagcctcccatgaaaacgagttgggaagagaggttggcacaccagaagaagacgaagcggatgacgtcgaagtcgaaggcgtggtagtggtcgttgctggggtaggggtatacgattgttttgatttagatcctaacgagacggaccgagtctgttcttctattccatttgagtacccccctcgttggaacattgaagggaaagcaggcataggaggaacagcatctgctttgatgccatcgcctccgggtgaccctccatctgacgcgctgtccttcttcttcccaaacaaatttctcagcacacccgagctcttttttggcgtgatctttttggttttcccgctctttccagcctttcctacagggctatcacctgttccggaccaacctaattcgtccactgaacctcgggaatattcagcctgataaaccgacggccttcctctatcgatgtctgtgctcgtcctgaccatccctagtccggccagcggcgttcgatggaaagtagacggacttgagacattcctcgaacctaatggtctgcttgaagaattggtctggatagacgtatgcggatagatggactggttcgtctgggacaagaacagaggttcttctgtcggaggagcgggtcgaggaggaggcgataaaggcgcgcctcggcccccattgggggatgaggggtacaggtgaataggtgtaccgtcttggataggtgatccgatcgaaagttcactttctggtcttagcaagggtttcgcggttccaccccaagaggacttgcgctccgttctatggggtgaagattggctggatgcatgtgtatttctccagagaccaggcgatcgagcaacttcttttccttttggcgtagactgagtcgatgggtaatcaactgatgaacgacctcgatatggttgaggcgaatcagtctgaaccataccggacagcttgtcggtcgagtaagtagtatgcgttggtgagagtgcgttggcctcatacggaccagacggataggcagaatgctgttgtttttgttgttgctgttgaaacggagctagagatgtcggcaagctaccgggtttcccgactcccagttcagagtagctggtagcagcagcagctgcatcatgcgttggctgtttgagtccggtcctaccacctattgagccatttagatgttgatctcgatcgtggtatcccgagctcttggaattcaagggtgagaagctagctgctggatgagaagctccgggtgaaggaagtccagattgatggggcgaaggagaagctaagggggttggaagcagagaggacgagccgacggaaggccgtctggatatcggtcgcgttggtggctgagagacgggaggcaggaaggatccccctcgggctgctatgggaggaaaccgagccgttgtcgtagaggcctgtatgggcgtaaccgagaggtcatgagcatggagaaagcgttgaggaagagaaagaggttacgtatgtgtgtaggtaggtaggcagacgggcagacaggcagttaggttgggcacaagaacaattatacacataagaaaccgaagagaaccccgggataggaaacagaaaaacaaagatggcagagaggacgacaagggaagaaactaagctcaagcaaggaggagttgagcagccggaagacagtgcattaaagacggacgtacgatactcgttcccctgtttggatccatgacagaggagaaggagagaaggagaaaaaggctttgagtaacctgacttgctcgcctatccgagagtgatgaacgggatgagaactggaggtttccttttttttgggtggtcgtaccgaaaacgacgaacggaatcaaagacgtttactcgcatcgaacaggtaacattcagtatagcatccatcgctagcatacacctcatctatcgacagtatacattcgtattcccggtcagaagtcatacatacataccatgcgttgctcgttgatcgctccgttgtttatggcatttctctcatcgcctactcttatcatggccggaaactctgccgacacccagcctgagcagaaacctctctcggctcctcctttgagacactcggccaactcgcctttgctctcggatattctcaccgtcgagagacgggctggtttatggttcgattacgctagggactgtagcgatgtagtgagtccggtcgtggtgatgttctgtgcatgtcgttcgactgattcatccattgtcttctcttcagatgaaacggctcacggatgaaagccagtcgaccactgtcctcgtccctgttaattcagccatcgttgctctgcccaggaaaccgttcgtgtttctttcgtgtgtcctgtccatcatcagagacggatgtgcttgtctgtgttgatctttggccattttgtatcaacaggcatcaacttcctccctcatctaagatcgagatcaaagacatatcgttcgaagaacaagacatggctcatgcttcccaggtcgagcgatggattcaaggacatgtaatccctgtacgttctctactgtacccatgttatccgtcctgactgcttcgtgagactaaactccacggattatcaatatccatataggaatctgtccccttccctcttccaactcagtcagcacctttccctacgcttcttgattcgttctcgatcagcttcaaccagtctggacagtcagatgatggagcaaagagcatcgttgtcaatcctggagaggcccgggtcgtagacgtgctacacggtagaaattggagagtagtgtttttggagggcgtcgtggccgttcccgtccaaggttgattctctttcttattcgttctctcatgtcttcacaccgttgtctctatagttcgtagatctttattctcatatatcgttctgtctgtatctctgtctgtatctcgtctgcctttcgatcttatgcccttcttgatgtatgcgagggtggtgcaaccaacaccacgtggttacgatgtttggttacgggcacgttgtccctcttcccaccacttttgggtctcccacttgaacacttgacacctaacccaccacccgttcattctccttctcccctctcttctttccctcggcctctgttctccctctgattaacacaggaaatagaaagctcgcaatctcaagaaaggaagaactcaaacagatttgtctttgcccaagatggacaaggaaatgtacaagctagaggttctctcgctcgtgtccaagatctcacaagagatctttaaccacacgggtatgtggacgtatctttattcattcattttcgagattggtatatcgacactcgttgcttgggtactgaccatgttcttcctgaaactgttcttgtctgcagctttgaacgacaagtctctcgcagagtttatcatctcgcttcaccagcaatcaaagacgttgccagaattcaagcaaaagctcgccgacgtccaggccaactttcaggatagtttcgtcgagacattggagtaagttcatattataaccacttcctttctgctcctattcttctacttcccggtggttgcccacacaagcctcctttgtctttgcaaaacacgcttggtggggaaagccgatcacgggcagagtgcacgcgttctttttggacccggatagattgtgagagagaaagagagaaagagagaaggagaccacattcatggccaaacaccagagtttttcctccaaggaaaatatgcagactctacccttcactagtgaacttgttctctaacgttgtgtttctattctgtttgcgtacctgcagccgtttgattctctctcttcacccaaaatacaaaaagaagaagaacaaagctcttaaatcatccaccacgtcgtccggtcccaaagtggctgatccgacagcgcccatgcctgtgactaaggaccaggaaatcaaacgacgactactgcctggtctgtccctcccagacgaagtctggaaacctaccactgagtttgaaaaacgaccaggagaggctgatgtggcaggaaaggaagttgaggacctgatgagccaattggagaatgtcggaagcaagaaaggaagaatggcggccactgactttatggaaggctctgccgatggcgagagaaacggtccgagtgcgaagcggccacgatacgacgagggcgacagagacgacagagacgacagagacaaaagggaggatgatcgagggaggtcaaggtatccgagggataatggatacggaaacgccgatcgatcaggctaccagggtagaccggttatggacgagaagccggtgttgtacaaaatctacgatggaaaagtttctgggtggaaagactttggagctttcgtcagtctcgaaggcttaagaggtagattcgagggttagtctttctacttatgcttttgatagacatataccagtgtatacgattgaagtgatcactgactccgttcttttactctggcccctcatttgagttcggcaggcatggttcatatcgggtccatcgcaattggagggcgagtcaacaacccaggggatctcctcactagaaaccagccgtgtaaagtgaaagtcatgtccgttgctggaactcgaattggactgtcgatgaaagacgtcgaccaaaagaccggagcagacctttctcctcatctccgaatgaagaccgaggccgaactggccgcggaagaagaacgtcggcgagcccctcctcctccttcaaccaccggcagtaactctaccccactttaccaggtcgatgacgccaaaggaagttcagccaagcggttgacatcgcctgaaagatgggaaatcaaacagttgattgcgagtggcgtggtcgatgcgagcgagtatcctaacttggacgaggattatacgatcagcatggatggaagtggaggtagagaagtcgatgaggaggtcgatatcgagacgagagatgaggaggctccgttcttggctggtcagaagaggcatgtgctggagatgagcccggttaaggtttgtttacgatttcttgtcttgtcatggcctttgctttccaggatgatgttgccaaagtcgtgttggctgattgatttccggtgatttgtacctccttgaactttcctcctaggttgtgaaagctcctgatggatcgctcaaccgagccgccttggcttctgaagtattcgctaaggaacgtcgagaacttcgacaacaggaagcgcaggaccgggcagattccgaggccagagacttcaacgctccttggttggatccgatggctcagcagggagacaagcagtttgcccaggatctcagaggaacattgatgggtcagagtagtatgaacgagccggagtggaagaaagagaacaagtcaatgtcgtttggtacgaactttttatctctcgagtctttggttggcaacgacgagtaactgccagattagattatccttgttggtgctttatcctgactttctcatcgttgcatttgtgtctgcataggtatcgtgaccaatttgtctatccaggagcagaggaagtctcttcctgtgtacaaattccgaaacgaacttgtcagtgctgttcgagagaatcccgtgctggtcgtcatcggagagactggatctggaaagacgacccagatgacccagttcttggcagaagaaggtttcgccgatcgaggcaagatcggatgtactcagcctcgtcgagtggctgccacctctgtggccaagcgagtcgccgaagaagttggttgtaggttaggagaggaagtcggttattcgatccgattcgaggactgtaccggtccagaaacgaaaatcaagtacatgactgctggtttgttgttgagagaagcattaatcgatccggatatgacccagtactcgtgcatcatcttggatgaagctcacgagagagatatcagtactgatattttgttcggtctgttgaagagtgcgtttgttctattcttgttgttcttcttccgcaacaacgactcactgtttccatctcatctttgtcttcttgcaggaaccttgaagcgtcgcccggaatttaagttgatcgtcacctctgccacgcttaatgccgaaaagttctctgagtacttcttcggttgtgctatcttcaccgttcccggaaacaccttcccggttgagatcctctacaccaaagaacctgaagcggactacctcgacgcctcgttaatcaccatcatgcagatccatttgtctgaacccccgggcgatattcttctcttcttgaccggtcaggaggaaattgattccgcttgtgaaattctgttcgagcgaatgaaagcattgggacctcaagttcctcagttgagtatctacccaatttacggagctcaaatttcaagtgttcagtctaaagtgttcgacccgacgccagagggtacgagaaaggtcgttatcgcgacgaacattgcggagacttcgattacaatcccgggaatttactatgtgattgatccaggattcacgaagcagaaccactacgatccgaaacttggtatggatcatctgcaggttatggtatgtctctctatcgtcatctctttgtgcgcttcgtaacgccctagcttatgacctgacgcggtacgaccactgtttcctgatttttctggtagcctatctcccaagctcaagctagacagcgatccggtcgagctggtcgaaccggacctggaaaggcttaccggctttataccgagatcgccttccgaaatgagatgctcccgaaccctgttcctgagatccaacgaaccaatttgtcacccacgatcttgaccctcaaggctatgggtatcaacgatttgatcgcctttgactttatggatcctcctcctccccagacccttatcaccgcgcttgaaaatctttacgccctcggagctttggacgacgaaggtcttctcaccagactcggacgaaagatggccgatttccctatcgatccagctatggcaaagatgctaattgcctcggtcgactttggatgctccgaggagatcctgacgattgtagcgatgctgtccgttcagaacgttttctaccgaccaaaggacaaacaggcccaggcggacgcaaagaaggcaaagttccatcaaccggagggagatcatctaacgttattgacggtttacaatggttggaaggcaagtaagttctcggcgccttggtgtttcgaaaacttcatccaagcacgaaacatgaagtcggcccaggatgttcgaaagcagctgttgggaatgatggatcgatacaagcacgatatcatctctgccggcaataactacaaccgagttcgaaaagccatctgttctggattcttccgaaacgccgccaagaaggacccgacggaaggctacaagaccctggcagaaggaactccggtctttatccatccgtccagtgctttgttcaaccgacctccagagtggtgtgtgtacaacgaaattgtcatgacgaccaaggagtatatgcattgcgtgttggctattgaacccaaatggctcagcgaagtggctccggccttcttcaaggttgccgatcagtctcgtatttccaagcgaaagaaagccgagaggatcgaaccattgttcaacaagtacgagaaacccaacgaatggcgaatcagtcatacccaaaaggtcactcgaagcagtcagacgttcggttagatattttctgttcctttggggtggaggatcgtggcgaagcgattggaggatcaagtgggggggtatcgatgcaagtcgtcgaagagacggcggcttcgtctccttcatgttgtctcacctctgcatcatcttgtctaattttctttatggttttgatcattatgggtgtatatgtttgtctctctttcagggttggccctcttatttcttctttccgaaaagtgtcctttctttctccgtaagtcttcaaaatcttagacaagatggggaaaacagatagtttataaaaatacgtgggtaattgtaagattaggaaaatcacagaagagaagaggtaaaaaaacgagttagaacagagaaaagcctagctctcagatatgaggattatccacagtaaaaacgaagcagaggaagagcagaaaagagaacgaagacaaaggaagaaagaagaggggaggagagaaaaggagaggagaagaaagacgaaatgagttttatcgtcgtccgttcgactttgcgcttcccttcttctttctcttcccttcgtcctccgaatcgtcactatcatctgctttagccgcgcgtctggttttatattggtttggttagttttgccttatgcaaaagacgagagggaaagcaatggctgatcagctcacctcttatcatcagatctagccgctttcttctcctgctcgtcccagctctctgcctctgagaattcagcttcggatcctgaatcatcagaagcatcttcatcgaagtcggatcccgaagagtcactttctgatgccgattcaagatccgactctgcttcaaattcggatgcagagtctgattcgtcagagttttcggcctgaaagggaatggtcagaaggcagaggattagtacaatggaatatatagtgacaagagaagaaggcaaagaaagaaaagcaacccacatcagaatcaccggccaagaaggaccatccaccatcaacgaagaacatgtagggatcctcgttgatggtcttcatgatctgattccaggtcaagttgactgctccctccgaaatgggaatatcgacagagctaatcccatgcaacaaaagcagatgaatgctatgaacctcttctataaaaagatctgaacacttactctagccattctttgataccctccaactgaccgaacggaatagagttcacatggaccgggggtttggtgaagtctgagaagacaaagaccatatcaaattgtttgagtccatgctggactctctcaaaatgaacgacctcaacctcgctcagcgtgatcaccaaatttggcatctccgttaaatgaactaggcagtccgtcgtaggtgccaaaagaacattcgacttgaaaggtacaccttggaaacctaactcccggaacggaatatctacttcgaaatctccgttaccggaagtagcaatcttctcagcgaacgatttgaactctttgttgagttgttgccgtcgtttcctttcttcctgttcgagctcaatctcatcttcgtctccgtatcggtactttcgctttcggttacccgtttcgtcgaattgaacatccgtagcttccctggtgaattggacgtcctatagaagatcacacagaccagatgtcagtggatgacaggtacagagagtaagaagaaaccattctaccttggctttcttctttccaatcatgatcggcgccttaagatgaacatggatgataacaaggagctcatcatcacaaggttggaagaacagatgcttgatattactgaacaataggtctgtcgttacgtttcatgaatcaagcccgcaacatgttcagctcgatttttatacgggcataccttttttctatctagtggaaagtgttcagtaagaaattctactcaccgactttctgatctcgatggttgatgtatcggataccgttgtcatggatttggagatctccggccaatcgcttcgtatccggtccaggacgaatcataacctccgtcagtacatgcggtcgtttacctgtacgtttcccacacacgcgcatatgatagttagttctaagagaccagacgaaaagagaaggaggaagacgaacctcgaagttcgatcaatcgttcttgcgtgatgacatctgccaactccttcttatccttctcccgtttagtcatcaatgtcctcatttttgtaatctggtcaaatacttgggagaaatgatgatggtcggttgatcggaagactgctgagcggatgaatgttgcattgggatcttcgaatggctgtatttatatcggcattaagtatcatcaagaaaacctcaacaaatgacagagagtagatcagaaagcgactaactgtgtcctccttctttcctgcgatctgtccaggcgattggaagttgatccggatatacgtatattcaccctcttcgtttttactagcgttcttgatagtatttatatggaatggggtagcgaatccgttgataggaaggataattgttgctctttgatcatccacaaagatctgttgttttcgtaaaaagggaagcgtcagctaacgcgtggagtcagaaaacacatcgagaggcagacttactcgcttcttaacaacctccctaggtaactgctcttccctcttataactctcgaactttttgaaccctttcttgacttctcccgatcctccttgatcctggttgaacctcttcagaccctgctcctgtcttaacgcgtgtaactctttttgatgctccttcatcttttgttgggacgtttcgtcgacctcggagcgggtatcattccttgtctttcctcggaggactttggaaccgacgacatggccggtcagcttcttgggagatgggggcgctcgcttaggagctgttttctccggttcctcctagagaattccatatcaaagtgcaaagacgtaagcgcttctctcaggatagcat

SEQ ID NO: 315 - DNA, 898 bp, Xanthophyllomyces dendrorhous
atagggaaaagaagagactgactccgcccatgaagaaaacaacatcgttcaaactcttggatccctctgtgaggacaataccttgatcttttccgacttgaacagtatcaatgagcaagagcgcgtacctaaatcgtgaccatcaccttcagccaggtaagcgcgaaccgttgccaacactttgagtgaactcggaagaagaagaacggaagaacgtacgtctgtcctttctgcttggggtcaggtagtccctggaatgccacctgaaggttgatcaccattccttctctcatcgcctttccattcttcgtgttcaacaagaatgacgtgtctctaaattctaggccggtctgtgatttatgtttgcgtttttcccatatcatcatcaacgaaagttcatctttgctcaaaacgcgacaaaaggacgtaccctcgatcccagtgacttctggaagtgagattctaaatcaggtctcgaactcttgacaaattctatggcattggcgatcagttcgctgacgatagctccatccttgatgagagataagatgtgttgttggacttctagtaggaacgagtaattcttttcttgactctgccagcgtttgatcgaaatatacaagaacaatcagcatatagcccaacggaagagacaagaaagaagaagagaaaataaggcgaaccttgacagggtcgatcaagaatgtcctacccagattactgcaataacttctgaccctcaaaccgacgcttgctaagatcacgcctgccttcaagtttttctcgttcgattctgcggatggcttgagatcatattctccaccagactgaatgataggtgtgtagatccaaataactgatgagaagtcgacctgttggagcgcgagcgagtatacat

SEQ ID NO: 316 - DNA, 52861 bp, Xanthophyllomyces dendrorhous
agtatacataaagagattagaacttgttggttcgtcaaattcatagaggaaacacgaactcaccgaagcaacagcaggccgctttgaccacaatttcatatccggtcctgcctcctccgttccaatcttactttccactaaattcgccaactgcaagatttccctccaaaaagccaaacaacgcgtcggatcggaatcaaaatgagccatcggttccgctgtcatttcagacccaagtacaaaggattgcataggagaacataccttctcgtgagagagtttcttgtcggcctcgattgtactagccatcttgtcgacgaaataagagtttataagtgtcgaagtgagaagcgctgctgtttgaatgtgtttctgttcgttgccagagccaagatttgtcaggtcatcgtgtagggagtgagggtgaacgaaatcagaagtgaacgaacaagctcgcttttgtctttcttggccatgacggtgctcagacctgaagaaacatcaacctcttcaaaagttgcggttgccaggctgtcctcccaaccatttcacgcattcgaaatccagttccaagcccataatcgtgtcagcgagagattgagaactccaagcgtccaaaggaggactcacgccttggtccattcgtccaccatctttccacgatgcttctctttggtaagcacaccgatcgctttgcctttacccgtcttttttaaagtgtccaccaagtctgtcaggacacctgttcaacaatgaaaatagttaaatgaggaagacaggaaaagaaagaatacgttgatgtgatgagattaagaaaaaatgcaattcgaagcgcgcgcaagaggagaggtggacgaagaaggatgcaaaactaaccgaacgaagcagggtcctttgcgttcttgggcacaatcctgatcgggatgtccgccttatcagctgccaattgctggagaattttggctgacagagattgatttagggacatgatacaatctcaagtaagctttctgttcgtaagagaacgggggtggacagagaaggacgatggagaagaatccacctaggaacgagataagacaaacctttggagggagagcatacaaagacgatctcatctggtctgaatacgatgatggttgagggaaactcgtatccaagcagccaggtctaagaacgaataagaaagtggcaaaaatccgagaggaaaacatcagcacattttgttttgttgtcttcctcttccctttctcctcgccatagatgaccgattcacgctagagcggaagcaaggacaggccaggaaggacagattctggttgactgacctgcagagcggtactcttcttgtacactccatcctcgtctggatcgccgacaagtatgacaagcgcgtccgcctgggcaagttgactatactcatcgacgtctccgggagtctaagatggagaaggcagtggccgaaagatgtacatattcacatcgagacgagataaagaataggagcacaaacaaaagatgaaaagcacacacataacgtcagccatttatcaacgggaaaggatagacagaccaagtagagacaggcgaagcaacagcagcaaaagaaagaagaaaagaactctgaaagacagaccttccaagcgtcgaggagggatttcgacctggcaaagaacgcggggacgtccaggttgatctctgacatggtttaattctctgtggttctcttctttgcggggatctgttggttctatagcgatgaagaacgagcgagagaatcaatagaaaacaaagatgatggtcagaggaagagaagaaaaaaaggaaaagttgttggctgagatcgcgtccgggtgggagatgagcgtctggtcgggggtcgcgtcacgcgttgtgtaaccacgggtcatgtgactggtgacgtaggatgtgaccatggtcgtgagtgctagaacaagggcgatagagagactctgaagagaagggaagagaaattgaagatgcagatgaagacgcagatgcgcaagaaatgttgcagagatacgcaacaaggaatacagactcaatgagagctgaagaggatggaggcctaagggcaaaacacaaacgacgctgactgcacgagcatatgatacattcagacctcacatgctcaacgcacctacacaacttgtaccgcatcagatcgagtgtttcaacccatgatatattcctttattcggacaatcggttcgatgattacaattccatatatactgtctcaagcttggacgcttcgccttcgcttataccttctttgctctcggcggatcttttcgtctctgcttgcccatctatgtatcccgaatttatggtagtttgtatccagaaactcatgcgcgttcgtgttctttcgagagcttgacaagatcctcgaatggaacttgacttccgccgaagatatcgagtgacctaggttgatatattcaaataagcatttcgaaaagaagagatggtgaagaaaagccgagaggaacgaagagaaaacgaaggaggtggaaaggaagaaaaggaaaggaaaggaggcggaacgtacgagccatatgtgagatctaccttcccgttggatagtcttgagaccagttccaagtcggatatacctgatcacacatacaagaatcaaaatggtttgtttccgagtttgggcataaagaagaaaaagtagtaagagaaaaaagtgaaagaaaggatcgagcgtaccacgagcaccgccagcatacgtagttgggatatgcacccactctcccagccctaccattccgtaaaccatttcgcgccgtaccggtagaggtgtttaggatgttcagaatgtcagaatcattcacagaaggcttggaaaagaaggagaagaggacagaagaacaaacttgaaacaaggtcttcatctattccctggcataatccctctacatccgctgcgtgaatcaagaattcacttttgttcaagagaaagaatgaaatacgatattgtcagtcaagctggatcttcttcttttcttgttaagctcgagaaagagaaggtacctgcagtactctgccagcatatcgagggattctgtgtcacagccaacagagaaatctttgatcaactccatcgaaacgactaggatacgcagaacagagtataggcttaccctttgtgacatccagatccgtcaaatcctgccatttgttcatggccacaacccatcgatctcctctttttcgacagcttacatcgactactagtctgtcctttcccaccgcgttctccagctctatcaatcgctccaaagagaatttggccgatgggaaaagatgtgaggtcacgataactttcgaagcgcctgctttgatccactcggatgcattcgtttgattgattcctcctcccacttgaaggtgatctgatcattgccccgacaaacagagggtgagtagctggggatcatctttcgcatgtagaatagaggaagaacgcaccaggccatgtagaaagtgcttctttggcggccaggtcattgttaggtcctaatttgatgacatgtccgccatgaaggtcatgttctttataaagcgaagcatagtatccaggaggattactgacagaccaattggtttgttcatcaatcagacatcatatagaaccggttcgtaggaatgagtctgtacttcgtattctaaagagaccgttcgaaagacaaaggatattcacctagaaacaaaattcgtcttgagctctgcttcctgagctttcacgtcggacagagtacctcctacgatctgcttgacgagccctccatgaagatcaatgcaaggacggaagagagatttcctggaagcgtcttttgaggaagcggtcatggtggatatcgaatccggaggatggaagtgacggtttggggatggtatatgatacaaagcaggtatggtgatgacgagttggatgaaggagtttaaccctaactgatgatttccactaacgactatcagcagctcccaagcgtgttcacttctggaagaccctaagtgaagaacctcttacatttgccacatcgactgttctttgatggctttcacaggcaagttagtggcgagtagcatcgtccgttttttttgttctcgtgtttacaaaaatcgaattgaagaaacggaaggaggatatctggcgaccgtggcactcattcgagctgatcgagttgaacatcctctcactttaactagaattcccacgtttatcccgatcgatatctaccgagaagtcatcggacaactcttcttagactcaatatcaccaaactggctcgaaagagaggagataaaagatgagcggaggatcaagctgtttgaggatctattgtcttgctgtttagtctcaaaggaatggctcgtaagcctctttctttctttctttcttttgtgtcttctcagtacagatctatcttatgcttaatgaactattaccctgccatttcaggcgatcacccgtccctttctctatcttgacattgacttgtcgtgcatcgataacctggatgctctgttcaacacactgtccctcaacccatatatccgaccatatgtcaagcatctctctttcccgatgacgtcgatcgagcttttggaaaccaaacgtcatctctttccctgcgcccaactaagtttcccatacgatttcgacacagatggatccttgattgatggcattcccgatagcctgctctcgttcacccgatgggaacggaagatccaactccggaaaatcgtcatcgcttcctggcaaggtcgttcatgggaaccagcagcaagagtcctgattcgtgctagcgagatattcgatttgactcaattggaggcattggaattttcagaactcccagtgggagatacagagctcgagctggcagagaacccaaagtcgtccgatctgttggaaccccttcggaggattcttttagattcattcggaccaaagatgcaagaactcaagataacgacgacatctaggctcttgttgttgctctttctcgactctctccctgatctccaacggttgtcgatatcggctgacctagccaacatgattctcaatcggacgtcctacccacgactcgagtctctccagatcatgactgacccagatatcgaacctagtccgatccaagaacacccggacctccttttctcccggaacgatacactcgaacgactcgcacgagcatttcccttattaagagtgataggggcatcaccttacatgagcgaacaagatatatatgccgacgcagagctgatcccggacgaggatctgtttgcagagctcgaagaggaggatttgatatctatggaacagcggagagatgagatgcgggaatgtgcggtggagctcaaagaggttggggttaccttggtcgaccagtggggagttgaatggctaaagaagccaaagtctggattgtcctccgactgggctaaagatattctggtcgctctcacagacaggcaggatggagagcgagaaagcgctatgtgagagctgtttatgatatatgtttctagcatctctctcttcttctttccctgccttcttgtaagatgtatcggctctgtttctgcgctatatccttgacatcaggtggcagctacctaagatacttgaaaaacagaaattcaaaaacagcgccagcttcttacaccttcctccgctgtcttttagtcctcctacactcctctccgcccctcgtctaccatccattagaagaaagaacaaaactattaaaatgtctgacgagcagtacgttcgcatggctaccatgctgctgtttggcgatttatcactttcgtcgttgtgcaaaagtgactgactttcattccgtctctccggggttttttttcctctgtctttttttcctcctccctcctttctattggattctctccgtccatctgatgatgatccgggtagagttgttgttgtaagttggatcatttggtgtctctttcctgctagggatggatgagcaaccacggacggccgatcttctcaagatcgacccatatcaataacatccagcggaataaactctgacagtgcttctttcaccccttccctttttttccctacttccctctgttcggacaatctcaccaatggaaatcgatcgaaaaaaacctcgaatgtagatgcaaaccgctgggtttgagtaagtgctctttcaatctcctacaattcggtcatgttttagtttctcacaagtcccctcttctgttgttggaatcgtttgtctctttcctttgggaaaaactgtgtagtgcccgattcccccaggtatgtttataacgtcgcgttcctccactctcaatatatcacccaacaactaaatcttcttgctaacgtcctatcctttccttgtgcctgttcgtcctttccacacagaccaaccagaccgtacggactttcaatctttccttccacttctcctttcttgctagctagatcaagcaagattggatcatgcgatggaagactccttgaagctgaatttatatttgtgcttcgtttccgtcatttccggggatatgggtcgttcgggatcatgcagaagcactggtacgtgatcagatttttcgagactctgaccccaatttttggactcaccaatagacttgtgtcactcttgtttcttatcgggcggtcgtctgccactctttctttcacttctgtgggaaaatctggtctgatctatgcttacagctggcagaactttgtggactaccacaagtgcatcaacgccaagggagaggattacgctccgtgcaagcagttcaagcgaacctaccgaagtctctgcccgaatggtccgttccgagtttgtttcgaaaaatgctgtcatggatgctaacaaggagacacggtattttgctcttcttcttctttgctgaatacagactggatcgagaagtgggacaaccagatcgaggagggcaaggttagtttctctcttctttccgatttggaatatcacagcgtcgcttggcctgactttttccatttctcatgtctgcactgtctccagttccctgccgatctttccccttagatgtagtgtgattgcatactcggtcaaccgaccgagaagaaggagacgggaagaaacataggatggaagcgaggagagatgacatgtcaaattatgcgattttcaattctgtttgtgtgtgtgtgtgtgtcgggtccttcatttgctgtattcacatcgaaagtctacgaccaggcaatttagaacgaacatcaacccaagagggagtagaatgcacaaggctgctgagaatgaaccatctgaaacttggatagatcgtacaggaggagaaaagagacgagacgattggacggtcatttgagttttttctccgcctgccggttttttcttttttttttctttctttttctcttctcaccttccttgtgcacaacacacttcaatcgacagatcactctactctgtcaggccgatccacatagcctcaggcaagaccacaagcaagcaagtctggtctcacgccaggaatagagacacgccgacaagaggataaaacacaaacgacgtcgtgtacaagggatgatttcaacacgttgtttcccttctctttcaagggcctcgatcccgtccttctctcgacacgctcatatctcgtctcgtactatcccgtcgataacaaccccgtcgggcttcaacctatcgatatcggcatcgacagcaaagttcagaccgggagttttcgtggggacaaagaatggctcggataagactgaaagggtgatgatgctatccggccagtcgactcgacgtatccggttgattcagaataggtcgtactcgactgtagctccgtcgtcatcaacatcgacggcaaagacgataccaacaacagcatcatctccaaagacgtctccatcgccgctctcaccagccgcccccttcccgccatcggcttcttctcctctagaaactctatcaagtccccagctttctcgtccaccgtttgctccgctgccacctttgaacccacgacgactgatgaatctctatcttgctttgtccaaatctcgactatcaatcttggtcaccttaacatccaccaccggactcgccttatcccctcatccttcctcgctttcggtcttgctttctttgacattaggaacgttcttgacgtcggcgtctgcaaactcgatcaatcaattgtttgaggcacctctcgatgctcaagccaccaggacgagaaaccgaccactcgtcactcgagcgatctcccctcctcacgcagctatctttgcggccgtctgtgcagccgtcggtgtgagcgtgttgctctggggatgtaatccaacgacggccattcttgggctggggaaccttgtgttgtattcgtttgtgtacacacctatgaagaggttgacgatctggaacacctgggtaggcgccatcgtaggcgccatcccacccgtcatgggttggactgctacgggcggtcaactttggccgacgaaggagttcaagtcgtgggccgggctgccagattggataccggagagtgaaccggtctgggtgagtgtcgtaccgagggacgaagaggaggaggaggaggaagagactccggctggttgggcaccggtcaagaagaaagcgttcaagctggacaacaagtgggacggtgtgagagcgccaacgttggaggtgagtcgctgtatcttctcgttcttctctgttgtatggagcacagagagagctcatgttagagaaaacgtgttttgcattggatggatctaggattaccaaccgccgtcttacaagagttctggctcggacaattcgggctcttctagtgatgccgccaacgatgatatccctctcccttcgatcgcgctcgaagcaccgttaccggtatctccttctcatcctggccaggtccagatcacagcgctcgctccattatcgctcttccttttgctgttttcctggcagttccctcacttcaacgcactctcccacttcattcgatcggcctacgcttcttcctcttacaagatgctctccgtattaaaccccggtcggaatgcagccgtgtcgctgagacacgctctggcaatcattcctatctgctcggtcctcgctccgttgagtggagcggtcactccgttgtttgccatcacttctcttgcgccgaacgtgatgtttgcgaaaagggcgtatgagttctggaaagtccccagagatctccaagccagacgattgttctgggtctctttgtggcatctcccggtagtgttgggtttaatgatcattcataagaatgatgccggttggatggaaggagtccggaagagtgaagttgggaagtgggtcgtcaggtctaagccttggaaggtcggtacagatgtctggggctgggtcagtggctccaaggagacgccggaacagttggtagacagggtctggggtccaaaggggtcagagcttcctatggcgattccaagtagaaggaagccaccgcctgttcttccttcgtaggctttctaggatgtgtgtatgtgtgccataatgtatatgagctctccttttgtagatcgtgtgtgtgtgtgtgtgtgtgtgagagaaagcaaagcattaatcaatcgatacgacatttccatacgttcttactggccgattgaaggttgactgtaagaaagcagtaccgcagatggggccgagaccctcttgcccattgtctctatcaagcatatttcctcgagacacaaagccacagcacttcagcggctcaaaatctccagctcggtacagtctctagacaaacaaatagagtagcaagggtttacctcaaagagctcacccggtctcttaggtcgaccgacggcgttaagcgttagggttagttcatatgtgacacgccttttcaaccggcgtcagatctcgatctcatcatcatcacgaccatcacctccgacgacaggccaaccacctctacgctcgtcctttacatgcgattcaaccctggaaacatactcaaatctacgttctttgcatcctccactttctcctcccaagcatcaaacatggctaagaaacccagaacgatcccagagccgacggtgcctaccgcgattcagtcgagagaaatccaaaagaccgacagtggtggttagtccttcttcgatcctttttcatttttcattttttatttctggtttgcgaatcgagatagtctgagggatggatggcatagtagaagagtgactgatcgtgtgtctcgtgttgtccttcatctgattcagtcgacgtatgtttccgttttacaatttgagaccggcgacaaaaaaaagaagtggaggcattgactaatcgtctcttgcgacctgattgacttcatcgtctgttctacatctctctcagcacgcttactttgcaggtggatgcttgtatgtagttctttattttttatttttctctcttctttctacccattttgccatagggaagttgacatcaaaaattgaactcaacccagctggggagtagagcatgagttcacttcttatttcggacacctccgtacgcgatatctctcatttccaaatctttatttctctctttttctaatggcgtgatgcaataccccgtgtggtcaaacatccaatgctaacttgacatttcacaaatcgtttgattgtgtagcctcattcaaagccgtttccgggtacaccggtggaaccagcgagaaccctagtttgtcctcttttcgcaaaataacacatttcgttatgatttgattcaactgactttgatctgaggtcatttcctctgaatcagcttaccgagaagtgtgctgttcgtctcgcttctttctgcttttcagagccccatttaagtgggtggttcaaaggaaatagaactgatcgattatgcaataacagccggtcgaacaggacatgccgaggccgtcaaggtcacttacgataaatcttctgtaggctatggagaactcgtcgaggtttgttatcccttgcgccttcttttcatcatatctccaattgatttgagctctgacggtttccgactttgcgtacacgtctgaatggggttcggtacagttcttcttcagaacacacgatcctacaacggctgatcgacaaggaggagacagaggatctcgttcgtctttgatttttctttccccatcttctttctctcagcattctaaatttgatcattgctgacattctcctttatctttcttctgtttcttgactacgggcgcgatgaagaataccgatcggccatctttaccaactctgacgaacaatcaaagatcgcgctagctgtcaaggacgaagttcagaagaaatagtacgttttttttttgtaatttctcccttcttttttctcttttcttctatttgttcatgcctgactctcctctcaacccggcaatgtctttctcgttacgaaaatctagctttgatcccaaaggttctagagttgtcacccagatggcgtctcttgggaaatggtacgacgcagaggactaccatcagttgtacttggacgtcaaccccgacggataccaatgtgctactcatcatcttcattggtgaataatgacagaactcccatgtttttttaaaaaaatcttgtgtatgaatatatatgattcccatcgatcaatcttcattcttacgtgtgacagaacaaatcgatgtgtagaagaagtactttccttctcttcatatcagatcccaggcgcatcacaaacgaaatccaagaaaatccttccgcttcgcccattctctctttcttcttattttcttcttccgaccttgccttttcttctacctctcaggctgctgatcatcaccaccgtccatctctccacccatcgtctggacacctcctccaccctcctcagctcctggtcgtcgggcggagactacgtcgtctactcttaggagcaacgtagcggactgtttgccaaccaaaggcatgcggggtgttcgtaatcgtatcttagtctacgcctcccgtaaagaagaaaaacaaccaccataaacaaaggggggaagaaagagaacttgacgaacctcaatagcagtcttgagagtttggatcttgacggctgcggattcataaaggccataggttttcatgtcggttgcttttccggaatcaccgtccactccccatgaggattctccgttggcgtgtcgtgcctattaaataacacgagcggacaagagacacaacgcgttagagagaagaagaagagagacaaagaaagaagagacatactcggagatcggttaggactctcatagcatttccaccacagttctggatcagcgttctcgggataacctccaaagcctccgcacaggccttcaccggttcaccctcaattccgtccatcaattttgctcgcctcatcaattcaacagagatggccatctcagtcgctcctcctcctggtgagaggagtgggttgaagacgacgtttcgagcaacagccatggcatcagcgaggtttcggtcaatctcgttcaaaatatccttcgaaggtcctcggagcaagatagtgcaagccttgggcgaggtgcattcggtcaagaacgtgaagtacctgtaaagtttccaacatggttgatgataagaacacatgtcgcagtgaacagcgctagatacacaaaaataagtggacgtactcgtcacccatcttctcaacattgaataatccacactgggttccgacatcaacctctcgaagatcctcaactcggttcacaatggtcgctccgaccgctcgagctatacggttgttgtccgactttcggactcgtcggatggcggtgatgttggccttgagaaggtagtgttgggcaagatctatttcgaggcacatggtatgtttaaatcagctctcggactactgcgcaaaaggaaggagagagggcaaactcaccagagactcctttctcggtaaacacaagatccggcttgaactcgacgatcttgtcacacatcatcttgatctgctcctcctcaatttccaaaaccttgctccagtcctcctccctagtgatctcgatatttgtttggctctcccccttcttgtactcaagcgggcagtccaggagtacaatcctcgggttctcgattcgcctcctcatctttgggtgcgtcacatccttgttgaccataacaccggacaataccttgcaatcctcaatctctcctccgggcaccttctccactcgggcgtatcgcttgatatcgatcgtcttgatctcgccagtgccagagttatcggctgtttgagagactgtgcggacagcgtcgagcgcaagctggcacatcagatccgaccacctggaggagaactttgtgccgagggaagtcttgatgagcgcaagcatctccttgtctgaatgaacatcgaccggcttcgagatggactggataacatcgagagaaatttgaagagcagccttgaacgcagagataatgacgactgggtgaatcgatcgttcgagcagagggagcgagtgggccaagatttctccagctaagatataacgagaaccatttacgaagaaataagcttctgtccgagacagtcaagacccaaacgaatcgatgggcttaccaaggatgataacactagtggttccgtctccaacctcttcgtcctgagttcgactaagctcaatcattgacttggcggccggatgagagacttcgatctctctcaagatggcatttccgtcgttggtaattctgttgagtaaggaggaaacgtgagtactcgtctgaaatcttggagtaaaaaaaagaaacataagatcgaccagggaggaaacagaaggaatgagaggcaacatacaagattcctcccataggatctagaatcatcttgagcatggccttgggacccaagcatgttcgaattacatctgctaccgtctataggaaggtgtaagcatatatgggttgccagtgttgacagggtttagttgaacgacaaaataagagcaggcaatcagaaagcacagaaaagacctagtcagcaaggagttcgttcgaaatgtgcaccttgtgaaaggcagttaacaaggacgtcatcgagttgatagatttcagacaagacagtatgtccaacaagtctctgtcataacagcaaaacgaaccttggcagcattgatgtttgcgatctgagccttcctacccgattgtcgctcgggtccagtgtctgattgtgagacgagtaagcaacatgctgggtcagctatgacaacacgattcactgtgtaccacacctaatcatcgaccacatagagttcaaacgcgaacatactcatcacaaatacgttttgactcatgttgggcgtgatggtagagagtgttaaatgagaagggaaggatggaagacagggcttagggtagagatgaaggagaggagaaaggaaaaaaagggagtgagagggtcgaggtgaattacgtaaggattgatgtaacgattcgtaaccaagtcgcgtcgcgtcgcgcttgttttgttacacgacacgacacttatatagatcggcgcacgaatcaaataccgcgtcatggttagtcaccaagttgacaattgatatcttcgccgtaggcgaacaccgccaacttttttctttttttgtgtttttgaagatcttttctcactttcgacacatccttcgtctactgtattctttgcaatcaccttctttcagttctgttttctttgacttttgatttttctgtgtctgctggctcgcctcttctcggaggattttttctttaattttctctccagattttgatcctttaatcaccatctcgtaaactcctccgctccctcagatcgctcaacactcttgcttgaacgcacagacagccacagtcgatttagcacacagctatgggcactgcttgttggttagagtgagtattcagagatctggtatatgttggccatcaaggaaaagtcaggatccttaaactgataactgctcggctttcccgttgttccatctgatcgctaaactttagcggtgacaatccttgtaagtcggtcgttctcaacttcatctcgcttcatgtccctttgcgccgtcttctacttctctctctcgctctaattatcatgaagctcactccgtatttctatgcatatccatctatgggaattgcgcctcacaacacatatctttgaagggtcatcgagcttagacaatcgtggtcagccgtgtaagatctacggcaccgtggactacatcgttgcttccgttctcggaggtatccgtcagtagtacttcacaatttctgagccattcatgtctcggacctgtatacatttgagctgaattgtgtctgtttgcttcctccttctcctcttcacgcctatctgtgtcaaatcaacgtagtggtcgtcattttgattgctcttggactgggctggctcattcaacattccaagaaagcttcgcgattccgcgcgttctggaaccagagcggtgatgaggatcttgaaatgaagacacaccatcaccgtctcatcaacacatccgaagttgaacgacatctctacgatcctccgatgagctctgccggttctgtccgaagcggaaaatccaagcggtctagcatggtacccatgggtgtcagcacagcttcctctaggaaaagcaagactggcaacaccggaactgccaacgcgaggagtcctctgagcggttggagagaaggagacgacatcacaagtatgtgctcaatctttcttttgctcttttcgttcttttctagcggtctttgatgaaagatcgccgaatctttgaaaccgcaggcgtaccaaacctctattctttgggcggtctaaatacatcgacttcctctctttccaatcgatctccatctccttcatcttaccctgaacaagtgaaaaccttgttatctcctgccccgtcaagctttttatcccctccgtcacagtattctccctatgcgccctcaacagaatatgaaccctctgtagctgcgtatcctataggatcaccttacgagcagagggaaaatcagccggggagcgtattccggtacgggatgactgaagggtcgaatccagctgtgattcctggagatatcggcacacgtccgtactcgccaggtctctatcagtctcaattcgacgatcactacagggatgaccggggatatactaaccaccagtaccgtagatgagagaactatgacattctatgtattctctatgattttgttcgcgtccttcttatctgcatatacctattcgtctcataaaaattctatctatcttaacgctctctcctaaaccatcgtttccttgtttttcttcctttcttttttccctctggacactacctacgcctctgacatcaaggaaccctttgtctaccctcttcttccatctgttctgatctttctcccttcgatattcgttatctctaattttcatccttcatgtcaagttccttctttttcgtacgaaatccaatggttttctttctttgtctggagcttaagcaaatgacaaaacatgaagaagatcgcgccgctcgacgcgttgaaacaacacgcgttttgatcctccgcgcctaaaatgaaaacacacgcaacccagttttcgtgttcttgtgttctttggcaacccacctcccttgcctgtatcctccttttatccttgattatttgagatcaacagacccggttgacgtccaagaaaacaactatggatcctaaattattatccgagtggacggctttcgctctcaaaggttcgtcacgactcggtccatctctttgttcatctgttgggattcctgacaaaatctctgtttttattcctatgtctcaaacgcgatttgtttccaaaggtggtctatgtcaaggctttgccaaggaggacttcgttgcacagggcgaaaattcattgatgtttctcaagggagacattgttgtcgctctcgaggcttgtgagaaagagggtgtctactgggtaagttctttctgttcctttcctagatcactgtatcgacttatcaggggaacttatcatgagatttgttgaatttgttctgttcaactctaactctttgccttccttcaatatagggatactgtgaaggcgttctgggccaattcaaaaccacccttgtcgatttccctcaaggagctatccctctacctcctctaccaacccgtcaacggcctagaccgagcgaactccctgatttcgtcttctcgcccgatccttctcctgcaattgacactgcttcgtctcctgtgacggccgtgcctttacttggatcaccaggagtcgaagaatcattatcttctttcgagtttgactctgtcagctgctcaagatcaacctcttctcattcatttgctcggactgaagctagcttaggggctagaacgggcaatcaatccccacagttaccactcacgcctccgagccaaggcaaccatttattcatctctcatcaaatcctgcaacaacaaaagttgaaagctccttctctgggggtagagttcatggtgacttctccaacagctacaaatttctcgatggaggatgatctcgagcgaagtagtagacggagctccgggcagagttgggcgtctgttaccaccgcaagcgagcgatcatcacaagatcaagatggagaagagcaagagcaagaatggaacaaaggcgagagattattgcaggaatgtattgaaaaggaggttgacaggttgtcgatccaacagatgagtagtttaggaagtctgggaagtatggcaagtctcggtagcctgggcagtctgacggatagcttgatcaaagagatggcagcctcagcagcgctccctcctgggtacaacccgaaggccaaacactggaaccttgaacaagatgacgacaagctggaggttttaggagaacctctggactcctccattcgatcaacggcaacagtcatgccggagtctcagtccgatagaaacccagtttctgttctccaatcccgcaaacgatctgttggactgtcgacttcctcttcctcttcctctttctcctcctcaacctcaaaccagactgtcaaccgaagcatcatcaacttcagtaattctgaccattcactccatcccgcaattaactctcttaacagaaacagactcggctcaatagcctcgtctgttagtgcctcatccgatgtcagattcgaatctgagctcagcgatctgttcgacgcatacggaagggagtcaatgtacgcctgccctgacgaaaatgtcatggaggctcagattcgggtccaaagttgcaaacagacgttcgaagatcacgaggacaccgagcgcagagacggggatgaagagataaccattgagggaagagatgagaaaagcatacagtcttccgaatcggcgagtagcttggtcaaagcgctctctgaattaacttctttagcttctccgctggacgattcaagcatgctttctgtcctgaaaggattagaccaaggtgcgccgctctcagagtttccaacacatatcaaaaaaagattatcgagcgagaacttggcgtcatccttaagaaatcggatcatggagcggaacagaacagccgatctcgggggccaaaaaaatgatgttgaggccggatctacgcccggcttagagattcaattagacaaagaagatgtcagggatatgggaaggtcgaccaagcgaccacctcctttgaaactcgatgtgtcgaacgtctacaatgccgacaccgctcagatatcgtctcctgcaactcctactctccatagagcaagaaccccaacattagaggcctcaacatcggcttcgacttcaccctcagttagttcgcctaccgactcccaatcaaaaagcattttacgaggtcaaacgaatgtcaatctgtattcctcccctggcccagttccaatttcattcttcctcaacaatagtcaaacccacttcacatcacctgcggagagcccgataatgtcacccaaatcgttcgcttcacccaagattaatccttcttccgaaggttttgctggtgtaggcgcaggtcggccggcagtcgtaggggacacaaggactcgagtcatgcctcggagggaaaggcctagatcgaagagtttttcgtctcaacaaggagttgagatcgggttccctatgctcagcacgttcgtatctcttctttcgcctttacactgatcaactctaatgaagcctattttttctttcatgttatatcttgtatatctctcatccagatccgagcaaggtgcgcctcaatgttcgtttgtcactctcaatccctcacctgttcctaggattcaaccaggcgacgatcaatgcgctccttatcacgtttctcgtccaacacttcagtctttgggatctattgaccctgaacctgtccgctcgcctactgtccaaccgcaaggcattcaaagaaagacaagcgaacattcccttcttgctgctatcagacgggcggagaacttaccggtaccttcgatccctagcacattcaggaaaccaacaactccatcatcccctcatagttcttcaccattcttgtcacgacctgagacgcctagatctgtttccgacacccgggctggtacaatgaccagcccttcaatcaatccaatcagtcctacttcacccaagatcccgaaatccagagggtttatgggatttggctttcttcgctcgaagtcgcaatctaacttatcgatatcttcgccaggcgctaggatcgatcctttcatactccctcctcagccttcaccttccttttcttcaggctctcctcctgttctcaagtcgattctaattaagactcctgtgaaatcagagattgatcccctttcaagtccagtccgttccaccgatctcggaacggattcatctctggttcatactcctgcaccttcgtttggttattcgagcagcccatcgagacctcggcttgcaacaacaatgtcctctgggacattaccctccttcgtgtcgagttctaatgctctagatgacgatggggaggacttattggatttccaacccagaagaatgaagcccaggacctcatctagcagttcgaccagttcgttcagggatctcgtcaagtcaaaaattcacccatcaccgaagacagattcgaagatgaatcctatgcattctccggtatctcacaccgacttcaaagaaagcacagtgaaagaaggcaaattcgaggtacgtctttcttctttcctcctttcacgaagagttgtgtacgagaagactaaatcatctaaatctggtgctgtgtgccacaatagtttgaattgatgaatccacttgcccaaaagctagccagcaaatccagtgtaaatcttacgccaaatgcaccttctagtacgcttatacctcaaacggatgaatggggtttcttcatcccctccagtatggtccagacttttgcatgtcaacgacgtactgcctctctggggcctgaagctgtacaagcctccgagcaaaagtggctttctatcatggacacgacaccttcgaacgtcgctgcgctacagaagaacaaaaagataaagaagttgctcagatcggatttgccgtcgtcattgaggaccaaaatctgggcgtttttgtgcgatgcgggggcgaagcgagagagcggtctgttcgcaaagctagttgaaaagggtgaggcttcggacgccatggtcaaagactgctcgacgtgagtttatatctcttctgtttatcgcatttgtgattcaattgatccaagatactgatacatcttgtccattatcatttccgactgttcagagtgtacaccgatcattcattattcaaccctccaaactctggtcagaaagacttgctcaatatcctcaaagcatatggccagtacaactctagattggactacaaatctggttggtcgaccttttcgttttatactacatgtttgccgtgtcgattttttttaatcaattaaagcttacgttcttactgagttatcaggtatgcccgaaatcgctgggtgttttgcgattctttgtccggcagaagatgcgttctggttattcgcgactacaatcgatcgtatcaagggttatcacaacaaatccttgccgatagatgcgatgtgttttgtccacttattggaggcggtcgataaaccattggctaagagattgattgtaagtgtcttttgccttgaatggactagtccctagtgcttttgcgttcgcgttgcttactatatattccatcggtgttgatctttgtgattacatagatagactgccagataaacccggaagcgttactacgagcttggattctgcccatgtttgttcgcgtccttccctggcggacagttcttcgagttttagatatattcttccttgaaggtcagatcgattgctttctgttctgatgtctcggaatctgtatttatatctacctagtcttgttgacaccctttgcacaataccttctcatacagatctcacgttccttctcaggatctctctcgccatcctcatcactgcgcgcgatcgacttcttgactccgccaccttacgtacccctgcgcacgtgaagtactacttatacaacctcccctctgacgagctggtctctcctgagaagctcatctcggtggctgatggtattaaacaaggtatgaaggatgatgagatgatgaaactaaggacaaaggctgtggatgaattagcgcaggggaggagaacggccgccaaagcaaaagctcaggcggaagcgaaggcattgaggaagagagtgtaagctggtgtggttcatttcttccgtctcacaattagattcacaattttatattttgttattctatatttttctcttcgggttgtttgcgttcatttttcttttgggtttcgtgatgtttttcttcatcggtctgagcacctttgtatacttctaatttccaatgcttcgtgctccaactctattcaggcatttctctttcctctctcgttgtttgtatcaagctgttcatggtgttcacatgattcgtttaattttcaaattctcaatcatttctacatgttgtcgttggaaaaaaatgacttcttgttccagatataccctagtcatcatcatcatcatcatcagataaacaacgatgatacatgcgtgtctgttggtcacatccaggtggcttggcaagaacatgatgatacatacaacaaacgtacaacaaacacagttttgttttttccaagcagacaagaagaggcatacaagaacagaaactaaagatgtaattgcacaggagaacacagaacaaagtcgggaaaagtagaccgcaagagaagctgaatatcagaaaaaggttacaatcattctggcatcctcagcgtcaatcctggttttgttttgttatgaaaatgctgaatcgtcagtatatttacagccgacaagaacaaagagaactgtcgaacgattactaaccgactcgtcgaggtctgtcgcgcttcaagtttgcgccatcttcagccagcatgaagtatccatagcccgccagactgtcctccgggtcttccatctcatcttctggttccatgatcttgggagtcatggttcctggtgtggcgatccctgataacataacttctctgatgcgttctctgtcgcgctcggtaggcctgtcgatctgctcggaattggtcgatcggttggcttcgaggtagagttgtttgatcatgcgttgtgtttcaaggaagacagcttggagcgtgtctaaaaatctgtgtgtatgaatattagaagataatagagtcagcattaagggaatgttctcaattgatcgacaaataggagggaggcggaccgtttggtttgcagatgtttacttgctgcaacaacggcgatcccattttccttcacgatataacccaatccgaatccatcggcagcaacaggaccaaaactatcatacgaaaagccagtgacagacaaacataaatgaactaggcggagaaagaagagacggccgactggaagaatgtacatacccgaaaagtctcaacgccgggtttccgcaattcgaagtactcaaaattgaagtgttgagtaaactccacccaggatctgtgaatagggaaggaatctcgattctgggtgattttccgttcacaggcgagaatggttcatctgaatctgaagctgatgatccagaattggaagaattctccgatcgaacttctcgttgaagaaggctgtagagggcatagagatgtcggtcttgacctaatcctttactgcactgtttgacgataagatgcctatatgtttagactttaatcccgaaatcgcgacagtaacgaatatgagacaaacctctttcgtgagctcagtatgttttttgcatgcctctcgtaatttagaaatcttgtcctgtgtgctcgctcccgagcagaacgcctgcacgatcaacaatagaacaacaacatatactcaacgtgagtcgacacccacacaattaggtttgagaaggagatagagaatacacgtactttggtaaacgctacactagcaggttgaaccgttcgaatggcttctgtccgaccatgaaggaacgctttcgtcatcgcaggttcatacgtcgattcaaaccgacctgcaaaatgatttttggggatcgaaaacgacatctttatcaatcgtcaagtttttggcagattcctatttgtacagaagagaagagttggaacggaccatataatgaatagtaagccgcttggaacgccatctggacaaaggcgtcggggctaaatccatgtcgagtgactatataagtgccatcaatcagtcggttgatactcttccttcttaatagtgtcgactcaactcactgaaatcttttccatatccactaaactccaacgcctcgatatcgttttgacagatcaaatcgctcaatcttgtctctgcgaatcgtatacccgttcgaatctctcttgtcagatgccaagttaacttcttgggaacaacctcatagtcttcctcttcttcttcctgacaaccgttggtggccgtgccggatacaggagacgggggcggtttgaatttagtttgtttgtttttaaatgatttcgaatgtggagaaagagatgatttgaagagtgtcggagctgaagggttgatactcttttttcaaacacgtgaacgagaattagtacttggagtcaaatgttaccacacatctgacataaacgaactttggcgaatagaagaacgagctcggtgtatacatcagccgcatatcgaaggacagtgtctatgttgagaaagatggtgtaaacaatcaatcatcatcacgatatcgcaagaaaactacatgtactcacgaccgtcgactccggtatgttcaaagttgattcctgcttctccgtttgcacatacgataatttgaagctatgtgaatcacaagcagtcttcttcatcagttccctgtagattattaggagtcaaagtggtttctcgtataaaagcacgtactttatcatacctagattgatatacgcgtaaagccagaatgaatcagccttttatgctttggccgattatcaattcattcgggatgaaccctaccatctgtttgtgcaagttcctgtttgaattccaccttctaatctgtagcttccacataagaagtttccacagatctccttcgcgcctacaggactaacgtcatctaggcagacgatgaacaaagcgccatcaacaacactcaaacatttggcattgtgtttttccctggttagaaccgttctgagatgcgaccaaacctttcggttttcggtcgaaaggactccaaccgaggaagtagccacctataagagtcacataaattaatgaaaattctcaatggataacaataaaatagaacagagaaaacacatacgtctcggattggcaaaatatcagcatctttacagattgcctcgagattgagcatgacatccctctctgtgaagagcggtctgttttctctatcaagcacgtcgaaccagtctgaaattaccggacatggaaagcaggcgcgggtgaatacggcgtgtttcggagttatatcatgaagggagtgaccctagacgtacagaactgccctcgtctgatcacgacaatatgtcttgattcctcattggtgaccatcttacatcccctatttgtcggaatacgactcgttccaaagagctagtcacccaagcagtgtggtatcagccagattgcgcctcgaactgtgtctgaataccatttgaagggagttcgccatactctggtgtattgactcatatcgagactagttcctcttaccgcatccggctgaagcgtcccagctcgaagatcgtggataaatccaagggaagagatgatcaacgaagatgctcgagccaattgagagcctctcgaaggtgttgggtcatcttccagtacaaagaacgggttgagggacaaaacaacctataagaatcatcgtacagcacaacattcagttttgtctttgcctgagcgtcagtcaaccacgtacactacaagaggaaatgttggacgaacggattcagactgattgagatatgactcataccagaattcttcgatataagaggagacgccttcattgtactgcataagtttctcctgtagcctggggccttgggtcggattagacaagaactcggctacgacctgttttgtttgttcgtgttctcgtgcatcctgtatgaagatcagagtaagaataagatcatccgttccatataatttccatcgttccgcttctcggtcaaatactgatgctatgaaagaaggtctcgagagacagacgacatcgatcacccacctgaagaccctacttgacgaaagtcggacgaaattccagcaagacccaaaattacagataaaacgaattaataatcgatccatcttcaaaatatgctcatctcagtagagagtcatagagaccagaaaagaaggttgaagaactcacgagcagagcattcagatacctcttcatcgaatcctccaaggaaggaaccggaagacgagaaagagtcttctgcgctttgaaagtaatcgagctctcgtcgtagaacgatggtgggggtgggacgaggtttgtcatttcggtgctcgtttgtatgtacagttcgtgtgctttcaaaaaagaagaagggatctaaagccaacgaaatggtcgcatggctttataggcaactcttgatctctcggggaaagaaggaggcgaacgagtagttggcagggacggtgaatgatgacgcgcaaggcaattgtgagaggtcacgtgtcaaaccggagaatcccggtccggtccgctcatatcggtcagtattcgtcgggcaaatcaggaagaagccagttcgtatctttatctacctcgggaatccattaaatcaagaagtacgattgatcaagaaacaacaaagtagtctacacccatgttcataaacaaaagcaaacaaatccaagactgaacagtccggatgatgctggaacagcgaagagaaaccaaattatcggctgtcttccgccttgggcctcggcacaactacagccccatcctcatcaacctcatcctcctcggtgattgccccggactctctcgcctcgccactgatagcaccataggtcgtttcgaggttgctatcgttcgtatccgaatcaaccgatgctacttgagagtagagcagaggtcgttgctcggtggactccctgttggccgtcgaggctgaagtgatcgagctctcgtctagtgaggctggaggcgataattcgaccagcgcggttagcatcgtctctctggtcttgtctgacaaatctcctacagaatcagccgtgaatccagtcgtcgagataggtggcaagactgcgagaaaagggaaaaaaaaggaacaagggggataggaaattaaattcagccaatcagtcagtgacatgtatagagaagcatagatccaagcagaaaagactaactctgcaatctcaatacgcctccgttcattcgggtctttccatcgaagatgtggtgatagttctggcagacaattggaatcacaggcacttgagcttgaacagctagatggaaagccccttttttgaatgggagcagcgaggcattcggtgtggatgatcgagttccctctgggaagatgaacacagaaatctgattttgggataaattaatttcagcaacagaatcttcgaggcatacatcagaaatatctcacctgtttctttttaatctcttcggccgctcgactcatcgcctgtatagcgtttttactcttctttcgatcgatccaaacagtgcctgataaactcactatgaccaaacacaagagaaggtacatatcgtctgattagtatcaagaattcgaatcatgttggcaagagaaagagtaatcgagcgcgtactccaccatcccaggaaaggcacgtaagaaagctcctttttggccataatagatgccttcttcgggaacattgctccaaggtacagaatatccataaagcttttatcggagagaagaaatttctcagacgaagaagatggattgaggaaatggataacgagacagggacgaacctctggtggtttccaacaagtacggctggaccaccgttgttctctaaatgttctcttccttcaatctcaatcttgattccaagaataggagacgtcaacttataaaacgttctcgccacccaatagtttgtatttaatctctgtgattattgtatttaagggtggcggaaggataacatgtatcacaaaacaacgcgttagttgtcagaaccacagcaaagctaatcaaaaccccgaaccaggtaatttggagactgacctggccaaacaaggtgagcgtaagactgattccaatggccacagcgctggttgttaagagacacaacgtgtagatcgacaggttgatgtaatatctggctttttgtctaagaagaggtgaatcatgaaaaccgaggagcaaggagaaaatggctgccaggtcagtacagccggtcggaacctcggaacggagaatatcctgctctcgccaactagctcagttttcttccctctactcccttcctttgcatctagatatcatcccactcgtttgagcttatcggcaagacttatggaagctagacctcaatcctccgaaacggagaagatggaaacgtgacaataacaaaaacgaaagaaacaacgcttacgatttcattctgaaaacgaaaaggattgggacggaaagaagactgagtgtagtgaacggtttgagaagggttccgaccaaggtcatgcttctgtttaaatctcttctttcttgcagcagactatagaaagggtgaataagctttgtttgtgctgataagtaagatagaggagagagcaaggtctattgcgaggttgaaagcgttgaaaggttagtgcagaagaccgacgagagcgagtgtctcactcgatggggcttcctccttgtgatgcacgtgatgtgtgaagaatgtggcgaaggctgtgtaaaatctttcacgtgcattatacgccccacgtggccgtggattacgtagagcctacacggcgtttgaacttattgctggcccggatggagaacgaatcatagtacggaagcgcacaagacttagacatcaacaacaacttatccatcccttcgcaggcaaaccttcaagatgagtacggtcgagggagacgtagatccggctgcttcgaatatgttctacccagacttctcggtaagagagaagacttgatggctttggatcaattatgaaaatagccaagacttatacaacttctcatactgccgttcttttcttcgtcagaacttaactctcttgccatacctagcttgtcatcctcatccttcttttgtccttcccagtccaagagtacgtcattgaaggttgagacaattaagttatatatgttgatcttgtcgaccatctctttcgtatcccggcactctcgctctcccttttcatgttggctttcctcctcgtctgagccaagcctggtatcactttggactaatccggccgcgtcggctgctagtttagggaaagatttggaaaccattctttcgcctctagatcaagctcgaatgaagtctttgattctcgcgcacgaccaagacctcgacggcgttatctctgctgataaagatcatacaaccaaccaggctatggccgatgccatatccattccctctgttcgagcaccctcttcgattgaatcttacaattccttccaagatggtaacaattccatggacgggaatgaaatggatatcaccgtacggcttcctttatggggacggaaacgatcatacaaagtccttctagtctcgagcagtcatcctagctttctcattcttcatcttcatccgatatctcgcccgaatagtcacaaacccaaacccaaggccaatgaaaaccactcatcctctgtcaacccggtcgcctgggaggatcttcaacaactcactggggatgagataacatctaggatagaagtcggccagggatattcgagcgacgggaatgatgcgcatacacctatggcggaagaacatcacaaattactgacggagtcaagtatcttgatggatagttggctagcgcaggatgcacaagtgccggctcccccaactttagtaatcaacgagaaatcgaagaagaaactggaggagttcgattgggcgaaccatcccttaggaccggtgggtgattgttcatgattcagtgactgaccgatttctcaagttcacactctttctcattgattttaaatccttccaagagagacaaatggccggtgcctctagtcacgactgtaaacatgcttctttccatcacagattcctcctacatttgtaggtttcatttccatacagtcgaccttattcattcaagagatcaaatcttaccttctgatcctctctccttgataatcttcgggccgtttagggtggtcatatggcgatgattggattataatcagtgcgcgattgatcctttttctttgtcgcgttcgtggtcaacatcaacttctaatcatatctagccttgttttcctcgcagataacgacgcttatggccaagacttaaatgagaatcattttggaagttttgcctgtaagtttactcactgaatagcctgaccgatcatttgggtttgccaatggtgaattaactgaacaatcgtttgtgcatatcaatgataagctgtggcctgggcggatgaagtacagttcttcttgcatggttttgcgtgaccaatttccatagcctgacttctgacatcattcgtgggttgagcagaactggatggttgtcaaacaaaaagctttacactgtcaaaaaacaagaacaggcgtctctaaatcggacggttagtcatctgttccgcctgcatttgaatcatgattccataagtttaccgttcatttttacctctgtacatcgcacagatacctttttcttgaacggcatggagtgaggatctttgtcttattttctccatcaagatggacgatgggaaggggcgtaactcaatcttttctaaaaacaaaatgaaccaacttgttctcaatagaaaacacttgacctggaaatggaccccaatcgtctcgggagatggggaatgccgtaagttctattttacaaccttttatatttttttcactcaaacccctatatgaaaatgataagttttctcattcgtttgttcaacaaactttcagatggtatcatggttactactcatgacagcacaggcaaagtcttgaacgaacgatggcagcaaacatccagagaaatcgttcgccgattgacacccgcgcgtactatttccgaattctgcggaagtctcatgaaatctctcgagattaatgaacgagattttccttacgccttcctgtatcaactccgatctgaaaccgcctcgggggagaagacagatatatcagtcgaagcgaacctaactttagcaggaagcgttgggatacccttagaccatccggtattaccaagatcgacattcataaagacttcgttagataaaaattcagaaaacagagatttgacaccgtggaaatttaaggaagcaatcgaggcggctttccactcggatgaaccaatctcattaccggacgttcatgtcaacatacctgaggaaatcagatatcgtaagcatgaacctgatccagtctttctctgatgttcatactattaaaatttcattcatgatacaggttcttatggagacgagaccaaacaggcggtcatcatgaaaatagcaaacaacgaagaacgaagagggaagatctttttgtttgtcccgtttcgatcattcatcatattcgctacatttaatggatctttatcaaactcatgtttgtatcggaaacttttctagcctcgtcatcggtctcaacacccgtcgaccattagattccgcgtacaaggcccggatagatgatcttagacttcaacttatctcaaacttgacgatcatcacttccttcgagtctcatatggacagagaacttcagctgcaaagtatagagaaagcaaaaagtctcttcttcagctcagtgtaagtacaccggcctagccagatattgatcttgacaaatatgagaagtctttctcaactgacttggcttggacatcagatctcacgagcttcgtactcctctacaagtttgtcataaatttggctcttctttactatagagtagaagtcttctttgttgactagacttgtttctttttactcaaaccattagcttatttccggtccaatttctgatttggaagcaggagagagcgatccgaagaagaaggctagtttctctatgattcaacgaaattcgacgcgattagccagacttgtcgactccttgatggattttaggtatatttacctccaaatatcgccgagtggtatacgtatgtattgagagactgattctgatctgacttgtgaaactcttaatccctattctctaaagtcgtatcgaaggtgggcgcatgtcaggtcggtttatcccgattaacttctctttgacaactatagaattgtaagtatcccaattctgttcaatcccttcacagatgcaagactgactctcgtccattgagcagatccgaaatgttcagatcggcgatagaacgagtatgttgatcaatcaatttgcagtttgagaagattgcgtcagtcattcataaagtcactggcccgttgcttctgcctgtgtattcaaatcatcaatcaggctcgtatcacatatgttgttgattgtgaagttgaatctggtgcacgacctgtctatgttgacaaggtaagaaactgttttgatctatgcctggcttgtattcgaacctgttcattgtgtgtgtattgctcgatcaactaatttacattctgtcgatataatcatttaggagttgtacgaaaagatcgtcttcaatattttgggcaatgcgttcaaatacacactccgcggttcaatcactgttcgcgtgtatgtctctgtcttacgcatatacattctttgtttccgcaagagctttggctgattgaaataacattcgatattctttgcatgcatcatgcagctctcaccatccttcggaggtcgagctctgcgtcaccgacacaggggtaggaataccaaagcaggatcttccacgagtcactgaacggttctttagagttacgtgtacagcacgatcacacgagggaactggtaagcatctccttagcctcgctaagtctcggaagattgtctttaggtgctcatcatttgagcgatctgacaggcatgggccttgctctttgctctgatctggtccatctacattctgggagattgcagattgactcagaaactgaagaggaaagcccaacaggtgaaagtggcaccacagtatctgtcttcttaccttacggcaaaagtcatcttccagcatctcaaactagcgaagagattgattcttccataaatctctcatctacttactccaaatggattgtcgacgaagccgttagatggtccaactctcggaacggaacatcagcttcggtttctgagagtggattatctgcttcagaggtactgaatctacttgttacagcttcttgagattggcaatcgttgttctaaatcctttctctcttctggatattgtgttgccatatcagtcgtccggacgagcagattcactctattggaataaatcatctgatttggtactgattgtagatgattcgtaagtcactttacttttctctttgatttgtgcggagtaaagttctgacacaacaatcgtgtttgtcaacaatcagatctgatatgaggtatgcactcaagaaaaacgcctgagtgacttatatagaatatcgatctcacgcgcttttctatctttacgttctcgtgatagacaatacatgaatcaggtaagttttaagtccgtttgcatcctgcatcgagttacgtgtgggtctgataatctacatgaatcaatatagatcttcagttcgttctgtaaagtcatcactgctcgcgatggagaagaagctttggcacttgctcgatcagcgaaaccaagttagtcgacgtgtattcaaacgtaaaatctggtcatcaagctccaagacttatgtgctttaatcttcatctagatctcatattgtccgatatatctatgccaaaacttgatggctacggacttttgcgcgctttgcgcaaggagaatcctgatgaagacgatattgatctcgcgttaattcctgtcatccttatttctgctagagtaagcttatttcttttcttcatcgtcagctcaagtgcacaaagtggctcattcacgatatcgtcaggccggtgacgaggagcgagtatctggtctgctggcaggcgcagaagattatcttagtaaagtatgtgcaatttatttcccaagatcccgttgacaaatttatacctaacatcaattttaaatatccctttttctggtcgtatcaagcctttctccgctaaagagcttattgctcgagctcatcttcagctgcagttgggcaagagcagactggagctggaacgcaacttccgagaacaatctgcggctacgaagttattgtccgatgcttcgccggtcggaatttctcgatggaatgctgatggcgagatcatgtgagtattaacaccttcaaattgtctttcacacaaaccactgaaccggtcgtcgtcctggcccctattgcgtctatgatgactagctatggtacgtgaaatgacttgactcagaaatcacacatattacattttgtctaattccgttattgtattctttgattgatagtgaatgaggcctggagaactcaaagcgggcatccaagggataaagatctatctctgtggttagatagtgttgcagatcatcacaagccgtatcttcaacagagtgagtcttgtcaccggtcgttcatataacatgttaaataagtggtctcaacagttgacctctggattccttagtttataacgagttgttcctggagaagaaggcttcaagttgggagtgtgagtccacgtccgtctattgcacaatcaggtgctatcgaactcattgtacattcttcttgcataacgatagggcaatgggcaaatggcacttggtcattctgccaagctgtgatcatttctagtcatactcaaagtgtaaggtcttaccaaacggtatcactatgcaggcaggtcaggtccttttttaacaaactttgaatttttggtgcattaaacagctcgtagggtaagtgtcaggcttgattgaacataagatcgttgtttaggctatctgtgacgcctttatttgaaaaatcacagtacaatatgtgttttgacagagtacatatcatgatcttgctcatctgatttgatatggttacttattgtaagactgacaatattttgtgtatatagcgttaccaaccagaagcgcatcgaggaagagcgaaaacagaacctgttacgtgccgaagcagcaaagcgagaggccgacgacaaaaagtgcatataacttcattaataatcagatttgaaagacagaagctgaacagaaacttgtttgattttatcgcagacgtcatcaggagtttttggtctccgtcgtatctcacgaagtcaggaatcctgtatctgctatattgcaagtaagttgtactctctccaagatacattgacttctgcccaaatgagctcatttcttgtgtatattggtagtgtgctggtctttgcaagtcaaatttgacttgtaagttgatttcgcaagtcttgacaaggcacaaagtcctggaatatccttgctcatccttacatccatattttctcgtctgcccagttattcggacaggtacgttacaagcttatatgacaatgaaagtgaaactaagtagcttgatcgatgcataacagaactcgaaacagcgctgaatagcggcaaggcttactttcctacgagcgaggtaagctattactcaatcatgtttcaactgtgtctaaacgcttgatcgctaaatgcttcgtcctcatcacagctaattaacctcatcgatgaggatgtagacgccttggaatctattcaccaaatggtatgtcgccattctatagcatcaaatctcggtcatgtgaatgattttcagaatatcaacttttttctcaatctgctattcaggctctctctcaagaacgcattgccaatgatgttctttcgttgggcaagattcaacttgaaagtcttgagatcttcgccacagatgtcaaccttcctgacgagtgtcggaagattatttcagtgtttgaaggagagtgtcgcatgaagcgtaagtgttgtgttttccgactttggatctatgagccgcagtctagctcacagttgccgattcggcgaacatatcagaaatccgcatatccctagacctagttggagaacttgccaaaccggacggtcaacacatttatctcaccgatcctgttcgattcggtcaaattgccattaatctgatctccaacggtaggtatttattgaacacttagccttaaaacctccactgacgaccctgtatcatcactccctaaaaggtattcgatttacggataaagcgtcgatgcaccgccgtgagatttcagttagcattgaagttgccagcgctgcaccggacgacgattcgtgtcgacccccgaaaacaagcgtacccgttacacctggatcaagctgctacatatatggagcggtcactgattctggaccgggtctgactccggaagaattgactagactctttcagcgattttctcaggtaaatcgcctcgatgatttgccctagtattaagtttgtactgatgcctcttacaaatatgtttaggcatcgtcctctacccatgctgtgtacgggggtagtggtttgggactatatgtgtgcagaatgataacttcggtcagtctctcatttcaagacccgattatcaagaatgcgagctgacacttatcggaaacttcagctcatgaacggtcggattaacgtagaatctgtgaaaggcgaaggttggctcttatccctgctcaatttatcacgcggattctgatcttttctcaacgttgttgtatcctcttttaggttccaccttccggttctttatcaaagctgacgcgcccttgtcgttccaacatccccttaagccggtgtttgcttcgagtgtgacaaccaaggtcgttcagttacatatattagttgtgagtttctctcaagttataaatacgagcaaggtaaatccctgtctaactgatcactaatattgatatattggtgtcttcaggtcgaaggtatgtcgatttgatccaacttgctgattgttttgagtcaagtttacaattacactgctaatctatcttatttgatcaaagataaccaaatcaatcaaaaggtacactccagatttaaattcatgatttagaaatttcgtctaacactcagctgctttctcttggaatcaacactaggtcttgcgaagacagctcatgaaagcaggattgacatgtgaatgcgccgatgtatgttcttccttatccccaaaacaatactcacttacttgatgaacccctcctaaagggttctgtctttccgtgatatttgcaggatgggaaaatggccttggatttgatcgttgcgtcccacactttgggaaacaagacctttgacgctatccttatggatcaaggttcgtctatttattcattgttgccatgattcaagctctgtctgtttgataaagacattgaacactcgatcgcttgaatatttaaacctatagaaatgcctgtgatggatggaatcacttccgtgacacacatccgaaaaatggaggacgatggcatcgtaagtgtttgcatagaagatgcatatatcgaaatttcatattgacatatatttttcctcgtctgttgtcttcagattccaaagagagtgccaatctttgcactgacaggaaatgctcgaaaagagcagattgagcgtatgcttgaggttggaatggatgatgtacgtcttgtccatattctttcccgaaagacattgaagatcttcggccgctaatgttgctcttggtttcgtccttgtcttaggttatcatcaagccttataggtacgtgtcatctcaagacagtttgatttcacaacggtctcattttcgaaaagtcttgtttcaactgacccttctctcaatcgcggtcaacaggatcaacgctctcctagataagttatgcactctcacctctcgacagtcttctctacattgtcatgcttctagcaagcagcagcaatgagaatatatttcagtctattcccaatcatgatcctttcacttcattcctaatcgtgtcttttcgataaaggttaggctgcattgccgtaaaatataattactcgttttatttaatttatcatttgctctcgttttgtaacaatactctgagaactcctcggtgtggattttgcttcctcttatcaaatttcaacctttcactttctacttcactctcgcgataggcaagtgaattttgtctctatgattactatacggacagaagttacacatgtagatccattgttcgaagctgataaatctcaaacacggaggttcctatcccccgcggtttgatgctagcttgttgcgtatacttcgaccagccgctcgtttcaacaattttgattggcctttctccctagcaagcctcatgatttctctaccggttgatcctaaatcggaagaattaccgtgttcgtcatcaaattcgtcttcgggttccatttgaccctgccgttgtcgttgattgtcgatgtaaggtgtggtgggtgaagagagtccgacggttgaaacatatgttgtagtcttgttttccgtgctgtattttgcgtgagtggaggatccgatgtggccaacttcatcatgagtcttgaaatcgacctgaaatttgacaacttcttctgggtgttccagcgcatatgtgaacgaatcgtcatgctcgacttcctcctcctcctcctcttcctcctcttcgtctccctcctgttcttcttgttttggatccttcccttcttgcactcctccctcattgattaattcagaaatgaatcgatcgattgatcccggtccactcttcatttggctcacctcaacagaagagcaatcaaatgaatcaccgataccggcttccagcacgtcctttatcctcctcctaaacatctgcaagctaacctctgaagtagtaggagtagatgtcgataaggctccttgaccgaactcagcaatcaatgaggaatttagcctgaacgatgatctgtttctctctcgagaagtgaaagaaggagtgaaagacatgcctgcgctagggctgatggttactggtccagctttgatcgcccgcccggaaggtttagagggagaaggagacttccatgtctggggtacaattgtcggcttcctggtcactcttgatgagagaaagacggatctggcaacgcaaggcgatagatcctgatcagaatctgatcctcggccgtgatatttatatccgctttcatcatcacttccttcctcgccatcttttcttctattgtcatcttctacgtgatcattgtgaagatagtgcttgagtaaaggattcaatcctgccgagagagagggctggtatatcactcgagggaccgaactcgtcaatctagaagcagtcccgaatttgacttgagcctcaaggtttgacgaaattgaaagatcacctgattcgtcgattattgatgatgtcgctgataatgacggtgatgatggcagagatgaagttaagctatcggcttgatcagcctcagttatcggaggtgtatatgtagagatgggttcaaggatatgatgactctgaggtcgactctgacgaggaggggtccaaagggtggaataagcagaaaacgaaaatccagaaatttcatccattggactagaaggaagtggaacgtccattggatcgatgataggtgacggttgcgccaggtataaagatattgctatcagcttaagaggaagagcttcgtgaaggggctggttcaaagaagttctatgcgggctgcaagaagacgaaggagacggcgaagtgtgatagggcaagatgggacataatgatttaagaaattcagggtttgttgcgttgctagaggtggtgacggtagaggtagaatcagaggtggcaatacagaaaggattgacggcagagagagcagactgggcgtccatggacaaccatctcgcgcgagggatatgaacgtaaggatcttctctagggctgacaatagggtcgatcagagtgaagatcttctgattttgagattctagcctctctttgagaggaaatgaccccgagtgttctgcattctccgacgttagagaaaagtccaatgaaaacaagatcgggctgaacgtttcatgcaattccaatctcggaggcaggtcttcattcctatccttctttgccggtgccccctctattccttcatctgatgatatgatccttgccaaatcatactctagaccctttagtggcgagggatctatctctgattctgaaccttcgaggaacccgcttgtgtcatagtaccttccaatgatttgcgatctccaaatcgaacctggccgatcgagctgggtattgataggtgtcagcacggtcgatggattagccgacggttgcgatttcccaactgtcgtcatatctgtttgaggcgaagcaccaactgaagaaggtggcagagctgaaggtctggatgctgaagaataggaaagagctccgatgggatttgacattgtgtgttctatcggtttgggtgattcatctattggaaagttcggaggtgtcggatctaggggaggaattggaataagaggaggcaaggatatggctgaggcgatccgtctgggaacgcgtacttgtcttctgtacccctgtcttgcccacgtcaatcgagtttcagaaggtgccaatatagagtggccactcaagtttgaatttgcaaccgagttgtcatcaagtttttgaaggctgttggtcgggctcgtgggtggagagcattcgatggtgggtagacggctatcgagatcgaatgacttggatggtcgaaggccgtgtctagataaccttcggttcataattctattggagcgcacgatttcggggactaggatttgaaataaagttcgcagactcatataaatcattaggaagaccgtgggatgaataagtgaagagaaaagaacgaacgagtctgaacatctaggatactgttctttttggtcgatgaggttgcattcgaaggatcagcctttgcgtcaaacccacgagttccctcatgagtttctcctgccttggacccaaatgagatttctcctcgacagacatccaaaacctccaacctctcctcccaactgacaccggttttactctttctctttttccaagcttctctctctctttccgctcttgtctgttccatccgactgttgattgactgttgctcaaaggatagcttgcctaatagcggattttgtacaatctcgatgactttgggaaggtctccgtcgagattggctggttccctaacattcaagccaggtggagaatcgagtgatagacctggacggatgcaagacgaaagacccggccttctgaatgtcgactttgatgccgtcgaatgagaccatgactgaagagctcttgctccattcggtcttacctcaacattcagatcgagactggtgaacaaagacgtcgatacgataggagattttgtggtcgatccgagagctttatgtttcaattttgagaaggatttgattggtcgaagtcgtttgatggactctgaggagggaaggtatgacttgagcctagtcgtcagctttaccggtgttttgatctcatcgaccgatccagtggtgtggtaagtttgagtttggacgaggttttggaccaagcgatcggtgagaacggacgagttgggtagagacgagagtacgcatattgaggaacgacccaagggtgatgttttgtggttggcagaagagtctgagaacgacacgaccgaaggtggttgcagtattggaagggaggagaattgattcatttgttcatatggagcttttgaagaatattgcagagggtcgagagcagagtgttttggacaaaagaagactgggcgacggtcgtttcctgaaattacttcttgtgggatggatagggaaacgagagatcacaacaaacgaccaagtgagagccaagacagaacgattcgttcaacacaaacacgcgacgcgattttagatggaagaagaggaataatatttcgccctgatcggtcgctggtcaatcagggtcctgaacggaaaggggatcgaagaagagggaggaagtgagactaatcaaagctgacgatccacggacatcgttagtttgtgatagctcatacagtttaggaccagatctgcaagagtatcatcagatcgttagcaagattctgttagtgtgttacatggggaaagttggtatgaagcataggtaggaggaggacacgaaggatcaagagagcccagaggacgagtcagggcggcagagtgagcgtggagaattcgaccaggttctgaccgtcagctgttggcagattccatgctgcttgacgatgaatagagatatctatctacagtgtccttttgcacctctgcgttcagttaaaagaacattcactgctcgaacacgatcgatcaacaaataggccgggtcagtcaagatgaagaaagtcaatcacacaacagtggccagatgaatgaaatttggatgaggattagaattgaagggaaagtcattacgggggatcgatcgatcagaatacaaaatgtgatagggaatatgttaggagatgtattggggaatgtgtaacgatgtgtattagggaatgtgtaggagaccaacagaaaggtggactatgatatgcactacaagacgatctagtgacttggcacgagtcattacagaatatctactagatggtctatcacaaattgcataggacagcctctttccatgactctgtggatctgttcattatgaagctcacctcaaactacactatgtattgcactgaagacggattgaagatgtgcacacatttgtgtattcagaggcgctattgattatactgctaagcgaggaaaccgcccagctcgataaaaggtttctaccaatctgtggctcagcgggtacatcatactatccatcgagaagtcatactatagacttgactacaagatgtagttcaaaccaaagatacagatccaaatagggaatctttgtagtgctaaatacagaccaaattaaaagtgcagaatagaaaatcggaccaaaactcattagagcacttactacaaaatatcttcaaaagtgtattaaactgattttgattccgagtgccgaaacccgtgcggcccttctcgttggcgtgttgagctgatcgtcccagctgcactcaacatctctcccttactctcactcacatctatccctttcttctaggtcttttcttcttctcatctcattcctctcacgatggcgtccaatttcattgggtaaagatcttcttgctctgttttcgcatgttgtgattgttctgggagatcggctgactctttggtcttccatcatctttttttccttctctcgctttttttaccttctcttattggcgtctcttgccctatatctcatcttaaacacatccatatatgtcctctaatgcatccagtgcgatcatcaccctcacttccgtcagtgacatccgttacgttggacggctccattcgatcgaccatcaggaaagcacaatcagtcttgagaatggtgagacaatcttctactttctcaatcgcttctttctcgtgtcatatcgaacggtctgtctctttctcccatagtctcttccaggggtactgaaaacaggaagcctcaaaacgaatacgttcctcccaacgaccgaatttatgacttcgttgtcttcaggttagcctttcctgtgccttttccccgttcgtgtgattgtcgtctaaactagatacatcatctgctggccaaacttttcaattgaacagagctaaggatgtcaaggatctcgccgttgaacaggctccaccacctgtgacaaccgcgtcggttcccgatgaccctgccatcatgggtgtaagctcaatcgacttttcaaaccctttatcactccctcaatcccattgcccacgcctctcggtttgctgatccgtgcctgaatctttcattatcttacagggtaccactcaatctcgacccgctcctcattccccttccaatactcaggcttaccctcatcctgcatctccctacgctcaacaccctttagggcccggtgggccctacggtggttaccctatgcctgccgggagacctcctagcggaccacctcccggagctgcgtggggacctcctcccccgcatgggatgtatccccctcctcctcctcccggtccttacggtggatatgcgatgcgacccgggtacccaccttcaccggccggtggaagtccgctgatgccaagaggcgtcaacggagcccctgttccctctcctcagcaaccggctccccttcctacatcctcggctgtaccctctggttccaccgctgcttctgctgctccggcagcttccgcccctgctacccagaacgcgccaccttcaatcccacaagctacaaaaccgactgctgctgaagtctctattcctaagtctgccccaacctcggagcaacgcaaggatgtccctgcgcccccgtctggtcctcgatctcagcctcctgctccttcttctcctgctgccgagaagaccatctccgagcctaaagccgaaaacaaatccgctgcttcggttccggccactgctgctactccttcgggtccaagcgtccctcctgcactgatgcagaacgccgcccagtccaatcttgacaagattgagcaggctcttggtcagatgtccatgtctgcggctaccggcccggttggacccactccaggcaatggtcttccttcgacccctgccgccttgcctcatacccgttcgggtggcggtcgaaaagacgggaacaaccgaggaatccgacctcctcctccccatcacgcattttctaacggcggccatccccgcggaccaccgcatgctcaatcccagtcataccaacagccctcgggccgaacggtgattccggctgccgagtttgactttgccgagtccaatgcgaggttcgacaagtcctccgtcgccaaggaagccggtggggttgttgattctgactcggatctcgactctgatgattctgacgacgaagaacctgccgatccgtccggacgagcagccaagccgcgtcgacagagcgcgctctctgctggtggtggtgcggccggggcgaacaaggcccaattttacgacaagacgacctcgttctttgactcgatctcgtctgatctcaaacctgaggctgataacggtcgaccgatgaacgccggaggacaggttagaggtcgacagtggcgggacgaggaaaggacacgaaacatgagtacgttcggtgaggtcggcggccaggttggcttcaacggttcaggtggcttcaatcagggtggaggtagaggtaatggctaccggggaggcagaggtggtcgaggcggcggacgaggaggtcggggaggagggtcaggttggaacggcggagggtacgaacgacagtataacccccgggatcgataccctcaggatattcagtacactcaaaactaggcctttcaggcttattctcagtctaatccagacacgctttccaaagtaaacgcagccgtctgaaacgactcacgtttcagcatctcgttcaaatatcctcagccatttgtttcttcatatcttttctctgtcttccccattcttttcttttgggcgcgaatcatctcgttggaaatcctgactgttatcactctttttgggtagcacctcttctctctcatctccatgtctcttttctttatctattttcttccttcaatccgttcttcttcatgtccgcttgctctatatatctatcaaacctctatcaagctccattcacaaagcacagacgatggatgattgaatgaaggctttgagcaacctgtgcaaacacgtgacggaatatcgattatgtcatcatttccgtttcgccctagaccgagtttgtcagtttgcccggctgagaatcatcaaacgtctaatcgttcgtcatccatcagcgcatccaaagtttatcccctccgtctacataggttcgacagatcaccaagtcaggccagcagaagtacttagccagatagatcatcaagctggagaaatcagggaaataaggaaggatggggctgttgaacttgttgccgggcaaacgcgcgacgttcaacttgacggtgctgattgatgatatacataacgttccgctcgtaaatgggtctctctcgttcgtctctttgttttttcctcctttattttctctgttctcagtccagggcatcactgaggatgctcttgaatccaccgttgattcgagaggcatttgctcgggatctcgggaaaaaagagtcatgtcaaaccaagggactgacttcctcttgattgacttgtcgttgcgtacggatgttcatgccaacttgcattcgaggtagagtcagatggaggttcaagaagtatcattcgaaggacaccgaacgtttgtctttctgattgtattcttcctttgactgtttgagaagtgcacgaagtgcttaatccaacatccctcctgccttacatcaatcactatgtacggctgatataatcaccgggttgatggtggaaaccagtccacgaggcgcaatctcccactcctttgtctactcctcctccggatgaagatcaagcggccgaatctaaccccttacaacgcataatcactcttcagagaatgatcacccaaactcaaacacaatctcaaactcaaggtcttgctggtgatcaggccagcactcactcccgcgattcattcgattataatgacgaagacgaagtctcatcgtcgtcgtctatatccatctatgagaacaagtcctcggcaaacatatcagcttcatctacagacactcagtcggaaaagccagaaggaagactacaaggaagactacatggatggaagtctcgaacaaagaacctcaagaaatcacttttgtcttctgctacaacggccagacagggttcaacacacgatgagcaaagatcgcatgactctgcatctatcaactcttcgcctccggatttgttgtttcatctcgaagcaaattcatccgacacacggggcggtcctgactcatcagccacaggtacacacacgactactgttgaaacgggttcatcacgtgtgccctctgtatcgacaagaggccggggtgagaccgcaaagataccgatcggtgatcatgcttgttcttggtctcaacgtatcaggagcggaatccagataccgataagtcgggatggtgtgctgggagaacgatggttgaaattcatcgtcatacaggtgagcgccggttttgcgtgtgtaggtgtgtgtgtgtgcgtgcattcgatgaacgcgcgcgttgacaattatgtgtttctttcgcttcatttttaaccgtctactgtagcacctttctccgctggattcctcgactcatacggaaaaagacgtattacttggacatctagagttgaatctagccgaatatgcaggatccggtccggtcacgagacgatacttgctagatgaaggaaagacgaacgctacactgaaagtgagttcaattttttgttctgggttttctgccaacttctagtaacaaatctttcgtttggtctcctgatgacgattggatcgaattcaggtttgtattgagcttgaacaagttggaggtcaaagagaatggaatccgtatgtccagccgcacgtttgttcttggtgtttccaactcgaagacgcgaccttacctcttcgacatcggttgtacgcaggatgttaatcacgaaaggacaaatctcgggcggcggactagagtcacttgtaggacatgacaaaggctctttagcaggttcatcactctttttacatacacctctttttttttgcaaactttctgacctagaggacgaggcctgattccttggtgtttttatggggaatgctgttcgcaattggaacactctctttgattttcttttcaatgataggtactcctgtgatgtccagcgcaaacctgaatcgactctgtgccgaagtgagtctagttcgtttgatctcacccaggaagatgcgtactaaaaaaaccgccctctccaacaggcccgaccatcattctctagaaaatcaagcgaacactcctaccctcggccctcatcgctctctcattctaccaattcggccccgggtccatctacacctcctcttcaaaccctcacttcatctcacgtcccagcacaaagctcccacttgttttcttcctctaccaatccaggctcgtcaacgaatctccattcgttaggtagctctcttcagcatcatctactccctcactcgaaaggcaactcaagttcgtcctaccggaaatcacccaatcactcgaaaccatcctcttcctcacctcatcccgactctcaaccacagacacgaggtcgtcccacgatcgacagaccacataccggactctcgggtcgggacaacaagtcccgatcgtctgggttcgtggtgccgtcaagaacggaggatatcatcgaggctttgttcaatcctttcgaatcatcgaccttggggccgttcactgttccgtattcgcccggtgtcgtgagaaagccgtcggatgaagtgatgggcgaggatgggactggatatgaggcagagggaagtataggacacaggggcaaaaagaggacaggctggaagtcacatcataaagacaaggattcggctccgtctggtatgccaggtgcaataccggcaggagcggcaacggctctgaacagagacgaagacggagatcgaaagaagaaacataatagagagcatgggcctaggcagacatctgggaaaggctttggttggaaaacgaaggaaaaattagcttcgacgagtgaaattcggatgtgagagagggtttcatgtctttgatactatgagcctttcggcatcaagaagaacaagagcggtcgagccaagaatcatcgatacattgaatacaagaacgaatacaagaatatcaagaaatatgacaaaggagttgtccattcaggaaagtgatgcaaacaaagttgatcatctaggcgatgacggatcctccattgacgtggatctatagtgcaacgtagggacccatgctcagtatgcgtcggggtcgatgtcgtgatactatattcgtaaataatgtttcgaaaaagacacaggaaacttacacattgaccggagatgtaggatgaatcattgctcgccctacgagaacgattggacgatatatgtactgagcaagagggatgacatagatgacaaccggaaatgggagcgatagatgcttacaaaaagacgaagcaagtggcgcattctacaggttgtccaggccgaccgatctggaaccaatacgcgcatcaaacgcacccgacgatagtcgagaagaacaaagttcagcatgattgggagaggatttgacatgtcagacgaaagcgtaccggagtggtgattccgaatttctctagggactctttggtcatcgtagcatacaccaaaggcgtcacgatcggtcctgggcagacggtattgactctgatcttcttctcgctgacgatctggttgctgagcgacctagagaaggcgacgatggccccttttgtggtggtataatccaacagacctggctgaatatagagacgatttatcgaaagagtcaggctgatgcgtctgatcgggagaataagcggctgatcttacatgtccgataaatggattgatgctgagttgaagattgagcgaggagaaagcaatcaagatacatcaagaaacatactctcgatctgagaactaattcaattgataaagtacctagcattgaaaatgatcgatcctccctcagggatgtgaggtaaagcccgcttggtgatgtaaaagatggcattgctgcaaaactcgaggttgattagcttagggttggcagatcgggtatgttctaccaaggatggctgctcacatgttgacactttgagatattcgaaatatggagaggatcagttagaaatagagcagcgcatgtattacttcctcagtacgggactcggacacgtactccatgacatgcctccactggtcggaaggaagatcagagatatgttcgacctctttctgggtcgccgcgttgtggactaggatgtcgattcttccgtagacctaaggggcacggctggcatgagcctctctggatcatcaccggcaaatggaatggctatgaagggagcagattggagaacgaaccttgatggcctcatcgacgattgcctcgcaattctcctcgaccgagatgtcttttgcgatcaaatgacactttctgtggggtgcttcgaccgagatgatcgtctttgtgtcctgggcgtctttctcctcgtttggatagtaacacagcacgaggtcagctccctccatcgcgaacagaacggctatggacctgccgatcccagagtcgccacctgtggttctcgagttgatttcgcaaagataaaaaaagaagaagaagaagaagaagaaatgaatcagcatactcgtcgacttcccgacccttgatcgcacaaaagacgacaccccgaaccggtgatgagagcgatcttgtcgaccagtttctctgcaggcttgtactttcttccatcggcctgcttcagatactctggcggctgttccattctacattctttgccactatgttgatcagcggtccgtgaagaaacggtgtgcatcagtctgggtttatccatccgttcctgtcacactttatatcatgagaatgtgcctcggactgaatcgagagatacgaacggaagggtatcttgctgtatgacatcgggtctgtagccttgctcgaattgtcccttgtctgatgacatgctgtgggtttcgataatattcagtagaaagagaggatgaggagatcaagagatcaagatggttgtagatggggaggatcgatacgacgagcgcaagaagcaagaagagtcgtcaaccctgagacgtcaagacgcgtgcgcatacttacgtcatagatcatttgaatgtgccagcccaagatccttcgagtttgatacattgttcattcatctaatccgataggagcacagtccagcgtgcatcaaggtcgtaaacagggaacatgagacgtatagaagatgaaaggcgtgaagagggggttcgtgaagatattgaatgagaagagagactggattctaagaacgaaagatcggaaagcagaggaaggaaacgagtgcgccaggctggagatgatgagatattttaataaaaagatatgagatgatgagacgaccatgccatgtgtcaaacgatggattggtctttatccgttgagaacgagaacagacgatagagagaaagagagaaagagagaaagagagagagagagagagaggcgaaaaacatgatggaaacaaaaagcaaaagtttgacatccaaatcactcgctcagcgagtgatctcaagatgatgagatatttttgggaactttgcggaatgagcagacgttcctctttaatgagcgtgtcgtcgttgctgatggtgcgctctagatcgagtctccctcttggtcatcatagccgccatggcggcggtggaagttccgacggcctcaacctgaacgtagatcgtctgggtaacggtagcggtggcaactgtctcggtcacggtgacagctccgctcacagctgtggcagatgcgagacttccgttcaaggaaatggtcccaaccgaagtccagttagatcctgccgaggccattccactcatcgctgaagcagaagcggaggccattccaacggatgcggccgaagcggtgatggcaacattgttcatgacttgcgacatcacagcggctgtagacgaagcggaaaccacggcgctagaagcggcgacagcagaagatgcattcatcgtcgttgctttgactgtggacgacgtgttgctgctctgcatggctgagttcgaagtgctacctgggtaagaggcgtttccaaagtagggcaagacctgctcgccgccagaggcgacacatccaataaactgtgtagatgaaggttggtagttggtgaccatcggtggcacagtggatcctggaatggcaaaaatcgaatgtagaaaagaaaaaaaaagaaaaagaaaaagaaaaaagaaaaaagaaaaaagaaaaaaaaatcgggtcagacggatcaggtcacatcatagagaactccaacaaagattccatggtcagtactaaccgccatagggctgaacaaagtctacacaggagttgaacatttggttatcgtaaatcttgctgaaccagaagaattggaccgcgcagactccgggagtagtgcattgatcgcccagatcaggaatggtaacctcaaacttgttctgatcgagatcgggaacattcgggcaggtgttccagttatcgtatacggaaaacttgctatcccacgatttcagcatggatccgatgatggtgtctgtcttggtgttgataacggatacattcgcccagccctcatggtggttgccgatgtagtatcggagcgggagaacggtaccggccgggaaggtgtacaaattctccacattatcctcatattggaacccagtgcaaaccgtcctgcagagcgcaggagccggggggggggggggg

SEQ ID NO: 317 - DNA, 1345 bp, Xanthophyllomyces dendrorhous
gggggggggggggaggttgccgtgatcgatgataagcatgctatcagaacgaaggagggacgagatcgaagaaaagagttcttaccaagggcaagttgaaagataagggttaccgagggtgtccttgttgtttgaggcaagcatcactattgccagcaaagagaaagagacggcgtgagcaagatctaacgattgagctaccagtcaggccaaagacgaatttgcactcacagccattcttattggcgacacctaattgtaaatcggccagtttgttctaattagtaagatgatagcaggtggaaagagagctagacgagagctttgcgcttaccgtcccgatcaatgttaaactgagcgccacagacttctttggactttggtccggcctgccaatcgattgataagaccagaagagggagtttattagtaaatgatctgagcgcaacagagaacagacgagggacatacctttcgaatcatgatgttgtgcagagcacctgattaccgagagcagcgccttccaccgttagccgattaacggtgcgaagaaggggagagagagaggaaagataagaagaggaaaaggaaaagagaacggaccatgggcagctacctgctggacgagcagggagagaacggtaaggaacgagacaacaaacatctcaagccagttgggtatgatccggtgtgagtgagtgagggagtgggagtaggagcaagagtgaaggaaacgaaggtggaagggaacctggaacgctttggaaggaaagtggaagggagaagagaaggagaaagagaaagagaaagagaaagaaagggaggaaagggaatggagaacgcaaccgaagacgaaaacagacgatggataatcgagaaacaaaagcgaaaggaaagaaaggaatccatttgccgactctttatgggatcagaacgacgttccctcagagtgtgtgagcatggaagaacgagcgaggagagaaagcaaaacacggggatcgtttgttttgatttccgggtgtgtttcgtctggaggatggggaacgcgcacctacgctcacacgcgcactcgcttactcgcttgctcgctctcccctcgagaggatgatggacactgttcggtacactagcagacgatcaccgacgacaagctctggacggatctgtcacatgaagactcgaacgcatataaaacacggggtcaatcgaccgaagggacattccagactcgctcttttctcgagcggaggattcgtccagaccgaaaaaaaagaagggtgagcggaagaataaggaggggaaaaaagaaaagaaaagaaaacaaacaaggcgcttttttttttct

SEQ ID NO: 318 - DNA, 24771 bp, Xanthophyllomyces dendrorhous
gttgtcgttgtcgttgtcgttgtcgtcgtcgttgtcgttgtcgttgtcgttgtcgtcgtcgtcgttgtcatcgccgtcgtcatgatggcccagacctactcggccaacgggatctggatcacaaagcctcgtttcggcatttctcccacagactgcctccttgattgcccattcgtttcggcttctgtgctggaccaactgcattcatacatgtacatatcttgactcgtctgtctttcttgccccgcttcccaactttcacacttttgtccggctgccggtcgctaccgttcgttataacagtcatcatgctggagtatcatcttccatagtcgtcgcctcaaatgaacgcgtctttctctctgtctctgtccctgtctctgtccctgtctctgtccatatccttcttctcacggaactttgtcagatgccatggccaaattgatagtttgcgtcaacagatcgtcaatcgaacggtctctaacagatcacacactctccgtctggtccacccatccccggtatattcggcattccatccgatcccaaatcctaaaacacatggagatatcaataaagccagtagaataagtcataacgttcatagcgcagatcaaacaaatcaaataaggagagaaagaaggaagaaaaaaaagaagaagaaaaaacagacgcacgagtccttcaggcatatctcccataacctctttcggcggagatcctaaatcttgcatctatttcgtgcaacgaccagaccgacatttcaaaatggctgatcagcaacacacacacataaatctgacccgaaagaaataaacagaccttgcccatcaactctctcacttccgctctagtcgattcgtcctcatccgagaacccaggacgttcaaacaacttgataatctcgcttaccagtcccgcctgagattcgtacacatggagctgttccggcgaaatttttgatgcctccggtgacgacaaataagcagggtactgattttgttacataaagaaataacaaatgaaagtatgatgtgtttagggtacaaaacacatcctcacgcatagatgccaaatcatggcaaggaaaagaaaaacaaaaaaaaagaataaagagaaaacatacctttgaatttagctcactcagaggctcatacaagacctctttgctcatcagtccatccatcatgctctctagcatgccttccccatctagatccccgtcaccaccgcctaggccgcctagtgaagccaacaaggctgccagagggtcttcctccgagtcggaagcctaatcgcgaaaaaaacagatggtgtcacagaaagaaaacagaggccaattagtcaaagtacgcttcgaaagacagcttccaaagaattaaattgataagaaaaacaaaatcaatcaccttgttggtctccgatgaacgtttcaatctctccatcgtttctttgatgcccttctggaacccatcgctctgatctgccttggtcgagctttttgagcctgtctgcccagaggtcccttcctcacttgctttcgactcttccagtgcctcctgaaagaccctatcccaagcactcttgatcgctgccatatcctccggtgggatatctgtcggctcagccttcgtaggttcaccaccagctaactcttttaacagagattccattccttttgccaactcggatgcgaacgcatcttcgagaccttcctcgtcttcatctccatcctccccggctgctttcccatcggctcttgcctcggatgaggtcatttggcttgctatcgaatcagttggacgagcagaactggtggagacagaggaagccccgggtatagaactcggttcagccaacgaagggatcaagtctaggtaggcagaatacacggattagcgagaaacagaaacacaaggtccgacaccgagacgtgggtcagtcgtatcgtccatcgggaatcatgaaggaccaaagaaaagcaagaatgctcgcacgaaccatccaaatcatccaaatcttcatcgtcttcggcttccctctgtttcttggcatctgacggagcactcatcattacacgtatgcctatagctgactgagcttgttgagtagataaatataaggtagaataaaacggagagaacaaagtgtagaagatggtcgatggttgatgtccgaatgagatggctctctccctccaaaaaccgagccggttcaagccggcgtcttgttttgccggttcattcatttgcctcccgagtctgcgtgagtacatcccattcgtttccatccgccttttctctctctctcgcgcttcgatcacatacatcaacacagacgtagatagaccgttctgatcgtgaagagctcataagtatcgttacatgtttgaggtagatgctgccgaggaatcatctcccttttaaatccttcttggtatcaatcaacggaccaatcgcgaccacaccactaccctcactcggtggttcgctcccttcgcttccaccgatccctaacagatctctcagcaccctgttctcttcttctaatctaacaatctcggcctctctttccaacgcccagtccaacctggtttctcctaccgcccttccagcggaggaaccgtccgtcagtggacgagcagagagagaatatgacgggggaaggagaccaccggatgaaggtagttccgacatggccgaccttgtggaaagagagcaagagcaagaatcagcatttctactcaacaacgtcaatgaaaagtaaaacagagacacaccctccgtcttctagttctccgttctctaaacgcatcagctttctcaacatctctcctagtttcagtaggcccgagttgatctgagtagattccaggagcgactcgaccccctgttggtgtgagagacccatcaatgcggttgaataatgtttatgtagttccaactcgtgtgtttgattcgagtgcttttttttaataaaaaaatagaaaaaggagaaaaaacaagagagataggcaaaggttcccttaaatatttacgcttgataccaccgagtatcaaggagaacaaatacgagtggcaaactcacagcgagacctctgaattttcccatcactccttccaacgtagcttcatactcgcgtaacaagatcgacagttgcttgttctcgtgggccagcgttcggttctctgacacaagctttgtcgaaaactcttcgattgccgactggtactcctctgcacacagagcaaaaacaaaacaactgacgatcaacggtccgatcaacagaaacagtaacacggcaagattctgatctggacagaccttgagtgagatcagtgttgaaccttcttaacgggaatccagtgttcgcatggacagcttgattctgaattggagcaaagtcatcccaagaacaggcacaagatcggatacaacagaaagagattcagctttgatcagtcgatgcacatcaaggctacctcattggacctctcacgtcccatacaacccaccaccagaatgaaactcatggtctaccttcacttcggcaatctgctcctgtagggcagaggtgaccgctctgttttgagtcagttggtctgataattcagtcacaagcgcccataactttgcgatcggttcttctgaggctgcgatgacggtattaaatgtagaagtttagaacacaatgggctctaccgaccaacaaagatctatcttgaagaataagcaaggaagcatacacatctatgtgtgaaaccgtcgattggatggttgaattcggaagcaggagctgaatgagagatgacttgaacgacacttttatgttttaaatcttgtgggtttgtatctgcgtgtccctcaaccaatccagttgatatatacgttcgatctctagagaaagaaggacggtcgtcggagatgatggcaaggatggtggacagttgatgatggttgcacacgaaagaaactccaagaaatcaataaactcgttcaacacccatcatcaacatcgacactcatcatcatcagcagcagcagcagcagcgacaccactaccgctggtcattcataaagctacagcgacacacaacacatagatacaacagaagtgcccaaaccttactttctttcctagtttgaagagccttgtttcacattgttacatcgtgatcaccgtctctccttcgttccttccctctgaagtgagccaccatggaagccaaaccaaagaggaaggttagttctcttgacacagcttgctctttcgagtctttaccctcaaagaccgctagcagtatctttccggatccaaagaaagacctgaatctgctcaggaagtttcgtgaggcatacaaccatcactgtcaacgatacagttgagctatatgaggtccaagaagagacaggaagggcggaagtgacgtggatgacccacatccggaggggagcaaacatcctagttcactctggcaccagctgtattcctacatacataacagtggtctcctgtccatcagcaacatagttctcttgggtcgtcacactgaactgaccctcttgttcttggtcgaacggtgtgtcaaaacagatcattgggaccatccaacgttcctcgcctgggccttctcctaatttagcccatgtgccgactacaccaaaactttcattgccaaccagctcttcgccatccatatcgagccgtccccgtctgacccctacgtcttctgttcgtggcacgcccacatctgtcaccctcaatggacatcctcctaaggcgcgctcaatactgtcggcctcgaccggtagcacgtctggttcaactacggccaaagcacgtgtgaaagtcgctccgagctccatcatcggcgcgcctgcatcttctttaggctccccttcgttcccatccggttcttcttctagggactatgatcctggagaagcagctgtaggagcggatgtcgtcggtcgaggctttcgaagttccagtccggtaggcagtaatgtaggatcgctcgtatctggtttcggaaaagtaactagtaaggcgagaagtacagttggaacacctacaaatacagtcagacccaaagcagtccctggggctaggtcgtatccggctgtgagcggatctattgtgccggctcctgctcttccatccattcaatcatcaaaacaacagtcaagctcaacagcgtatgcaacatcttccgtgaccggttccccacttactgcttcgactcctgcttcgtccacctcaaatcccttgaatggatcaactgcgaaatctttagttcgagctagaacaacaccaaatgtccattctccagctgattactcaaccttctcctcttttgcgcgtacctctcccggtgtatcatcaccatcgaaccaacctgtatcaggctcttttagtccaccaacttcttcctccgcctttctcaacccatcgagagttcaatcaccaaacataccaaatccatatcatactgtcggcccgtcggcaaaagctcgtccgatgtcctcgctcccaggtccacactctccgaaccttctgtcacctacttctgccaaatatccagtcgaccatccgaatttgtcccccatagctagctcaacttattcgccatatctatcgagtgaatctccgaagttacctccactgtctccctcccattacccaacgaccggttccttcttttcacccgttctgaatcgtacccctcatcgacgttcattcgattcaacatcaactttatcatctgattctccagacgaatcgtccgcccatggggagtcatcctcgttttctgagatctccggtgttcagccctcggctctctccaaaacatcggatgggcacgagacatctgggaggtcccaaggcggggtaatggtgcttgaaggaaccgacaacagactcaacagtggagaagcccattcaagcgaaacagctagaacgatggatagactaggagatgaggatgatatggaggatggcgtggagaaggaggaagcgaaagtgaaccgaaaggtatggttcaaagtctcccagcctgtgtatattctctatagcttagtaacttgaccaattaacatatccttcgattcttaatttctaggttgccgatctagagatttcgaacgctagtttgcttaatattaaccacgccctagaagccacgaaggctaaacaaggtttgtatatcgctccacctatctctactcgattctatcttcctaagtgtgaataccaacgcgctgatatttgcaactctggtcgttctttcgctcactcacctacttagccaaagagattcgggatctccgacgcaaagttcggactggctcagtccagcctctccctccgctcaacaaacgattacgcgctttgacctctccacttctctccacatcctacccgtttcctgccccactcccctcttcctccgagggctcaggcgatgatgaaagtgaggaggaggaatctgatgacgagcaattcgtgagaatcaaagaggtcatgctaggactcttagaacaagcggtccaagcggttcagcagcctcgaccggtgccgagttggatagaaagggaccgtgaccgtcgaggatcgatcgcagatgggttagagaagagtgtggggggcaaggtgctaggtattctggagatggatgagtacagggccaggaaagaagaggaagaagacgataacaacgacgacgaggaaagggaggaagaagatgctcagcagagcgcaagcctggatttgggagatcagactttgcgttttggagatttgagcgattcgagagcgaatgctttgcgtataaatttgtctgatgaggagaggtcgatgatgttgtagacctgctcgttcggcttttgcataattcttttcatatttatttcacttttttccttcgttcttctatccttctttatccctatgtgaacccttttcttttgcccttacctttgctcccatactctgtatactaccttactttctttcatgtactcatcccacccacatagacatctttataccattacactcctgcatcttactccagacatgttatcttttcaccttccttcgccatcaggtttacgggattagatttccatcagacgcaagaaacgcgtcgagacgcatccgtcaagatgacgtcgacgcgtttgtttctcgtttaatcgaaaagggctgcttacttctctgctatccgccgacattctcactttgtgcagatcagatataccgttcatctgcgtcgcttccatctggccagcatgcacaccttgtttgagcctttctcagaccttttacctaatccgaattcaatgtattctgactcattgatatttccaaaagccgcttgggaatctgcccttccttcgactgctgcatcatcgtctgggaccacaataagctccttggacttgaatagcacatggcgcggaatatcgctacctacagagctcatcactttagtactttcattttgcgattcttcaaccttggccgcttgttcgagagtgagcttttcgtttctccagatcgcaggaccgatattatacgaggaggtcattttggacaagtacgcaagttatgatcaattgttttgtaaacgagtaggccatcttgtttccaagaaaatcaagtacattcttcttcaagctgaccctttgccccgttttttcttcttttttttgctttttcttatgaactgagaaaagacaggaaagaaatgctttgagcatctagaaccatggctgtcggtctatcagatcaaatctctttcgctcgtcactcgaccatcgacagcgatctctctagatcgattcatcagcttgagtagtgaacgtattggctccccctcatcatcatcatcatcatcagcagcagcagcagtagcagtcaagcctatccagttggagacattatctgtctcgttgtcatacaacggcttaatcggctacgcgccggtgttgaacgttgtgttacctgtgaaccttcgaatgtatcctgcattcaaccattcatcgaagttcacattcgacgccgaccggcgttcatgggaaatcttctcaagcccaagctggagaatctcactaagaagagtgtggctaagtggttgttgtttgcgtgtggtggagagtgggggaggaacgttcagaggtgatcccttgcgtcccttggaagacgaagcacatggcttatactacaaccccgactttttcctcgtcccatcccgggccgaacgtcttgcgatgaatcagacagacgacggatctcgaacggtagataccccgacatccacaccgctctctatcgtatttgatttgacgaaacgatcgagattgacgcccaaagagttctacacgctctttctctctcagcggcggacttcgggtctcttctcagtgcctggtttgacacaggagtctgcagtttccgcagatacatcctcctcctccttaacttctcaagaatcaggcttcatgccatcaacgattacaacaaagtatgagaacggaatgacgattttggtcaagcgagagagtgaacgtacgtggatcgagagtgggctaagggcacgctcagagggaacacaagatagatttgttcgtgtactagtaacatagttgaacagaccgtgtcgtcattttggttgtgtctttcattcttcaattcaaaataagtctatccctttgttgtgttgtctcttgcaagtactccttgtacaagatatataccaatgtacttctgaaacctctatatacggtggcccggtacaatggacactttcaccatttgtatgatatctatttcgaaggggacagatagttcgtccaccaggtctcaaacgactgttcttccgtccactcgatcccattctcttcgagacacgtcagatcgagttgagtatcctaatagtcagaacgaatctgatgagcgtttggctctctatggacatttggtatgtcaggagacataagatagaaagaaagatagaaagaaggtgactgaccttgggccgaataacacctgcagcaggctcggttccatcaggaatgatgtgcgaaacttcgacgcccagcgcctgggccatgacggtgcacatcgaatacttcgtgaaaggtcgtttggacgagaagtggaggatcgaaggtggaagctccgatgaggtcagtgaacgagggaatcgacgagcgattcgcaaaaggcagacggcaacatcatggacgttggtcggatatctagtttggtacgtatccactgttgaatgacatacacgagatcaaagtgcttggtaagaatttggtgattctgaaagcgtagaacgaaagagaaagatgggtgaaaggcctgcatacttttgtaggtcttgcctgatttatcattcacgacgtccagcaaaacattcaccgctgtttctgaattgtattcggcctctccatagctaggatggaaagttatgagatgatgagcttctctctgccttgcgcgtaggtcacatacacaatcgtacacacacacacactcacaggatgggtacccgaaggacaatcccttgtcctttagagttctccagtactgcaacctcaccctcacgtttggtgataccatagaactgcagtgggtttggtgcgtctgacgtcttgtatggtgggctaatacaacgagcgtgatgaagatacaaggaatctctgagtcatgcgctgctatggcaacctaagcgaacctgcaagagagacgaacctggtgccatcaaagacgtctttgaggagatgaaacagaacggttcagcaagggcgccaggagatgacccaaaaggccaccgaagagacgaaacaccacaccgtataccacaaaacacactgggactcacaatctgtcgagatgtaaatcaaccggaagcctttctccccggctagtctcgctagatgggcgggcaccaacgcgttgagctctctggcctttgccgggttctcctctgcggcgtctggcctgcgctcagcggccgagtggacgacgactggggatcaagagagacaggcacaacattcagctgttcctgaatagtgagtttaagggggaggggaagatagatttccgatcagggcaggcacaaaccatccggattgaactcgtcaatcaacgccctgaccgcttcagggtccaacaggtccaacttgaggagctggtcagtggaccgagtgaatcccaggcctttgactttattgagtgtgtccagagcaaggaagaggacaaggtcaatttgtgggtcgagagaatggcttgtatacataacggatatacatcgacgaaccctctacatctggagctgattggaacactttgagggtagctcgaccgaggagaccggatgcgcctgaaggatagatggcaggtgtgttcttgctcagtcttgttctttaaagtcagactcgattcaattcgattcagtcaccaaagaaactaacctgtgataagaactttcatgatgagatgaacaaggattcttgtgtatctttgtctgtgtatagaccagagagatttcacccagacgggagatgacggaggagggcttgaaggaaggctgattacatacgcttatgcatttccagaggcagcggcacacggaatgaaaaatccgtacagccaatggtagccaggctttacccatcgaattctctctcttctcttgatcgtatcccgaccgttcaccttctacccttgtcgtcgttgccttcttttttctttttccccaactcgtccctcgcctctctctagatcgtccatccgtcttctctacctgtacctttctcgagtgtcaatatgtccgccgctttccgatcgtccaccaggttcatcaacgccctccctaccgcctcgctcacctcgaggggagccgctcccttttccaagggagttagtgtcaacttgatcgcccagcacgattcccacggtgagtacgatcctatgcaccgagccggtaaggctgctagctttgccttgaagtttggaaggtctaccgtcaggtcggggatcaatggtgaggatccctttttctttttttctctccgtcgggtttttttcttctatctgtcttggatttcgcagtcaagaaaaaaaaaacttgccagagcacatacccgtcttctgaattggacatcactcgtcaaccattgtcatctgctcctttgctcgagagcatcagagaaatacagaatccaggagaggtcttttcaggaggttgtcggaagaaaaaacctcgatgggcctttttttcctcagatgttacgtcgattgtgttgatgcggatctcgcgattggtcctcttttctaccatatctgaacgtccgagcgtttccgtcacatcttcatctatcaatatctcttctctacatcccgtctcgtcactcgcagacgttcgaccaactgagatggctattggccatgatcaccttttgacagttgagacagagcgacgaatgctgatttcttctgtcatttctgttgtcactccgactttttctcttagctgctccttccgttggccgacgaatgatccacacctctgtggctgccgagcgagaccccgttgccagcccggacttttccaagtaccgagccagctcttcttcgacgaaccgaaacttgtcctacttcatgatcggttcgatgggaacattgaccgctgccgctgcaaagtccaccgtcgtcgacttggtcaccaccttgtctgcctctgccgatgtgttggctcttgcaaagctcgaggttgccacttcttctatccctgagggaaaggtgaatattccattttctttctgctgtattgatctgttctgtgggaaagaaaagagcaggagaaagaaggagagacaagacattgatggcttacgtttggttgttgttgtttttccgcctcgctcgcctgggttgctatgatgatatagaacgtcgttgtcagttggcgaggaaagccagtgttcatccgacaccgaactgctgaggaggtcgaggaggccaacgctgttgacatgaagaccctccgagatccccaggctgattccgagcgagtccagaagcccgactggtaagttgctctgagtttatgtgtctgctggagggggacgagtgttggagggggttacagcaaggccaaagaaatcgaccacaagtctgatgacccgagctgccaacttttacaggctcgtcatgatcggtgtctgcacccatcttggatgtgtccctatgtaagtcatattctacccgtttatatgagaaagaaaggcagagatatgatttctgaccgaccggataccgttggatttcgactacaacagtggagaggctggtgatttcggtggatggttctgcccttgccacggatcccattacgatatctctggtcgaatccgaaagggacctgccccgctcaacttggaggtccccagctactcgttctctgatgacaacgagaccttgaccatcggttaaaaagtttttctttcttgtaaagaaaacaatcaagtagatgtgaggagtgtgagtgtgagtgtgagtatgagcgtgagcgtacttggtgtgtggtgtgtggcgggtgatgtagtgtggacggcgaggagagggagatggatggacagacagatggatgggtatacagctgagacagtgtttctcttattcgcttgtcctctttctttctctactcttcttgtttactcttgcttggtgtcaagttccattgtgtttccttttcttctctagtctcttttgttttattctttcattattccaatcaacatgatttaccgcatcgccgtgtgagtgagagtaagaatgagagtggaagtgtttatgggtgtgcctttaagtcattgtggggaagaatggtcgagggtgatgtgcgtgttggtccatggaaagagcattcactcgatacttcccgaacgaaaggatgtaaatagagaagtaagaaagtgaatttaagagaaaaaaacgtgcaagaaaagggactttgaaggaaacggagaacaggggtaggggatgtaattcagagttaatagaaggtgaagagacgagagagaatgaaggtctgaatgattgaacgtacgtcaatagagaaagtgtcgagcaagcgattaaccctagtcaactagatcagttaaaggaatcagataccccaaattgaaagagagcgcgctctctatgaggtgtgggcaatgaaagaaaaagagaatacagcaacaaaggaaacaaacggcctacaagagtacatgtacagggacggaaagagggtactatgcacagattggttagggtttatactcttgccgttcagagtgacggatcggcctgacgagcctggtctatccaatggatccgaagcttttttgtttgtccgaaatgatgaggagaggacggaaatacaatcggaaacaagccgatggaaagacaacgagaggatgttttgtattctggttggctcgtttatactttttttaataccttttcgattaaagtcaccactttttctcctttttcctttctcttctttagtcttttcttctctccttcttagtaaatcttgatacagcacattcaacggcgcacgcacacatacacatatatacttacatgctctcacgctcgcaaaggccattttggagggcgcgttaacaaactggatttagttggaatcgttcggggcttcttgtgatatgccggtttgtttgagtggagtatctgtgattaactttgttgtctgattggtcgaccgtctagctctctctggcgagcgatcattggaggcgatcatcctccatgagaacgggcatggcgacagggacgaaagcaaaaaaaataaattggccaagccaagggacccatcgagtgggtatatctgattggatcggatctatctcgcttatttatagaacaatttgtacctgaccctatcggccttcgtcgcccgttgtggggcggcgggcctggtcggtcaatgggataaatgggcggtatggataggtaccccgcccacgagagaagcgcagtcgctctgttcctgattccttctaatcagacaagaaaccaggtacccagacccacaccaatcaggcacccgacagcggccaacatcaaatccggacggaacgataaaaaacacaaatttacttcctctgtctgtttctttcttcctttcgagattcgtttaaaacagagagccgtccgattttggtctgctttcctttctcttctttcccttgacatcaaacacacactctctttatccaccctactcgctctccaccaacgtacgttcgtctgtcgacctcatggtgccggcgatgttctgtgaagaagagaatcaaaactgacggccttcgactttctcttcacgattctccttgtactctctcttttctgatcctccaatcacagatgcgaacgagttttatggccgctgctgctgtcgcagcaatgaccactgtccaggcagcgttgatcgagcactggtggtaagtcctctttcttctgtggcaacgtcttgcctgttcacttccagcctaatgttcgactcctgcctttcttttcctattacagggacatcacctatgctgaagccaatcctgatcgtgagcatgacctcctaggattatcaattctatcttttatttttccttcttttatttttttaaccttacactaaaccgacatttcttcttcactcagaaatgtatgagcgacgagtcatcggtgtcaatggaacttggtcagtgattacccactgaatgaccttatcccactagacaccttgtgacaggctcgatcttacttattttttttatccctataggcctcctcccccggttgttgccactcgaggtgatatcgtccgaatccacgctaccaacaagatcagccaacctgccgctcttcatgcccacggtatgttcttcaacagaacaggttactatgatggacctgttggagttacccagtggtatgtgtagcctccctgtaatcttgtcgatcgcctcacacgcttatctcctttcctcttcttagcggtatccctgtcgacgcgtcccttacctacgatatcgacacccaatatcagcaagggacgtactggattcacggacacaacctcggtcaatacaccgatggtctccgaactcctttcatcatccacccaaacaaagaaaccactagaaccgacatcacctgggatcatgatttcaccgccgttgtgtccgagtggtaccatgaggagcacgaacagcttttgaccgagtttatgagcattgtgagtttctgtcctgtattttttcctaacttgatgtatacatatcctaatcattgtcttttacagtacaaccctactggagccgagcctgttcctccctcggccttgatttactttgcggagaactttgcgaattacagtgactatgttggtggcgctgccgccattagcaacggctctataaccgccgacaggtccatgatcaacttcgaggctggcaagaagtaccttatccgattcatcaacatgggtgctttcgccatgttccaactcgccctagacggtcacgagtggttagtctaaaaactgctctttggattggtacaacgaaagctgatctcgatccgtgaccacttcacaggcaaattgtcgaggtagacggagttgagactaacccctacacgatcgaccacttccctatctctgttgctcagcgatacgccgtcctcgttactgccaagaacgacacgagcgagaacttccacctccatgccaactttgatccccagatgtttgatactgtgcccgacgatctccagctcagtcagtactcttcctgccttatctatcatttgttctcttgcgcacagtcattaaccttgccatgtcttctcagattacactgccactatcaactacaaaactggtaattccgtcgccgagggtagcactattgaggcttacgacttcttcgatgataccgttatgtcgcctcacaagcctgttgccatggctgaagccgactactccttcgcactctcctttgccttcgacacattcgacaacggaatcaaccgagctgccttcaacgagactacgtacaacgcgccttctaccccgtccttgttcactgcggcgtcgatgggtgcgaaagcgactgtcgaggcttacggagcgatgaccaatgcccatatcttccagcgaaaccagatgattcagctcaccatcatcaacactgatagtggacagcaccctttccatttgcacggacacaacttccaggtcgttcaccgatcgttcaacgactcgtctcccgccttggttgagggacagcccaacccgttcgtccgagacgtcgttatggttcccccggatggtggatccaccacgattcgattccgagctgataaccccggagtttggttcttccattgccacattgactggcatttgtcgtccggtcttgccgccgtgttcatcaccgctcccgaggtcatccaatcgactttcacgatccctcaggagatgaaggatcactgcgcagctctcggtatccatgccgatggtaacgtcgtcggtacgtactccaccaccgactttactggtgagcccctcggaccgtacccgattgtggctggatggaccaccaaggctcgaggagccatggctggttgcgtcctcgccgctgttctcggtatggccagtgtggtctggtactcgtggggctccctcgacgaggctgaaatagaggccgaggagcagaggagacacgatcagaagatgctcgacaaggccgagggtcgaaagcacggtgtgcttggtctcgccaacaagcttgccggaaggcagtgagcgtcttgttttctttcttcatctagcttacggtcctcatcattcttctatgtaccataccacacgtcatctgcatggagtctaatctcccgatcgactcgatccttctctatttatcttcctgatctattaaagaagaaatcttatgtatcaatctcaacctacgaattaaaataagatcgctcgatccatatgatcgttctttcgtcctggcttcttttcgttatcaccctttcctttttcctttttcctttttcctttttccttcgttatcttttctggggttcttcgtattttctacttcctcgctttacaaatatatatagatctggtgaagggatattgctgtcgttctaaatcgtaatgacgacttcccaacaaaaacaaaaactcttgacattgaagtgaatatgaagaaaacgttgactgcaagcctaaagtgattacaagtctaaattgcggggtctgaagctcattcagtggtatatgcttatgagacgctaaccctaacaagtgaaaagaaatagaaagaaggagaaaaacctcatgactacacactttgacaacggtaatgtctctatcctttttgtattcgtgtatagtcgtacttcgaatatccttcgactcgaacttgtagagacgaaggaaaagaagaaaaggggaagacagatatcatggcaaagggtatgcagattacaacaggaatcgccatcaaaattgagaggaaacaagaaatgtcaaaaagaagagaggaaatcaatcacgaggaaagagccgtcgtcgtcatcggcagcaatgctactggtggtggtggtggtgatgatgatgatgatgatgacgataatttctgctttgattccaagagggcaagacttccgacgaggatctcccatgctatatctagaacgcgtgaggttcaaaaatacgaatagaaatagaaacaaaaaaacaaagaggaaacagaggaggaaatccgtgattcagtcagcatttgtacagtaagagaaagatggatggcgttttcaaacttagcaaagaaagacgttggaccaacccatagttcgccagagagccgaatcagcgattcccaaagcgcacatgttctcccatgtgccatgaatgaccgcaatcctgtccatcagatcgttcttccctaatcgattggccatatcattcatcaatcctgttctgcccgacggccgagttggttctaggacattcaataacttttcgagcaagtcgtccggcctttgagtgtacagaaaattattgatgagaggaaattggttcggtgagggtagtgcgatgctgacgacaggaagttgatcgactggaagatactcgaatgacggaaaagggggtacatgagcgcaagaagcttggtaaatgatagcgtggactgggagcaacgtgcctgttggcgttgcgagatcgttggaagggatggcagtcggccggatggcgagcatatgagtgggaaggacgtcagaggtaacgtttggagggatgtcgaatgtcatgatcgacggaagaggtgattgaacgatacgtcggtccgatagcgagcaagacagagcggtccggagaagttctggacctcgttcagacagtttttccaacagataatctagtggctacgaattctcaagccaatacaagacaccacagttcaaccgatctgaatcaggactgctcgcaagttcaaacacggtcttatgactaaccacttctggatccaagcctttgatggctccgatgtcgatgtttgccggtctgtctggcctcgggagatacaatggcaagaatccgccgcccggatgaggtagggttgaatcattgaggctattgacctgcctggtagtcgagtgacgagcggaagcctctgagacttttgatcgtttgggcgatggggttcggtttgatcgtcgcagctcgttctttgacgatgatatagaggtcggggtgagaatcgcctggcgggcggacgagccggacattctcgaacgaggacgcatcttggacgaacgactcgacgacggctgtcgtgatggagaagcgggcgaggatagggttatcggagttcgaggaagcatggacatcatcgtgactgacgtcaggcacagggatgtatgcggaggtaaaaagcggtgagggcaagggcaagagcgagagtgaatacaagtgacagtccgtgccaagacaagacgggagaaagacagtacgtacgttgtccaaaggaaaggcagagaagaaggtcagaaaaggtcaggtcggaagtgagtctgtgtatatacggggagagaagggaagagaatggagaaagaaacggatcaagggaggaaaaggaagaggacgaaagaaacaagaaaataaataaagaactgtctggcctttttatggcatgtagattttcttcctgtctgtcagatatttggccgacgtctgtcaagcacacctgtcggtacgtcagtcggccagtcaatcatctcgtcggtcagacagccggtcagccggtcaatcagtcaatcagccaatcagccctgtgagttagtaggtccgccagtcagtctgcctatcaatcatccggtatcgcttgatgagaactttggctctcaactctcttggggtcttttagtttagaacagtgagtgtgtgtcagagagaacgcgacagaccgaccgagccaggtgcgaactctgggatcttcaagcgccggaaaggaagcgcctggaaaagaattagaagtagaagacgatgacgataacgctggagcgagtgagtgtcgatcgaacggcagagaattaatcatcctcgccgaattgctaaccccctttcctctgtgcccggtgtctggtgccttgtgcttggtgccttttttctccactttatttgtcctctcttttcttcctttcttcttttctttcgcgtggcttttttcatttatttatttatttatctatttctttcaagcccaaaatctgggtgcttgctttttcatgccctcttccgatgagagcagacttgcccgcctcactctcaaaaacttcttacacccaactctattcaacttatttgtttacgtaacattcgtatacatatagcccaaaccgacgacaaacccaaagttcaattgaaagaaaactctaagactgtctaatttcaaagccgatcatgagatctagatgtggcgattagaaaataaacaaaacaaaagttggaaatctcacccaacgaggctttagctgcgagattcatagacatcgaagagcaggaaaggagagactccgtttttccgagcatccacgaggttgttagacgtggattgtctttatttacatctcttcggtctgctctctctgtcctgcttttctgttaatttattttcttcattggcattctcattcatatcatcatcattatcgttctcttctgtctccttcttaggaattcttgtaaattacaaaggcatcagaagaaacaatcaacggagctttattactatcccccttctctttaggcgtttcaaacacatactcaatctgtcggatcaggttataaaaagcaaacgtggcatcacttcctcaaagctcatcgctctacttgcatgagtctgatgatcgttagctctgactcgaggggtagcagttttcaattgagaaaagagagtaacagacctaggcaagtttgctcctgcgtcgtttaaatataatttctatcaatcttccataattttcacttaagtgtaatcatccttaatcaattacactgtcataaaattcacttgaaagtcgaagcattacgggatatttaagcaagtttaagatgccatcccctcgacagactgaatccaaaaagtggaaagcaatctatcgacacagatgggaagaaggtagaggaggtccctgacaacacaagccggcagtgcagtggcaaggtcatcgtgtccggccgtcgtgcaagcagaggatggccggacgggcaaggcaaaaagaagtaaaccagatgggtccggtggacccatataagtggttaaacttataagaacagatactacacatgatctaagccaaaaggccagagaggatgggggaaaagcaaataggctcaagaccggacgaggggccataatttatacttttccgacttgccatctttctctgaatttttccttcttgatcttctttaattgtcacgcttgtcacgctgaccatatggttttgcgatcagccgcgtagttctttagttttctcttcttgtgagatctgctgttcatgttcaatttcaaataacacgagttccgtccccttgtttgagagatcaaccagaagattcttcccggtatattacttctaaacaaaccgatattaatatgaagatgattatgtttgtcgctactagtttcaccacgagactcacacatatatacacacaacgagccttcttctttctccttctctgctgtggtcaagtgatgagaatcattcatgtcgagctcgcacatccgacggtccccaagatgagagtgagacaacgagtgacgaccgggcaaacaccatgtttcgactgtctgaacccggacccaacaccgctctgaagatgattgtctcattttgattttgattgaaacacagacatgaataagatttgagatattctctcttcaaataaattcatctccctccttggcgaacacgcatatcgcccaaagtctttgctccctatcatgcacccttccccaaagccttgccgggtttggcgaaaagtcaaaggacatagcttatcgctcagaaggctttgatccgcctttcgttaggatgttttttcggaagagctaaagaagtcaaccagaagagatcaagatttcacaccccatcgaatgtttacaacccacacttcgctctctttgttcttttcttcctcctccttctctcgatgaaacaagcataaaagaatgtaacaagaggaaggggaaggaagaaagggggggagaagaaagaagcggaaggttgctgagtcaagaagtaagaacaaaaagggggggtcggttcgaccggggggtttgacaatcaataggttgagagcttgtcggccaaggcaaataaaaggaatgtttctaaatcaaagttattccgtcgggctcatcggcacagttctttcgtccgctggtttcatttgaacctcacgattgactgcgcggatgtgtattatacgctttctatattcccatctacctcgtcactgatttagggttatacagcaatacccccgccacgtcccgtaaattcacaaagtcagctaacgaacaacagagctacagtggatgatggattcatacgtaaatgaacagatgcgaattttgcccgaagggatatacgcacgcacatacacaccatgaatttagggaacagagtaagagatcgggccgagtaagcgcacggtttcggtgaaccctactattcatgcgccgagcttggtattgcaggccgagctcgggccaagccgttcggctgagctgtcgaagtttttgtcattaggttttttggacttgtgctgtagctgaccatttaaatcaattcgaacaaacgaaaaaaaactcaagatatcgccaacttcggggattcttctttttaagataaaatagaatgatccatggaaatagaccataattacacgaactgtggtgatgttcgtgaagtcaagatgcgtgaacccgaagactgaggccgtgaatgtagatgtgagtttgagtgaacgtttggacagatgactgtgccaaacgggcacaggccgggatggtcctggactgtgagtgagtgagctgtgagtaaaataagattgatcgagaggattcgagcccgaaagaagcatgcaaagtgattttcattaatgccggctgagtgagcaggctagatagatgactcagaaggctacatgggcatatcacacacggccgccaaaactcacgccttcatacgctcatgcttatcctcatggccgcatctacagtcatattgatatcctcatcctcacgcgggcacacacacacacacacacacacacccgcgggtgtgtgtgtgtgaaagccaaataagaataggggtctatattacatgaccgaccgtgtcaaacaaacacgcagccaagaaggcttgtcccggagttcaatatacggaaaaaggggccgagaaaataatttgactgggtccaagcgtatcctcggcaacacggccaccggccagctctccatccccgccgttcgccgtctcggctgacaaactcagctctgtggaagatatccgaacgttttcacttataaagaagcccagctcgaggtatgcctttcttttgatcttcgtttagctctcccatcactcgattgaatctctagacgtattttcccatcacaaagacaactacttctacttagagctacatatccacattcaaaagatgcctcttatcactagaaagaacacacctccttccttcgtgatcggtcaatcagcttcgttcactcagccaactcaacaaatgagttcccctccagtcatcatcttgactcgttagttcgaaattccttctctttcttccatgcgcctgtgagactttgctgatattccatcatgctttctttccaatcagctcctccctcagacatgccaactcctcccgctgacacccagctctcacccactgggccttccctcgtcagacgagtcagcggagcaagttcatcagcttcgtcaaagtcgtacgatgtgtcctacttcctgccttcccgtcggtcccgacgaccttcgagcccgcctggaccaatcccggttagacttcgaaattcaaagctaattctggaccagaacagtccgtttcgggcgagagcactaggattagatctcgtcgttccttgaattcagtctgaggatcttgccaccaattctccaaaggaatcttcctctcataccatgtctttccaaatactcgtccgaccgagcacgtgtgtctaaatccaatcggaccgtctcggacgtgtatactctacggaaacactcctgatggagtttccctcgtaggaaacaatgtcgtctctcttttatcagtgactatatgctctccgaccggctggttctttttcggatctagagcttatctctgatcctatctggccatgcgtctttctctactgccatgcgtgcttcgctcatggcttgtatatttgtctcttggtagtgtcctcagtctggtgtccagttggaatcaccatctgatttcttactctcacactcagtatatagtttttacgttcctcttacaactcgcatcgatctagatactcgattatcaatgcacatcctctgtttatttctgcctgctttttctttctatattcctcgagacaaaaccgagaattatcaggaagttccgacgacgtcgagatgagatgactcgctgagagttatcggcatcgagtcatatacttgattgagatttttgaattgataacattatttatatgtccaacagtgtagtcatcctcggctgggtggagcccacggtaaaagaggaagagaaaaaaaagaccgccttagcttctttcaacccatctatcatcccgtttctcttcatcctcatccagacatggctcagttaatcagagatacattcgcaaactccaaggctgccggcaagcctgtgtttgtgtccttccttaccgcaggttacccaaacgccagctcgaccgtccctctcatgctcgccctccagaagggtggggctgatatcatcgagctcggtgtgcccttcagtgatccgatcgccgatggaccagccattcaacattccaacaatgcaagttttttcttttttttttttt

SEQ ID NO: 319 - DNA, 3166 bp, Xanthophyllomyces dendrorhous
aaaaaaaaaaaaaaaggtcgaagctttactaaccgattttcatattttcatcctcttacaggttgctctacagaacgacattgacttcaagacatgccttgagcagatcaaagaagcacgagctgtcggtttgaccactcccgtcttgcttatgggttagtactttcttacagacgttcccctctttctgtaagtttgctgatcggctgcttcgtccgatttttactcttgcaggttactacaacccagtcatgtcctacggagaggagaaggcagtcaaggacgccaaagacgctggagcaaacggattcattatggttgatcttcctcctgaggaggccatccgattcagaaccacctgcactagcgaagggtaggttttcacgttttaccttgtcttctttctgatacatgtcgctcacatattcattttcctcgtcatggtccgcaatagactctcctacatccctctcatcgctccttccaccactgatgctcgaatcaaattcttagctggaatcaccgactctttcatctatgtcgtctcccgagtaaggcactgtttaactcatatgccctttctcgttggacaaagtctgacagttcaactctttgttcgtaacagatgggtaccactgggtcttccgctgcagagtccatttccgactcccttcccaaggagatcgctcggataagaaagttcacccaagctcccttggccgtcggattcggtgtcgccactagggagcatttccagactgtcgccaatgctggatccgacggtgtcgtcatcggttctcgaatcgttaacgtcatcaaagagactgctagcgatgacaccgctcgggccgagcgtctggaagagtacatccgagaagtttgctcgtctgagccttccgacaagccttcttcgtccaagcccccgccgacagccgagccagagattgcttctctccctgcaaagccggccgacattccggaccaaaaggtcgccaacggagatgcgcttcctgcgcgattcggaaactttggtggtcagtacgttcccgaggccttggtcgagtcgcttaacgagctcgagcaggcccacaaggacgcgctcgcggatccgtcgttctgggaggagttcagagggctctacggctacatgaacaggccttcagaattatacgaggccactcgattgaccgagcatgccggaggagcgaagatctggttgaagcgagaggatctcaaccacaccggttcccacaagatcaacaacgctgtcggccagatccttctcgccaagcggctcggaaagacttgcatcatcgcagagaccggagccggtcagcacggcgtggccaccgcgaccgcctgtgccaggttcggaatgaagtgcaagatctacatgggagcagaggacgtccgaagacaggcgctcaatgtgttcagaatcaagatgcttggaggagaggtcgtccctgtcacctctggttcgatgacccttaaggatgccatcaacgaggccatgcgatcctgggtgaccgacctatcaaccactcactactgtgtcggctctgccatcggccctcatccgttccctacgatcgtccgagatttccaaaagatcattggtcaggagatcaaggagcagcttcagaaagtccgaggaaagctcccagacgccgtggtggcctgtgtcggtggaggaagtaacgcgatcggaactttcttcgattttattccggacaagaccgttcgattggtcggtgtcgaggccggtggacatggtgtcgacagtgacaagcactcggccacgctctcattgggtgtacccggtgtgttgcacggagtgagaacctacctcttgcagtccaagactggtcagatcatcgagactcactcgatctcgcccggattggactaccctggagtcggtccggaacactcttggttgaaggataccggtcgggcagagtacgttgtggctgatgatgagcaggcccttcgagctttcaggctgttgacccagttggagggtatcattcctggtaagtcttcgcgcttcctttcctttcatgtgggttctgtctagaacttcgtctgatctgtctcggtgtgttctcttctgcccagccctcgagtcggcccacgccatccatggagctatcactcttgccaagacgttaccgaaggaccaggatattgtcgtctgcctgtctggccgaggagacaaggacgtcgacgaggtcttccgaattcttcccgactgggctgatcgacttgactggaagatctaaggcggagggatgaaggaagtaattggagggaatgaggaaaaaaaaaggcgagggaacgcggtcttctttcctggcaaggcaatgtcgtgtatctctcttgattctttcgttgtatcgacggaccacactcttttcgaatgaatatcactatcgcatccaatgatcgctatacatggcatttacatatgccagacatcgctgagaaagagagaacattcctttggaaaaagcctactgtgcctgaagtcaggctgatgttgattaaacgtctttccccatcctaagcagacaaacaacttcttttcgttcaacacaccacctctctccgaaaaagctcttcaatccagtccattaagatggttcatatcgctactgcctcggctcccgttaacattgcgtgtatcaaggtccgtctgcattgtgaatgctgctcgtttgccttgtgtgcgtttggtggatctgaaagaacccttgcttgaaccattccatctctgctctttttcttcctgtcctttcctttttctcacgacaaaaaaaccacctggaccctttgtgttcctttccattggtgttcatacacctaacacagtactggggtaaacgggataccaagttgattctccctacaaactcctccttgtctgtcactctcgaccaggatcacctccgatcgacgacgtcttctgcttgtgacgcctcgttcgagaaggatcgactttggcttaacgggatcgaggaggaggtcaaggctggtggtcggttggatgtctgcatcaaggagatgaagaagcttcgagcgcaagaggaagagaaggatgccggtctggagaaagtgagtttttctcctgtgtgcgtgtgtactctgtataggtaccgttgac

SEQ ID NO: 320 - DNA, 3781 bp, Xanthophyllomyces dendrorhous
tgtataggtaccgttgacaggacagtctttctgaagagtttggatcttactcttttttgggggggtggtggtgtttgaaataatgaccaaaataaagctctcatctttcaacgtgcaccttgcgtcttacaacaacttcccgactgccgctggacttgcttcctccgcttccggtctagctgcgttggtcgcctcgctcgcctcgctctacaacctcccaacgaacgcatccgaactctcgctcatcgcccgacaaggttctggttctgcctgccgatcgctcttcggcgggttcgttgcttgggaacagggcaagctttcctctggaaccgactcgttcgctgttcaggtcgagcccagggaacactggccctcactccacgcgctgatctgtgtagtttccgacgagaaaaagacgacggcctcgacggcaggcatgcaaaccacggtgaacacctcgcctttgctccaacaccgaatcgaacacgtcgttccagcccggatggaggccatcacccaggcgatccgggccaaggatttcgactcgttcgcaaagatcaccatgaaggactccaaccagttccacgccgtctgcctcgattcggaacccccgatcttttacttgaacgatgtctcccgatcgatcatccatctcgtcaccgagctcaacagagtgtccgtccaggccggcggtcccgtccttgccgcctacacgttcgacgccgggccgaacgcggtgatctacgccgaggaatcgtccatgccggagatcatcaggttaatcgagcggtacttcccgttgggaacggctttcgagaacccgttcggggttaacaccgaaggcggtgatgccctgagggaaggctttaaccagaacgtcgccccggtgttcaggaagggaagcgtcgcccggttgattcacacccggatcggtgatggacccaggacgtatggcgaggaggagagcctgatcggcgaagacggtctgccaaaggtcgtcaaggcttagactataggttgtttcttctaaatttgagccttcctcccgcctcccttccacaagcataaaacaaaggataaacaaatgaattatcaaaataaaataaaaagtctgccttctttgttttggaatacatcttctttggacatgacccttctccttcttttccgtatacatctttttgggtatttcatggtgatcaaacaacattgtgatcgaaagcagagacggccatggtgctggctttgagcgtctggcgttttgtgtgtcctgcacttgagcaaccccaagctgaccgctaggaaaactcattgatgtgatttatatcgtacgatgaaagagaataaaatgatagaagaacaaagaagaacaaagtagaagaacgtctgagaagaaagacaggaaaatgacacgtacatagtgttcgatgatgaatgatataatattaaatataaaatgaggtaaacgtatagcatcacgggatgaacggatgaacatgtagtggacaaggttgggaaataggaatgtagaatccaagaatcgttgactgatggacggacgtatgtaaacaggtacaccccaaagaaaagaaagaaagaaagaaagaaaacacaaagccaaggaagtaaagcagatggtcttctaagaatacggcttcaaaaagacagtgaacactcgtcgtcgaggaatgacaagaaaagtgagagactacgaaaggaagaaaccaagacgaaaagaagaacggagatcgaacggacagaaataaaggcatgatttcgtttcttcttcttcttgttctacccttgaacacctctaccaaactcttcacttattctctttgattctgagcctgatcctgagcttgaggtcaagttggtcgagccccttagcttgaaaccaggtgaggccgcgccgagtcctatcgaaaacacagcgtgtggtgcaaagtcaactggcataccatcttccggatgtgaatgatgagtgttgtgttgggaatttgattgtgaatgggagtgatggtggtgaagatgagggctgagagggaagtgagacgaaggtatatacctcctcggtgagttgacagatgatcgtctagatgtggctgtcgagggtgagagtggggaggggaaggaggtcgggatcgcgtcagtggacgatcgacgggacggatggatgagcgagagtgtcggcttcggcctcgattttttgtcggtttcaccagaagaggacggagagagagtagcgttgtcgacatgttctggggatacgttgacgttgaggcctaggccaagcccagatccttgcgtcctggcaccagcttgagaaatcgaagcttcttcttcttctccctcctcttcgaccttccacgggttatgataatcgatcttgttcaacaaccttctcctttgctcttcgggatcgttagtttcgtcctcatcgtctcgatatccggtttcgtcgatctcagattcagcctcctcaacccaaacaccgacgtcgacgccacctgcacctttctcgcctgtcagactgacaacgccgacacccgcgagcaacacggctacaccgacgcaaacgagcgcgacgctcaaatccgtaagcacgttgagttggttgaaatagacgagtcctccaaacacactggacacgttgtagaacgaaaaggcgaccgggcagacggcagttggagaggcgagcctgagcgctttgttcagatagatgagttgcgcgagtgcgagtatgaccagggagacaaccaagtacacggtcgtcagcgagttgaattggttggacgacggatgggagattgtgatgagaagaagttcgattgctgattttgcgatcagaagacataacccggacagagttcccgatatcgcagcgtaggaaagtgaaagaagcaactgggtccgacgctcaggcgacgagcaggcgttaggggcgcatgggctttcggaggacgttccgtcatcggagcatggcttggatggcgaagccgtggacgggaggggtcgtgtcgggccgagggaaggggaaacgggtagttggattgggccgggctggctatcgattcgtttccacataaagtgttcgaggatatgactctgtcagagggagacggttgaagagctggttcaataagagacagtccacagggaatgggagaagacagaaaacgggaacaaacggtaacaagagcgaggacaacggcggcggcaaggatactgatgtacgtcgtccactgcggtcgtccaaacagacgaacgaggtcgtcgatcgtatggctgggttcgggaacgaccccgaatgtggcaatcaggattgcgccggtggtgatgaggatggtccctggaggcagggaaggcgaagagcaaaaaaggaaacatgatcagacactccagctgcttccacatatgaactgaaccaggctgaacgtaccgaggatcatgaatctggtgaacgagtcaccgaggaggaacctggcgaagagagcgttccaaaggagggagattgctccgagcggtgcgagaacgacgataggaagcgctccgacctggaagattgtaccgagaacattggatgtgataaagatggcgaacccgatgagccagagcggacgtttccactcgaccttccggttgtcgggatgggcctgctggttgatggtgtgggacttgcgctgtatggtcagtccgagcgactgaacgaatgatgagacgaggccgatggatatcccgacccagagagatatcggtccgtctgttgctgtttggtctg

SEQ ID NO: 321 - DNA, 520 bp, Xanthophyllomyces dendrorhous
ggggtgggcgtgggcgtgggacaatggatcgttctcgttgctgttgctgttgctgttgatattattgctgctatcctcgtcctcgtcgtcggtatggtggtaagagggaagaacgaccgggcgggggcgagcgggtttgcttgggggcacagtgaaaccctaatgacggccgggatgttctacctggccagccgtggggacaccgaggcgtgtctgtcgtgcggctggaacgagtacgggatcgatgaggatgctgatggacagacagcatacacacctgctggtctagaagagatggccagaggatatgtatgtgtgtgtgtgtgtgtgtgtgtgcacaccatgtcggatctatcaagccaacatgctaagccatgctaccaaccaacacccgcagatcgttgcccacaagcgacagacacatcgtcaggatgaatggcaagggaacagagagcacagagcacagatgactgatcaatctgagagacaacacacacacacacacacacacacacacaca

SEQ ID NO: 322 - DNA, 6617 bp, Xanthophyllomyces dendrorhous
acacacacacacacacatacatgctacgacagaacatcatagagatcccatgaacccagcaacctcgtgagagcaacgctggctcgtcaacttgacggtcaatttttctgggcaccatgtttcttccatcttggcacgtctcttgctttgtgtcgactaccactcgctccagagttgccaacaagacaaacagaacatacacatcgtctacgagagccacgtctcggtcggcaaccacactgagtacacagctacaagcgcttcttgtcgacagtcaagctttttgggagatatacactcggaaaggcttcaagtacatcattcgttgccgtgtttgtgtacatcttgtgtctgttgtagcacccgttctgatcatctcttgtttgtcccaacaggtcaggtcgttctagtctcctctcgtcagcggaacaaacagttgaagacagatctccctggcttgtctttttgtcttggaagcaatgtcctcggccatctcgaagcatggtgtctctgggatcgtcaagattgagcctgaagatgatgagatcatctttctgtctgaacctccgccaccccagaagaagcagcctgtagaaccttttagggaccagactgctactgctactgctgctcctgctgctgctgctccggtctctgcatcagtcgtcactaaccctcctagtgctcctgcttcatctcggacagcgtctggttcatcgtccgacgcttccttaccagcaaccaaccctcgtctcccaggtcgacaggccacccggtctaacggtccgcctccgcctcttccttctttccaacgtcgtatcggtgcatcagccgtatccagactcaattcgaccaggcctgacgcctcggctgtatcagcaacaggcaatccttcaatcgtaaactcttttacagatacggcacctcggacaaggcctgtgagcctgctctcacggatcgagccttctgcaaccttgcccatcgtccccgtccccgtccctgtcccggcacctgtcgctctgagacccactccagttgtctcaaccgtttcatccgcgccaacaactaagaagcctcctcagaggcccttgtcgcctaattcacggccaacagaccccagacgagccgtacgggccaggcaactggccaaccaggcttctgtcgcgccatcttctcaacagatacctgcctttgcctctggccctgcacctgcacctggctctgtacctgcccctaccgctgccgctgttgttgtccctacctctaccgccccccctcctatcgcaccgcctatccaatcggcaccaccggtctcccaaccagcgcctcttccgcttcctcaagcgaccgcatcctcaaaatccaatgccaatcgacccaatcctcagcccaaacccaagcccaaacctaagcccaagactacagctaaagccgtccccctctcgccaacctctcatgcgccttcctccagcaggcattccaagtctcctcatccctcaccacctatgcccgctcccactcatcccgtcgatatgtctgtctttcccaattctgatatgacgtcctatcttcctgcattccctactactccgttcgatagttacccgtacctaggcttttctccagccaaccaggctatcggcaaccattcgggatcgatcgcgtcgtatgactattataacactcatccttatagtgcacctgttcctcaatactttgctccaccgtacatgctagatcccaacttcactcctgtctctcaacagcagtttggccacccctccttccaatcctctcttccctcttgccaatctgtctacccttcatatcccgtcgacccaatcccccagcatacttttcctggtcacgttaatccccctggacccagctcagcgccggaccagaccaagtcgacagcatcacgaaagagctcccagtcgaaagagccgcccttaccgagcgcatccgttttactctctcactcatccgtacctggctcatcacatccatctcgctctgttcaacaaccgcccgtgacgctcgcgcaaccgtcggcaaaggacacgcaacaaccttctgcacaagtatctctggttcagatgaccgatccggctcgccgagagaggactcttcccatcctgtcggaaccaacacaaatcgctgcgtcgaacaaaccgccccatatcccgaacgcgaagtctgctgatgctgttgtaaagggagtgagcgctggaacggctcatgtcaaagatcgacagtcgaatgagtatcgtgtgaacatgagaactgaacctaaacattctgctgttccaaccaatccacaggctgtttcaggaaccaagccaaacgaatcatcccaggttgtccttccatccgatttggattctcgtagtcctgatgactctgcaacaaccgagggccgtcctatggctgtcgatgtacccatcggcgcgtcgcagaaaaagcccaatgtgaaagagctaaagcctgatctgaagcctgacttcaagcttgacttcaagtctgaattcaagcccgattcgaagcctgaattgaagcccaagctggagccgagcatcaaaccggacgtgaaatcactgttgaagacagaaggacattctcaacccgaagttaagaacagaaagacgcttcaagaaagactggccggggagaaaaagctggccgaagccaacagatcgaaatcagctctttcttttccaccttctgcctcacaatcacgttccgatgaatcgtccagtagacctttggacaagcccactgaaaagtctcgtgcaatcacttcaaatgctgctaccatccccccatctccactctttgccacgtcgtcgtcgtcggcggcggtttcagctccaagctctcttcacgcagctcatgcagatccttctcagcactcgaggtctgattatcgagaacgatctcctcttccccctccttctgtccctcctcctccttctgtcccttcccctccgcctcctcgcagagagatgcggccctaccatgattactacccgtctccatctccgccgcgaagacgcgaatatcgtcgaggttggctacctgactctcctcctcataggcgtcgtgaatccacaatagacagaggaagagaccgatcaagatcacctatgtacgatcggtacgagccgagatctcgggtttatcgacgatcaccatcatactcaccatcgccatcgccgccaccaccaccaccaccgtcgaggatgagaagagatctatctccccttcgcgattccgcttggacttcgacgcggcgatcacgttctcctgtgacatacacaaggcgatcccccccgcgttggtctctggttaatcgagtcgacccgattaaccgagttgaaacgcgcatggtatccccaccacgcagccgcgtgcgcgatgacagctcacgcgttgacatgggcgtcagaacggcgacatcccaaaccagttctgattctagatcgtctcagatcccatcgtcgttccgaaatgagaatcttgataggtctttagaattcgacgagcgatcgagagcaaaagaggtaggccgggattgggagtttggtaggcggcgggagattgaacgagaacgagcacgggtggcggcaatagagaagcgagagcaaagagcgcaagaatgggcagcagaacagcggcagcaccgacagctgaggcgagagcgagaggaagcgcgagaacgatccgaagcgattgagctgaggagaaagaagaaccaaacgcaacaggcagcgtcgtcatcatcggccagctatccaaccgatcctgattccatcgggcgaaaggtcagtttgcatcaaactgacaaaccttgtccccggctttccgtagcgaacgcaacgttctgtccacctgcaatggggacgaaagagcttcccgaattgcctattgccatcaggccggtggaaagcacgtctcgggagtcaaacgaagctttagcggccccatcccgaccacgaccatcagaagaaaaagccgagcaaggggatctcgaccttgcgcgcgtcgatccggttgacaccgcctcgctgccgaactcactctcgcagcagcgcgagctttcgggtgactctacaatcgacgttcctcctatacctcggatctcacccgtgagagattgcccgccgccttcggattatcaacctgaagtagatgaggttgagtttttgttggacgaaaccgacgcatggcccgttcatcctcctgttttcaacgatcggaatgaggatgaagaggtatatcagccagacgtagtgccaacaaactccttcgtaccaccagctttgccttctcctgttcgaccttccagccgatcttcctcggaaggcctgttgatcgattccctttactccgccactggtgagcctatcgcgaactttctgcccgaattatcttcttccccccctcccgggaagaagaagaataggaagaagaagaaatccggacccaaggctagcaacaagtaccgaatcggcaacgacaatcttgttggcaacaactccattaacaacagcaacaaaaccaagagcgaccaagtcaaccagatctacaacaagaacaataacaacaacaacttaggtgaaaagagactgagttcaaatatcgcggtgacggatcttgctttacctgcaagatcttcgaacactacgttcattgcgcctctgccaaacacctcgactagttccacaccgcctcgagtgaacactttagcagtgacttcttttgttaatgacgaaacgcccacgtcctcgcccagagtcaaccctctgcttgtccgtctgatgtcaaccgaaccagcgccccctcaacgacggtcgcttttagatcgcgcaggggtttcatcaactcgagacataaacgagggagcagacgggtgggcctcaccaagctcattaatcggccggttgtggaacaggggatcaagatgagaaaccatggtgatgaaaccgtgagtgcttctattgtagagttacttcgatttgctttgctgacgcttcctcttcctcatcctatttcgtatttgcttgactagtgatgtacatgaataaaccgtatttttttattctctgatctctttctttttccttactccttttgtgctatttgctctgctttctctctccgcgcatgtcaatgtttctcaactatccgtttgatgagcctcgggcatctatatatcacactatgctctttcgactgttcattcaatgtcgattcttatgtttagatcatccgtgcccgccttcctaagcttgatgaaaggaagatgagagaagcagttggtaatctcagagatatctgctagaaggatatgtcgatcaccgccgcggaatgaatattgataagatcgtgttttcctattcgcgttcatttaccatcatcaccacaaggtgcacccggcttctgcagcctttttgtcatcgctcccgccatgtccagtctatctgcagctcgttccaggcagtctcggatagactcatcgaaaagcgaggccaaagcttatgtatcactcttccgagcgtttagctctcagattcaaccacccatccgacagatcttggacctgaaggatgcgaaaccgtttggagactttctaacaatcctgtgaggcttgatccttgattcagaccacgacctgtagccttttacttgtggagtttgaagctgacgtgtcccttcttcctatggtatgttcaacgccttgcttgaatggtcatctatagagctcccgaaagcttctctgagcagtcggtgaagatcgcccctcggtcttcaccaagggatagctcggcgaacgactgggtgacccaatacaatagtctgaaaagacttcatcgggctctcaatatatttgctgagaaaagtttgggccagcctccaaatcagtacccggctccgaatttacaggctatgtctaaaggggacgagaaggaaatcctggccttttgtaggattgtagtaggcatcaggttcgtacatgaccctgagttttctccgtttttgtacgtgccatcttgcttacttttgaacccaactatgatgcttcgttccggtctgtctaagcgttcaagctactccggggaacgaggtgattatttcaaagataacaactttagagcaagccgatcaacagtccatcatgttgtccatcaaaccggtaagctttctttgcctatctgtgacagtttctcttggtgtctttcgtgttgacttattcctcgtttatatacaatggcgtctctattcgaagcttctcgatcgggctaatccatcagaaacgcctacgttgtcttcatctctaccgagcgcttcaaacgaagccgaagaatcaccacacgaatctgaacgggcccggttggctctcgaaaagctgtctcttgaaagctcttataacacattgaaggaggagcataacacgttgaaggaacaattggccgatgtgctcaaaaagaatgggaaggaaggttcaatggccgctgatagtaatcgggaggattcgaatatgaggtcggagatcgataggttgaaagacgaattgtatgtctttgttctcctttctatccttgatgtctctgtct

SEQ ID NO: 323 - DNA, 12656 bp, Xanthophyllomyces dendrorhous
ctgaattcgatatatcatccgagtatctagacgtagaagtgaggataatctgagcgatgcggaactagcactcgataaacagacacaagtcatcgagagcttaacgagacgggtaagctttgagacttatcattagttcggtcccacagtgatgcattatccatgctgaaatacatcattctctatttaaacaggtcgaggaattgaatcacgcgtcaacagagaatgtcaagttgaaagatcagctcgatgagtgaggtcctggtacatcgagtcgcccatccgtgactatctcgctgatcggttatcatcgttcttgtctgatcaggtacaagcatgcagccaataggctacagaagagtgagaacgctaacaagaagctcaatcaaaagttggaagagtcggccgggcggagacgccagctcaaagtgcgcatatttcgatcattcttcctttctctctctccttttccctgatacacccaactgactctgatggtctatccattacaatcgtccaataggcgttagaagaagagaacgcttcgctagtagacaaaaacgcagcgttagaagaagatatccggaaggttagttcatgaatagtctcttttcatgaatcatgcgcacagatctgattgtatggccaactcgtcaatttggaacaggcagcaccacttaaacgtatgaggttcatgtacattcaaaacacaaagtcgaagtgatcactgactcatcatctagaacatcaggcttgaacgagagttatacaattcaaatcgctcgatgtgaagatcgagaaaaggctcgactaaaggaaaattcaggtgcgcttggcttttggcttggtcaccgccttaaaactcggtccctgaccgtttgtgttgattaccacagagctttccttcgaactcgaacaagcacgggcccgcttgcagaaggcagagcaagacttgacatctagtcgggatgaactcgaactcaaccacgaacgcatcagggagctagagctcaacagtgctgatggaaggtctcgacgtcgatctgaatctgatgaggacgaagacggggcaggagatgtgtcgatgatagacgagctgaatgagacaatgcagggtaccacgaaaactgagtaagcttcttcagattctcgtcttgtcctaatcttcaacttcggagtggcctgttgacatccagagagtttggactcaaaaacggtgttcagtctcaaacttcaagttcgtcgcctgcaacgagagcttgagaattcccgaacagacagtatagagagctcgaaggtagccgtgttggaaaatctcttggacgatgccagaaagatgaaggatcgatacgagcaggattatctggcatcacataaggccaatttgacgcttcaagccgatcttgagggaatccgaaatggcaagagcttgggagatgggtaagtttgaacaaaattcgattaaatagtcattcatgtgtgagcctggtcggcatgtccttactcgtcgtaacatgcaatggtttccaggccggaagctgcttcggctctgagactgaagttgaatcaggtaattggggagttagactcgacaaaggaagttcttgcagaattagaggtgagagttaacaaaatggtctcggccatgttaaattgggtgcaatacatgacccgtactgaacgatagtgtttgtactatagaccaaatacaacaaagcgaatcaagagcttacggtcgctaaatctgatcgtgaatctttcatttagtctaatctcggccaatcgacattgtactgacatatttatttctttgtcatagtgacacttgttaataaggatcagatcgacattcttcatatgcttcgagagtcggtcaatgaagataaagtccagctagagtctgaccttatgactctgaagcagaagttagtggaagcaaaagagaagaaccatatgcaagtggatcaaatcaatgggtttgtgtttttgttatctgatgagttagacttatagccactgatctatgtttgtttttggaatttcgatagactactgttagagaagatcaatctgcagagtgatggaattggccatcgggagaagatgatagagcgtgagcgcacagttgggtaagactccgtcctttgctttcatattatactcaaaacacaactcaatatctcccctcaataactttcatgcagagatcttcgtgttacgctggcggggcgggatatcccagacgacgtcaagacgcgtttgttggacctaagcgaggaaaagctctcgctttcgatagagttagcgcgggcgttagaacaagtcaaatctttgacagatcatgtccagaatgcaaagaaggttcgtttgatgtctcttttgtttgtgcacgaactcttgtcaattaaagtattcaccggattaaatcttcattgtcatggattggtttcaccaaagttcatgcgcgagcaagataccgtgatcaaagatcagaaggaaaagatgacaacaggggtaggagagcaattcgccgaggctcgacagagttacgaaactcagatttcgacacttcagaaggaagtccaaaagaagactgtacgtattcgtgcaaggagatacagagcgcttttcttcgtctcgatttgaagaaaaaaaacttagtgattgatctgtttgtggtatgttgtatgcatcaggccaatatcaaggagatttcgcagagctacgctcatcagttccaagtattgttgtcggcctatcaagagattggcttaaagatttcgaaggatcatgcccggggagtcggtgtcgcttcatccgtggaaggtcgaggcaacacgccgcaaggcacgagctggctagctcagcagcgaatgcaggtatgttttcgcactttctttcttttcaaggcacctgctgaatttagaacgattgaagcaaagaggaacttactgtttggtatgattgggtttcacaactagttgactggtggactccgacgctagagttgaagacggatgcttttactggcttttttttcaaatgaggtattattcttctctccgaattgttgctgttctctcttgggcagcgtacagacggacgtatacaccatctctttgatcacctttattcccctgaggattgcctttgatttatatatgtttccatccgtagatacccgtgaggacgtgattttggaagactggaggatgagaagatgaaaagatgaagatgacaatgcagggaggagaatgtgacccggtagtagatgtcgataagaaccgaggtaatgaatgaggcgagatagcaagacaaaggaacgcggtcgaaagccttcctttggatttgaacgactcgaacgaagatgtgatcagaacttcggctcagaatctagaattgattccagaaagctcaaacatctctactgattacaacaacctcatgagatacaacgacaggtataagaaagatcggaaggggagcgaaaatgggcgacggattaatcatcgtattttgaaggaactgggacccgtgctctcttcaaatctgaaatgttgtattgatcgtttaggcaggcatatatgagaacgaagacagtttcagtcaagaatccgaatcggctgccaggctgaatggaacaagatgagagatgtctgtgggggcccactaaccaggataagcataagggatatcttcgatcctcggaatgttgttcactctcttataagtacggttgccaaagtagtatgtaggacctatattcgtttggataaattgacggttattcaatcatgcaacttgatggcttgtgttcgtgagtgcatagaaacgaaagaggaagacgaaccgactagaaagatggcacaacaccatgagtagaccggatattcatgaaaggctttttgctgataaagcgaaattgacatgtaaacataaccttcaccattgaattaacaaacacatgttatatatacagactcacgataggtctgtacacgaacgacatgatggaagaaaagagagatgagagtattcaaagatgatgatggttcaaacagaagaagagctatggaagatgcgacgggagaagctgtaacactcacgtgtgtaaccactggctatgtttggtctagggttagggttaaatcacatacaggacgagcagggtatgagtgacatctacaacggtaatgatacggaaaggagccagcaacatcctcgctgctgttgctaatgcttctctatgatggtatactacagttctttgctgcttgtattattaaatcgagtagaaagagacatataattatcattccagtgctcaattggtcaagctgaacatttaagtcgtctgacctgaagacctttgaacatggtgatcattcttgttggccgtgttctcaccgctatcaccatagttattgttagtaggctaatcgattcataggctgaggttagatatctcgctcgaacttctctctcatcttgctactcaaaaaaagaaacaaaaccccatcagcctcttctctagatatgaattacatctacaaacatacacaacaccacaacgatccattttgccatttattttgaggatattccgtccatcttgtgcacggacgacattgtcatcgcaaagtttagtatgctgagaattgtttcgtgtatacttccagggtttgcttgcgctcaggctaacaccgacacaagctcctcgtctgcggttcttctagttatatccagacacattacattcgtcttttttatgtcttcgccattcttgagtctttgtacatattgagctctgcacacgacggacagatgatttcgccactgttgtctgtagctctccccatgtacaccagccagtttatcgcttcttactacgataatattgttaaggattcagagttacagattacttacatcgaggttgaagtcgatacacttggtcccaatccctacttttagtgaagctatgtcatgaatcactcgggagtccaacttgatagatcgtttactcatacattgccgttgccatcaaactcatattttcttttcttgatgcattccaaggatctttatcgctgaaggaattatgtctctctgtgatttatgatatccatgttcatctcgagcttttcatctgctcttgcttctgacaccggaaatctcaacttcaaacgatacatttggcgctgtattgttgctgtctggctctcctcaaaaagttgcttttcagggcttgatatccctattcgctgtcccactgtaaacgtacacagtgtgacccggagttgtttttcgcgcctctgtgatagcctctcttcctttcttactaaaatctgcatttcagatgagcatacattgtaattttcaaagtatcattacgcatcgtcccaatcgtcgttttgttaggagtttgacgagaacgttcactaaggtgatttacctaaagaagttcacaatctgtttcagagtacatgaaagtgactaaccccagaacgccaccttctctttagcactccagtcaacttaggcttccttcaatcaaaccagtttgactgcttcttccatcttgattgaaacattttattttaaaatgacctcggaccaaatactgcttattcttgtcggagtggtcggttctgggaaggtatgacggacgttgttatctcctcttccgtttggaatatcccgatagctgacagtcaacactaggtttgacgtcatctttgtgttatgaaacacttatacagtctacagtagcgaacgagttggagaccgagcatggctatgtgcgttgtaatcaggatgaaatgcaagggaacaggcatctggttgagcaaaaagtctatcaggctcttcagaatgtgaagatcacttctcattctgtcaatgtcatcttgctcaaggctaattgaagagactttggttgattcttcaatagggaaagaacgtggttgtggatcggacgaatttcgactcatcgtacgtgtctctttgcgttgagctaatgtcttcagatcagcttcttatcttgttttgatcgtcatattttactgcacaaagccaacgatcaaagtttctgaatatatcctccaactttccgcacgttaaaaaatgggccttgttttgtaagtctgatatgtcgtcatatgtttcctgatactttcaggagtcgataacaaccgaactgaaccaaaggctttgatcgatacagtggatattccaaaagatgtctgtcgaacgcggcttttgaccagaacaaaccatccgacacttgagcccgagagagctatcatggttcgtctctgttcttactttgcaattctttcaagctgagaactcacatgtatgcgctcgtctcgcgaaataggttctcaatcggttctctaaagaccttcgaccgccaacggtcaacgaaggttttcatcgagtctatcgattgacaaagtctcccgaagctggtacattagatcaagtccttttctcggtcgagcagaacggactcgtcggaaatggaatagctcctttcggaggaaacaggcaaaggcatgacggatcaggcaacgatagtggagtgagagaacacggtgtaaatcatagtaggcgcgctgatgagcgaacgggatggtcatcggacccaccgcctagcctatggggaagttcaccctgggctggcagaaatgggcgttgagactctttctgtatcgttacaaaaccacacaatatgtacgaaagcattttaacgcaggatgaagccgatcaccatatagaatggacgaacaaataagttttgaagttgatgagcggattttaaactcggtcaccttcccccgtgcggggtgggtgactaagcaatcccgagacccgaggcgacagaggagaaacccgccccttgagacaacagtcttcctttcttctagcaattcatctaaaatcgcttttccttgtctccgtcccgtttccttcttcttcttttgccaccccatctacattctacatcgtcacaaacccacctatttcatctgcatctcatctagactctcagctcaatcatgctctattccattccttttgctatcctttcaagtgcccttctcgctgctgcatctcccatcctttccgccaggattgttcccactttgtcctgcaaagctatagacctgtccgagactcctaatctctttgtccgctcccagaccgtcggtactcaggctgtcaagcttgatgtcgattggaattccaatctgacttggcaaggccaacctgacgcagcacaagtcgtcgatactggtgtgtttggattcgaagagtgcaaaggccgagccatcaaggcgttcgttcatattccatccttcccgtgtcagatcctgccgagaggcatgataacgaatcagattgactaatgcttttcttttctttcctttcctctttgtcttcctctcatctacagaacttctgactcattaatctttggacacgtaacttggactgtgctagatgttcaaggaaaaaagatgaagttgtgcctgtctgccccctgtcagtctccgatcgtcccgtgttagccgagattatgtcctgtgctctgactcaccgaatgctgtgcttgctcggactttcttccatcacagatccctacacgggtgtcactccataccttgacaagtgttcggagagtgacgacagttctcagttctggtgtgtagtcatctatccgaatattcttatttcctttccttcgactgacccgcgtcttgtgatcattataggcaatactgggctcttgatacttcggattctgctcatcctgttctttcattcgtgggtccggccggttcggttacgacttacaagaaaggatatctttcgcccaaaacctttgacgcggacgccccgcttactctcgcatctgtcaactccaccgagagctactttgcctacggcattgacgaataatctttggatagtgttttactcttaattaataaaattcactcttcgtatgtgcattggtttttgactgcttggtaaaaaagctggtctgcagccctgcagttttatgtcttctcagatctcttattgttactattgtgtattctcttgccgttcatccgaactttcttctttgttccataatgtttcatcacgcttgtcttttctttcaatccttcatcttcgttgtacaatgttcatgatcaatgtcttttgctctgatcccaagagcgtatgtgtaacgaaccggctacttgaacggggctcaatcgcagtaatagaatgtatgataattcgtaactgttcggatggatggcttaaaaataatctgattcggctgacgtcactcatcgaaaacgacgacgacgacgacgactacttcttcaatatcaactatatttaactagatatggatcgatttcgaccacctaaccatccatacatcaacccacacataaaccttcggtagatctgagaacgcacggcaaattgggttgcgtagaatcaacccccttcgtccaaaaccctcaactcaagtttgtcaagtaagttttagtgaggaaagagacctgttgccgcgctccctttgttccttacattgtagcttctttccttctgctgactcgctgaacgttatatttgaagacctgatcgattgcgataatgtctcaaactaacaagaaacatccttatctgtctggtaactttgtgagttcgcgggtggtttgcgttcttattgattctgttcaacccgatccatggttgcttactctgtcctctctttggaaaaacgttttagcgacctgtttcggtggaacatcccctcacaccatgtgaatacactggtgtaatccctcatgagtttcatggcggtcagtacgtccgaaacggatcgaaccccttactttctgcaaaagacccacatccgacgtatcactggtttgacggtgacggcatgctcgccggcgttcacttcgatcgggatccaatccaaactgggaaagcaatacctaaattcgtcaatcggtggatgttgactgatatacaccaggcgaaccgttcgcttcctatcgccaaaccgctcttgccttcgatctccagactacttcttcctagggctcatgtaccaaactttatggaaaacgtccgaacattcttaactaccatccttgcgcttattcgctcgattttcatgtgtatcgttctcagagtggcgaaactctctgcagcaaacacaaacgttatcttccatgacggacgagcgatagcattatgtgaatcgggatccggatgggaggtgcggttaccagggttggaaagtgttgggtggtggtgctttgagggattggtcgaggatagaggtaagactaccagtggcctcggtggtcgaagtggctggattggtaaaaaattccacgagtgggtgacggcacatccgaggacagatccacagacaggcgatcttgtgctttacagctctgggttctatccgccttatgttcatcactcggttatcggtaaagatggacaagctaagagaatctccatcccgatcccaggcgtatcagcgccaaggatggtaagtatcggctcctttgtgtggtattctttccaagattcatgactgtgtgtcaagtaagattgacatatcatgtgtttcgaccctacatagatgcacgattttgcctgctcactctctcgatcattgattatggatcttcctctctcactttctccctggaaccttcttcaggcagaatccatgatcaaattctaccaggatcagcctagtcgatttgggatcttctctagaatgtatactggcgcagaaggcgaggatggtgtcaagtggttcgaagataaggaagcgtgctgtatctttcgttcgttctcttctccttatttacattcattacaacgttacaagatctagagattctgattgccttgatttttcaatccgaaagacacagcaaatgcgtgggattctacgactgactcagactgtgcggggtcgttcaacttgttggcttgccgatttcgatcagccaagctcgtatccctggctgggaatgttaccgcacccctacctccaccgacagtgacacctgaagaagaagacatttgcctgttgacctactatcggtttgatatgtcctcctcaggttccgaaaataaaatcctggatcgattcccgttgctgtccacaccgtttgagtttcccgcctttccgcccgcgcttggaatgcagtccacccgttggatctatggctgttcgctttccactggaggctttgatgcttgtcttggatctggagcgaagatcgattgcattctgaaaatcgatgtcaggtcgcttgttcagaaaggaatgaccctctcgaaagagcatggtcttctaaggaatacaccagtagacaagcggagtgtaggcgagttgctagaggcgagaaacagaggcgaacaacctggaccgatcagagtattcaagtttccggagggtacacatggccaggaagttggatttgtccctaagagtggatggaaagcggacggggagcatgagatggggaaaggtacagaggacgagggctggctagtatgctatgtattcgacgaggcagtaggactcgatgaaaccggagagtgcaaagtgagagcaaggagtgagcgtaagttcccaccttcttgactgtttcttcaagcaagtctaattaccgacactaacagtcctctctcgtcttggaaaattcaagtgtgggtcattgatgccgctcagatcggcttgggtatggtaggcacatctgattccacggccgttgtttgcaaaatccatcttcctgctcgaggtaatccagaagtcttctcacagtcaatcctcattcttgaagaacaacgttaacacttctcatttctggtttttggacatttaagttccctatggtctccacggtgatttctttacagaatctcaaattgcctctcaaagacctatctcttcaacaacatctctgattcaaccgagcgctcctatcccttcttgggcgcacgatccatcatcaggcccaatcttctcttcagaagggctcacagaggttgtccatgaaaaggcgaccgaggatgaggaagttatcgacatcaactgctcatggactaattccatcctccaaaggtggagggatcgttcacgcaaagaggttctagttagcactgtccgattcagcatgctctttgtgtgggtttggacagtctgggcaggtgcgcttgcaaacgtcataaaattctagttgatatcaccactatttatcttaagtcttctatatgtatcaccttactatttcttgatttcctggaatgtataattgcttgtgtatcgatatatgtttatggaatgttaccgttaaatgagtttccacatgaaccgacgcgtcaacgcgtcagttcatcgaagcaacgcgtcttgactacacgcgtcgttaatgtttcctccttcgaccattttcgtttgaacggccatcaccatactcactgagctcatcgtttctttatctttcttgtggttcgtcaatctgaacacttgctcataaaatatatcaaaatatggcacctcaagaggccatgtccgatcagatcgtgtctctaccagcccacacaccaggtctcactagggccgcgttttcaacaaacgggcagtaggtgtttgtcgtcatgaacataatgcaaacacaacgtgtcccgggctgaccacctctatttcgacctctatgttatacactacagactcatattcaccgctggaaaagacacaatcgttcggatcttcgaaacagctgctggagctgatgtcgagcctagacttttggaagaacattcagacgaagttaactggctacattgctcggtacgtttcttttccttgcctcccctttcttatatatatatagcatagtcctaacgtcattctctgatggggtgtttaatccttcggcagaaaacccaccttataacggcttgttcagactcgtcgttgcggctcttcagcttgcccatcaacggggacccttcaggacaaatcacgtttgctggcttgctgacccgtgcttcgggaatggcaattcgatgtgccgtgtttgacccaagcggtatgcgagtagcatgtgcttccgagtaagttaaccatatcattcaaacatgtcaactggaatcaaacttactgaatctactcaacctttgggctattcgacagcgatcttcacatcaagatcctcccggtctctatgacttccctcagaacacctctcgtccttccgtcagcgcactctcacacaaagccgcctcggtctctcacatggtctccagatggaacaattcttctttcttcaggctgtgatggcaaattgtcgatctggaacacctctctctgcgtgctcaagccaaacacgtcaaccgatgatgacgaatttgatgatgacacaaacgacgatgctactggaaacacgtggaacccgccgacattattgaaaagtttggagggcatgttcgaggtaacagagccagaagatatcaaatcaactacatccgtgtggcatcctagtgggaaatggtttgttgtacctacgaagtcgcatggttcgtaaattctttctggagct

SEQ ID NO: 324 - DNA, 32807 bp, Xanthophyllomyces dendrorhous
aattcatagaaatattacaaattcaaagagattcttggtcgaagatgggtctgtttgaaaatgggggtcataactcgtcggtaaccgaactttgtttctcaccaaacggaagatacctgggctcgtctggagttgacggaaagatcctgatctgggaggtttcgactaagaaagtcatcgcctcgtgcgtttctattctctccgtgatttttctcaagcatggtttgagcgctgactgtttttgactctaatccctctatattatcgttttagatacgtaccgtcaaagtcttcctcctcggctatcacgtcactccaattttctcccacgtccaacatccttatatacgctgacgcatccggcacctttggcagatggaacgatccgattccgtctactttccttcatccttgcgagatagcaccttcaactgaagcaagtcgccgagcgagatcacctctatttggcgacgacgacgatgatgacgatacgatcaataacgaggatgtaaacaaaccgcccagaaagatcaacgccgatgacagaaaagctacaatcaagaagaaatcccgagcaagggaggaagaggatgacggagatgataccgctttaggagatgaggatggcgaagagttagaagatgagatggacgacgatgatagagcattccttgccgacggggatgaattcgaaggcggatacacgggttgggcccgtgatgaaaaatccaatggcagaatcagagagaaggaaatcggtgagcaggtgtatttgtatttctttttcttctagatgatggcaatcttcgtgtttgctgatcgctttgactgatttcgtccaatagtcagcgtggctaaatctcaacctgcgttccaacctggttcaactgcctcacgcggcaagaagcgatacttaggtttgtgcttgcagttcgtttcgatttcctatcaaaggtcagagctaatcatatacatggtcttggtgattgtagctttcaatatggttggcgccattgatatcaccgatcaagagacccataatgtggttaatgtagagtttcacgacacgagccgtcgaagagggtttcatttccaggatcacatcaagtacgatctggccgctctgggttagtctcgagttcttttcttcgttctcctgctatacgcgctcccgagtattgattaacagaaactgagttcttgactgcaggcgagaagggcgcagtattcgcctccacaccggattctgtcaacccgatttctacacttcattatagactgttcgatacatggtcatcaacatcctctgaatggactcatgaccttccgaaatcagagcgcgtagtcgctgttgctgtcggtggccgctcatccagtgatgtcaaatcatctaggcaagatgatacaacgggcatggtcgttgcggccacatctaagggctatcttcgatttttctctggtagtggagttcaacggtatatttggatgctgggggaggaagttgtctcgatgacggccgggcaacaggaacttctggttgttcaccgagaaggtggaacgagtcttgatggtatgttcatctttgtcgatctgcactctgaccataatatattgctaatgagcattataatcatcaggctgccaaaacctgcggtttaccttagtaaaccttgagtctttcgatataatccaagaaggtcgattgcctcttcctaagtctactactctgaagtggattggattctctgatgtcggagtacgtcgatccataaatattccttctaattttttaaatcctgtttggcgaatctgaaactttgttcttttatctttagaatcccctcatatatgattctcggggtatcatctctgtccttgatcgattccgccgccctcaccaagctcgatgggtgcccgctctagacactaatttattggctcgaaaagagggcaaggatgagagttactgggctgtgggggttcaagatggaaagtttatggccgtcattctcaaggtttgtgatcatacttgattaatcttccacccctcaataccatcaacagaactctccaagagctaagcagtttgttcttacgcatagggtcgagtaacttcaccttactttcctcggcctctcatctcggatcttgatatgaacatccctctcctcaacagagaaaatcagcatggccagttagaagagtggtaagcaagatgatagtaatgtcatttgggagtcaacaaaatgttgtctaacctgccacattctttttgattctagtgtggtccgacagcgtatggaagctctcttctaccgcgatgctcaaattgcaagccagtcgacatactttgccgacgaggtcttccgacttgagatcgcccaggataaatctctattacaacttatccaaactgcctgcaaagccgacaaacttgctcgtgcactcgacgccgctcgtctactcaactctactaaatcaatcgactctgccgtgcagatcgccgcattctaccaccttccgggtctccgggaaaaaattacggaacttcgatccttgaaggaggacgaactttacgagcgtgatcagctggagcgaagggctggtaaaggcggtagatggggcaatggagggggtcaatatgtccaacctggatcagaatttgattacgttacttctaacgccgttcatcccaagacgacgaaaccatcgaccaaatccgtgccggcttttgcgccgaggcctgtaggcggcaaacggacgtttgctgctacacctgacccaacgcctgtttcaatctcttcatcgagactgacagtggactcgtacgcggtagatgaaggatctagagaagagtcattcattccagaatcatcggtagacgttggctcagaatcccatgaacgaggccatggtgacgaagaagagttggaggacggcttgaagaggaagagaacgggagatacggtgatcgacgatttcccggctcctccagagcgcaggaagcggggaaatggggaaggcgatatggcgccgcctctgaagatggcaccgaagaacccatttgccaagaaagatgccaactccgctgcctccaatccttttgctcggtcgaatattggaaagccggtgactgtgggcaaaagcacctcgttctttgatcgcatcgacgatgccagatcggttgaagattccaaatctaaagatagaggcaaaaaacctactgccggaacgacagcggttaaaggttcaaagcagactaccctattcggtctacctcctggtcaagagcctgtcaagaaaaagtctggacgaaagcctcttgagaagaacgatagcttgagaacggttgaatcagatgacgaagaattggatccgcaatcggtttccaataaaaaggcggatgggatgggacgcgctcaaaggcaaagttttgagacggacgtagaggagtcgttcgaagatggaacagagacgcagagaaacgaaggacttgatttagaagaaactcaagtcgattctctaatggagaacgatgacgaggagccgatgatgatagatttgggggacgaggacgacgttgaagaggccgctgtaagtaatattctttgatctggccgcgtctaggtacttttcctttcttttaacaattcatctgacacatgcttatgttttctcctacacgaacatacttcgctctgcagaaagagaacttagaacctgtgaagaatgacggggtgtctaaactagctgcgttccggatgaagactgttgcttaggctatgatcttcataccttacgatcacttctgcgctgtccttcaatctgtatctttccttttgttcttatcggtgatataatcttatcaaaacaattcttccctaccactcttcgtgactccggtctgtatgtattcattgtgcgataccctttataacgaatgatgtttaactctagtgattggctccacaacaagtgacggtcagaggaaagaccatatattgaatattcttctaatgctttacacaacgctcttgttgacgttggaaaagccgacgccgagacaactcaagatgaattcttcctttttgggcgcagatactgccgtcgactcgtcgtcatcctcatcctgatcggattctgcagaagattttgaggcgactgtgggtttgacaggagtaattttgaaagtagtagaaaagaatgtccgaatgtcgcgcataagttgtatgcttcgttggtgtcaagccgagataaaatatgaaaagctcgacgatcagtaactgtcatccgatgcgttgtgttaagaaagaaaatcgtcagagatactcacgaattggcacttagtttgcccagcctaactcttcccacatcttcacttcccaataccatagcgagtaagacgaaaccttgaccgtatgttcccacacatccacctccactgatctcacttaacaagagcgccgccgtggctcgtcctacgtcttccggagtctccaacgaacccttctcgtaaccaacctcagcacaatgcattgctcccgtcgttgattctgaaagaagagagagtccatagccgggagacaatcctgattctgcagacttgtagggatcagtgtagatgtatatatctgggatgaggggattgagcaaacttctggaagactcgactaatcgatttgagaactgaggcgacactcggaccgaatgagccacacctcggattctcttgactcgacctgggtccacaaagttcaacgtcttgacagatctgatggatggacaacggaacagaatttctccaccaccgagcggctcagctcctcgcttgacgatcttgagttcaagtccttcgagttctccaaagagttgcatcgttgggagaaggtaggttctgatcagatcaacacccaagtcttttcggccagaggtgatacctctgagagttaaagagaggtccttctttccccagaaagcaagctgggataacggctcaaggaaataaccaacagaaacggagagagggcaatcgtgggtgtggtgtccgccgagaagaacaccaggggtaaatagaagggaggtaccggtagtagagatatcgatgatggaaccattggtgatcttggagagaagtcggagaagcgaaatttcatgatctgaagagacgttttgagaaaaaagaaatacagacaaccatccagagagtgaattccaaagctctgagaaagaaaagggctagaaacacacgaacctcggagacctgggttcacatcgtcgcttcggatacctcctatccgaacggtccttccagacagcaaactgagaacaagacgttgcctaatatagagatgcccggtaaaccggagaatgtttgaactaggctgtgccatggcgagaacgaatgagcgacgatgatgaggacggttggttgtttggatggtatccaacaggtcttgcttcagctaaacactcgaaaatgtttttggaatttttggcggtcatcggttagtaaccgggaactcaaacattttgttcatcctgcccaaccaggattcttgctttctcaaccaccatccgtttcttcaccaatcatgtccgaaccagtttcttccgtaaagtgagagagttttgattgatcctgtatggtagctgtgcttgagagctcatcgttcaagcgtttcgacatatcagaacacctacgtcctcggcatcaaaacccaaaaaacggttcgttgggacgagctcaacctcgtccagaactcgagcaggtgggccgtccaaggcgagagtacctctcaaccagatccccgatgagatcttgaatgatccagaaatcaaccgagccatcggggcgcttccatccaattataacttcgaggtatgtgtctattttaagggataagtacgttttatgagagaatcagtcaagataaccactgacaaacgacatattaacttgatcagatccacaaaacgatacatcaaatgagaagagacaacgtgcaagccgttgcgctgcagatgcctgagggcttgatgatttacggatgtctgatcggagatattctggaaaggtaatcgactgggacgtgaccttggaaccgcttgacgtttcaaagctgacattcaatcgacccttttgtactttcaaaggttcacgtcagcacatcctattcttctggctgtaagtggagtatggaacaacgtcttttcatttcggaactgaatgtgactgacaggtgtctcgaattgtttcatcattcaatatctctataggatgtcacatacggtatgcctccacttttcatacctttcatttcactattcaacatcaaacgtgagcctaaacaaagtgaccgcaacgtaatacataggcgcatgttgtatcgacgatttcactgcccgatctttgggtgctgatatgattgttcactatggtcactcatgtttaagtaagcttcttgtaacttccgtatgcttcgatttgtcacgttcaagctgacactgatttgttctgcgcgaaatcatcaacccgacagttcctaccacgcaaactacactcaagacgctctacgttttcgttgaaatctcaatcgatgcgcatcacttggtgtcaactgtacgaacggccttcccgtcttccaaaaacgcctttggccaggcggttttgcatgtcgatcgacgagctgcaggacatgcagtcaaccaagaagtcaatgaacaactacgagcagaagcggctgaaaaagtcgcggcagccggagagggaaggaagcgtatcatggttggagttgagccggaacctgtggaggatttcccaaacccaactaccgaagaagagaagaaaaacaaaacaaacgagaaagatggtgatgatgaggaactaccaacaaagttggccttggtgtcgacaatccagttcgtagcttccgttcaggttctacgtaatcaactggaagaatccctacctccactttcatcacagccaaccaggagtgagcctaccgtcgaaggagatgctcaggctctggcggtgctggagaaagagaatgagaaagatgaagaagagaagggactttggagaggaaagtatgagattgttgtcccccaggccagaccgctctcgccgggagagattttgggttgcactgcgccaaagttagcgagcgacgtcgatgcattgctgtaagttgcgctgtattaatcctttcaagattttctcgttgattcacaatcggtctaaattcactcttccaaagctatgttggagatggtcggttccatctcgagtccataatgattgcgaacccgactgtaccagcattccgatatgatccatatagcaaaaagttcactcgagagctgtatgatcacgaatctatgcgagagagtcggtcccaagctgtaaacgtagctcggaagagtttggtggttgatacaacggagaaaggaaagggccaaggtagctgggcggtcgtgttgggtacgttgggccgacagggtagtgtaagcgtgatcgacgtgagtatcttctgttctctatatatgcgtatgatttggctactaatgatactttttgtctcgttcaacggtcactcgccagtcaatcacgtcgtcattggccgagacaaagacagatcggacagaacctcctctaccattgctgatctctgagctctcacctgccaaggtgtcattattcccgccgtcgatctcaatttttgtgcaaacatcatgtccgagactttcgatagattggggtgcagctttcgggcggccagtcttaactccgtacgaggctagtctggctctaggcaaagtcaaggtctctgctggggagaggacggctggatgggaaggaggaatgactgaccgaggcgaaggctacccgatggacttttgggctgtgagttcctataccaacccaatattgattgacaagaagaaccctcgaagcatgagctgtggctgactatcgaaaatatcggaaccttttcctaggacgactcgttgggaccatggactcctcgtcatggcttaggtcgacctaaacgaagcgccactggagcaaagccagccgttgtttcgggggtggcttgagggagaaagcatatgtttgcgtgtgtgaagaacactttgtacgactcatcgatgaggtaatgattacttatgattgcaagattagccgagcagctctctttattctcaagaacgcgatctatgttactaccgttcatacaacctgtcccggctttcgttcaattctctatcagatacaagtgcaagataaccattgaataattctcgatatcaagtaagatcgagtcttttagattgaaagtcatgaacagctagacaagagacatatccgcacgacgaatatatgatcaacaaaactttaaaccagaaagaaatgggttagaccgtttcagacgtccacatgtgccatcgatatgaaatatgatcttgacgacggaacttgaaggtcgttctcctctcactccagatgaagcagcgcttgctcaattccatagacacatgtgttcgtctgtggggccaaagtcacggacgacgattattgacaatacaccattcatatctgatgggattggcaaaaccttgaagacccggtccttgtgatttgagcgtccggatggtagaacggacggtcaacctccttccgacttcttcttctggcttggtagatggccgactcgagatggctcagaagtttttctcttttgggagtgatgctgaccatcgatctctgtacaattcactcgtccacacctttctctacatatctaacgactgtatactgaccggtgatcttgcatcattcgaacgatggatcccttgcatcgatccgataaagactctcttcttgccactaccaatcgttcctttccttctaatcttaccaatgccctcgaagcggatcaacggtccctccgagcccgacggaagaggtctaccgtatcgtgccgtcagttatgtgtagtatttgctgcttttgtcatcttgttgacctttgcaggaattatctttattatctacactgtcgcaagtgacttgtatgagtacatccgggaacctcatcagtttgctttcacaaccgacgacacagtttcggtgatcaagatattatggagaacgtgtgcctcaattcgatgttgtggccaacgtatatatcagatttggaaacccgctcacggttttagagtcgacaggaaacgattcaaagcctgagcttcccagtgaaaaagagatgtttggagaatgggagtcaattttcagtaaagtgatctactcgaacatggatatcaattccacaaccaagatctttcacaagaccgtcgagctgcctatctcttacgatgttatgtacgtggttattctttggaccttcttatgaagattagttctcgtattttttgtccctaagtgttgatatccgactctgttgacgcttgtcttgctcacaaaactttggatcacgaatgtatcaacctcacacgtactttcctcagatcgtcaacacctttgttgtcgttccatccgacccggatcctgtcttttctctccctcacccacccaccttgacggcgttcaacttgacagacgctattcgtccagaccctgcatacacctcatggacaaaatatcctcttgaaaagcttgtccgtcctgtcgacccccaactgaatactatagacagcgatgacacgtctcgttggagaaacatctctgcatcgcttgatgcgttttacgacaccgccgccgtcaaagagttcgccctatggcctgtacaaaacagatggactagctggagccgtttagactcctccacaaacaagacaaatgagacgacgaatagtatctttccagtaccgaacgaagtggatgagaggaagctgcttcatgtccgaaggaatgcgagtgtaaagatcaagacaagcacttggatctcgatggcgaagcaaactcccgtttatgatttggaagagtatttgctttacagggatagcgtcgttcgttcgatcttgttctcaaatcgaagattctgtaaattcaaacgccaatcatcctgatttcctcttattcttttttcttcttctaggagttcaatagtgggatgacagatatcttgagcaatattgatcaagaccagctgaatcagcgaggaccaggtatcctacaaagagattttcacatcgctggtcatcccgtctcattttgttcaaaacgcctctctggtagacacacctaaagagagaagccaatctgatatcgagattgagcgtgatttggcattctatggacccagtttgtctttacgtatgtaaaatcagatcaaataatttttcttactttctctttttgaagcatcaattttgatggacattggttctgacttcttgacctcgttcgttcttcatcgttgctgatgtcatgattgaaagatggacacgcggctggcccgtatgactggatcactctgcctcgtgttaatgcatcatcgagcgatcaacctggtagggattctatctcattcatctcatacaatagatggaacatagagtgactatcatcatctcgagctgagcgtccgttccacctttgtatttgtcgcgactaaattctgtcatcttggacagaacatttctttgtcccgtggcatataacattcgaacttcagtcgaatctgaaggttttcgctgtagggaaagcaaattggttcatcaaggatccgaaaagcaaaccggacgagcatccgatgaatttcgcatacaatgaagagaaagccttagaaagtcgagaaatctggcgtatgtgtcttcaaccactgtgttggcatgcatatgatttggggtttacctgaatactctttttttgtcttctgatcttgttttctaacgcgcgtttcattttgtatcacatgttgatggtcaaacttcagactcgattctgggtcaccataatggatcctctcgtcgacctatccttcgggcgatattccgactcgtaggacacttgattcaatttcctggtcttatcattcttcaggtcatgttcgtatacactcgaaactcaagtgcaggtatcagcatcccgtcgaatcttctgcttttattcctcccgatggttcgagtagcatacaagttcagttcagaaccattaatctcgaagggagtacatactatagaaatggtgtcctctctgtcagcaatctggctatgggcttgtctctggtggggcttcgagatccaatggggcggttggaacgctttattaccagtgggagtgaagaggaacaaaccgactcattcagagagaaggagtaagagggtcgactctcaatttacatggtttcaacggggtctggtcagtttacttctcggctttccttgtagacagaaattggatcgacgaagaagtagaagctaactgcagagtcttgtgctttacggccatcagtttgtcgtcgttctgaccatatgcatggcccacgtccacaagctcccagaactaatcacttctacccatcgatacactcggttttcgacctccactccctctcttccttgatcatacatcggaaagctcctccaaaaactctcagagtcaatatatgccgaatcattttcgcatgcagtggacctgatggctaccacgagtcagatcttactgaataagagattaggctgttttggtggatcgtatccgtctctcgcgtgggctgaatttgtatcaggaatatgtacgtttctttctctccttctctcagtctcttgaatatcacatattcggttgaaaccaaagacgtatctctcacatataactaatatggacattggctgaaacagtgatatgggcgcctacagtgttgcactcgatgtttggtaaatataacacgtcggaccctgttcatactggggtcgtggtcgcattcctcatcaaagggactctgctttggcaggctttgaattaccccgtcgtgaatcaaaatgaggaggaggatgagtagttactcgaagacgagatccaaagattgtttatgtcgttatgctccaaacaaggacttcgcaaaggaaatatcagaagaagtaataagtgaaagcgaatgcagtaagaacgccgaaatatatagtgcctgccggaagattcttctgagtctaacagaaggacagaaaattctaacatcgtgtttcagcatgttgggatattgctatatttgactcatttatatcgagcattagaaaggaaagatgtaatctaacggagaagataaagagctcaacgaacttctgaataatatcccaaggtgtcaattgtcggtcgaacaatacttcttcttttctcccgagacgtctgccttcgtgctctggttgaattgttgcgtcgacggcgcaacatccagcgcggggttctgctcaaaaaagtgaacaggctacgaagggtaaaagaatcacattatcagataactgtgaatgcaactgagtctcgatagatgacttggataagagacagcgcaccttgaaatgcatacggaaggtctcgacaggcatgacgggccagtcttcaggcttggttgcatgggtgaatccaagggtgaaccaaacgactccctcgccagtcttgacttcgcgctgacgagctgcccaggttctgcatcctccttgacctcccacagattgccatgggtgtctgttgagaaagtaaggacaagcagaaggatcaagttttaagtgttttggtacctacactaaacaacgtgttatcggaatttgatccaacgaaattgacttactctccagcagcaaataattcttcctcgtcatgcttggtgtaatggatatgattgttgacaaactctcctcgctggttatgcatactggtctcgtgagccagccccaactgagttggcggtgcgacaatcttataaccgactggcttgccactgtgcctgttgagctttgaaggattaatcatcttcacgactcggtttgtttgccaatcgaggttaaatgctccctctctgttgaccttggtctggcgcgtctcgaacccaacgccgtgaggattcttctcattgcgctccattgggtgggtctcgtcgtacacgactgtagaagattcgtaaccatcgatggcgggatcgattcggagattgaagatgtgttgatgatctgagatatgtacacaaccggaatcagctgagatctctatatgtgctgtttggtgtagtactaggaaggcttacccggtgcaaaaacacctggtgcgacaacactaccgtatttgatcgtgttagctgcgtcgactcctgcttcaatcggggtcacagacatgattccagttgcacgaatttcccaatgaagcactccagccgtgtcgaagatccagtacaacgcatattcgtagtttcctacagtcagaatcagctggagaacgagctcacgggatcgagctacgtcagcccgaccagttcgtacgttggtatgcttccaaccaatacctagatatcaggaagcccattagtgactgcagaaagagatatgtaagaagttttagaaattgaactaaatttacctccgtcttgctcgtgtacgcatatagtgttaggcaacacaaggggagagccatcgggcttgactgcaagcccatcgatatctgtgaccgtgaatcgtttgttgatcagtatggtataagctgactcaactctttctacaatgttgaaactcacagtggatgacaccaaggcaatcacaaccaagttgtaagttgtttgccatttgtccagctccggcctcaccaaagtcgtaggcactctttcggtggactgttggtcgtgtgttgagatgtgagcaaacggtcttaaccttatcagcagatcagatcgaaacttaccaggcgacctcggatctccataaggcactgtcatctcactagtactgactcgatagaagataggtcggccatcatacttcacatccctgagaatcatgccctcacgcaagtcaaagttgagagtgaaatcccacttctgccatctaactcgctcaccctcgatcgtgaagctaactccttggggctgagtgatatgaatcggctttaaatcttgacgaagaccaccaggaagcaactcaggggcatattcagaatcggcatgatgctgtaaagtttggacaagattgaatgaaaaacccttcagatcaagcactacaaatattgatgaagcgcacctcgtatgtcttggttggatcggtcgaagcagaaaattctgccgtggtgggcatacgatcgatccggattactgaaaaatctcggccatcaacaacagcagctgattgcacgttgtcaagataaacaaatagtcaagtatagataagtaaatggtctagattgtcgcagaaaaacgacttaccaaagtcgagagggtggccatagaagttggcagaaggatggtgttttgtttctttcgaattgaggaacatccaaacctgtaatgaattgcaatgaaagtgtttagcttatggtgctgacaaaggcaaagctagacaagagtattttacttcgaatagtcgaagactctgaggttcatcatcagttccatctatgatcagaatgatgaattacgaaagaatcagcaacagagagtaatgatcgcaacaggtaagaacttacaaggccatggctccgcgactacctcgcatccctctggaatttgcaacctcttcaattcagcctgtaccattggactcgcaagagcgccactttgggtcgcagaggatagatgaggattagttttgtgcaacggtgtaaggatagttatgttgacatcactggtactcacgccgcaactttgaacatttcctcatcatcaccaccaccgtgctaaagaagccaccaagacaatcgttgacagcgtcaggctcaaaggattacacactatggaccttctcctgtgataagacgaaagcactacttaccataccctcgagaactctttgtccaataactttaccagcgccgatgtccactaacgtctcgatgaagggcaactcgccttgaaagtagaggagcgcttgcgctcgtcgaggaggaggcgacggcaatggatttccagcgttgaaggcaaccaagtaaggtaaaacctgagctttaggcggttcctttaggtatacccttcggaacgagcatgatttagtcgggttataggctttgacaatatcggtgaccttgactagttcttctgaagtgagcgaagcgagaggatgaagctgggaagctgcagatgagtctgtgctaggcagagccttggcaagagtatccaagactatcggggacatgtttctttgcaagtgatgggttgagtgaggagaatgatgaacggaatctcgcctggttaagttgtttttttatctatcacttccaatttctgacgctagtaagcgggcaatcaagcgggcgatcatctaaatgaactaatcataaaccggcaggcgcgacaggcgcgatgaatacgaaagccacatcaggcgcgataggcgcgcaactcgcgcctgaaattagagataagatatcgatttactcgttcatattgaccggtgagcgggaagcaaaataacgatgaagcagctggtgaaggtgaaatcttcagaactagacgaaagtgtcatgctctccgtgttccatccacaaaatctatacgataagaatccaatcattgactttcgtagcttacacaaacatctttcccctcaaagttcttatcatcaaagagccgggccattcgtcaagatatgtcagacatataacgctctatcaaattccattttccgacgattttttctcctactcccaaacatataccttctgtctcaaaacttcataccgtacccattccgtgaaagatggatgatcccaagaataaaacaggagtatacgcagtcagagccgtcgaggttgttagcgacgctggaggagagctagaacgcaggaacttcgtcagttgtaccgccttctgcttcacccggtttacgtttcactgaacatgagccatgatatctgtagggtactgcaggtcttcgtggactcgcttgtattgtgagcagaatctgactatagcctcaagattttaatattgatactgtgcctactatatgcatctctcgtgacccgtcccgcttccaggtcacatgcgtgtatttatatttcgcatctagacgttcaccaatcattcatggtcgatactgactgaagctcttatacagatacgcgacgattctcacgaagctttcaacatgtgtcaccagcggaggtcctgtgttgatggtttggggtttgatctatgctgctgcaggagctatgctcatcgcactcagtttgggagaaatggcatccgcgtacccttcttcccgaggaccaatggagtgggcatataacttttcttcgccgaagcatcgtcgctttatcgtaagcaaacttggctgttgagagatatttgggtttgtacttccagtgattgattctttctttcttcacacagtcttattgcaccggtcatctcaattatatcgggtactgtgtcattcttgcgggcttcggggtgctgataggtcaacagattcttaccttagtggtgttgaacgacccgtcatttgtcatcacgcaatggaaaggttcgattgtttgttgacattctcttttacaatctcatgctaacctggtgatgcttatttgacagtgttcctcatcgccgaagcggccattttggccgctaccctgttcaacatattctgtatggctatcatgcctatcatcgatatagtctcgctatatttcttcttcttctcattcttagcatacctaattgtacctatcgtgtgtgcacgtcacctcaaccatgcgcttaagactcccaagtttgttttcactgagtccatcaatttgaccggttacgactcaatgaatggaggagattttgtggccttcatgattggcctttcgggtgtttcaacagcgtttggaggtgagcagtcagttattcatcggtacaactcgctcatgatttttctatcattgaattccgacatatgttgtgcctgctgtaggtacggatgcagttgtgcatatcgcagaggaatgcgagcatccggagagagatgtgccgagaagtaagtggcacttacgttagttcatacaccatcgattcttacttcggaacttgcttctcttaccatctgagcagccatgtggttaaccgttgtaattggattcctcaggttagcactttgaaccttttattgtatcgattcaaggaaacttgacgacttatcacttttgccctttctgaatatcgtagttcattcgtgttgctcatctcgcttcttttcgcggtggtcgatatggactctatcctgggcaccgcaaccggagtaccatacatccaacttgtatataacgccactcagtcgttttcggggacagtatgcatgtctctaatgatcattatcatcactttcttggccatgatcggtacgtcgattttcttgctggtcgaaatctactaacatgctcatatccacctcttacttaacaggcatggttctttccaccagtcgaacggccttcaccgtagcccgtgatggtggcctattcacacagacatagtatgctgcacctcatttgaacgaaacttgatcatattgactgatgcacaatatttcgaccgacgatctttttgatgcagcttcgctctcatttcacctcgctggaacgttcccatacgtgtaatgatggtaacttcagggctcagcgcagctttggcatgcactatcttgggttcaacctacggtgaagagacctgatcaacattatttctcgcagcactcgcatggatgggcagctgactatgtcctttttcgtcctgcagcgctctactctttcctcaactgtgttttactgttaaactggctatgttatggtacgagtggattcccaccgccgtgatcatgatctcgatagctgaatcgttacaaccctaggtatctgtatcgtcgcacttctcatttccggacgaaagtaccatacgtcaggaccgttccgtcttggccgagtcgggtggtcaattaatatcctcaccgtgatctacatggcatgtcaaagcatcttttttgtctttccgtatggtttacctgtgcaagccaaatagatgagtacgtcatattttcgcaacatacttagtctcgaagctgacgtgttgaattaatcttctctttcttaaccctgtctgctgatggtagactactcgtcagtcgtttttgttggtttggtcagtctagtacaagtggcttggttcgctacgggtcggaaatactatctgttgacaccaaatgaggtcaagtaccaaaccgagctaggaggtgggaccaccatttatagagacgagcgagatgagtcctatgtgggtgcaagtgataaagatgatgccatcaccactgctgcttgatgaccggcttgaatgatcaaattttggtgatattgtggtgatattttagtgatatagaatgctttatgcaaaactattagattttctatatgttgtttgcggaagcacgaagcagaaggatcaagaaagctgccaagcggaatgtttgcttcttcaggggctgggtgatatacaacaaggactttgttcaaggagtcagcaacgaataacttttgctatgtgtcataacatcatctaaatcagttttcctctaccctctatctaggatgcacaagtttacgtgagataggaggcgactgtaccatgtgttgaaaccaagaatctttgaacgtgatttagccgaatcaatcctcttcctaagccggcgtaatcaagaatggagccaatgctcgatcttcgataagatatcggatccggccggttacttgctgcgcaatctttgcccacgtttttgaagtttgtttcccatcatgcgctattcaccccggaccgactaccgacttactaatcctaacctgcatttacatctacatactaccatctataacatagccaaaacgactgtcgatctcattgctctatgatgtccgagcccactactggtcccaagtatttgaaacgtggcttggcgtgagtgtcgtgcatggtttcaattatgtcttgttgccattctcatttgaacactgtgatgattggcaatctttgggtttatgctgataatacaaacagctgctcaacatgcaggttggtactcatatcttttctcaagaatcacaattcaaacaatatacctgatcagccatctgacatgtcaagtatgttttgtccggcttgcttttcacagaaagaggaaaatggcaagttgacttcatttttgaacagacccgctacaccattacaacgttgcataacctgggacagtgttgtctttccttcgtcggtgggaattacatatcagaaatggtatgagttttgccctgttcctcatcatttcaatgctttcagttcagacttgacatctcttgtgcagtacgggtgagaggcctatatgtggaacgtgcaagaaagtgagccgtgcaatccttgcttgaatctatagatcactctcaaaaatagctttgataaaagcatgaacatcagccaacacaccactaatgttattgaacctcacagagctcccaaatatgcatgtatgatatcgcatctcagcaggagtcgagaaggaagaatattagaggataagatttgttagtttttcctgaactatctgtactgagtggctgaggttttgatttagatatcgcctgtactgtgtcattcagctcgactagaatctattttatccctatcagaatccaatgagtccgctggtttctctctatctagcacggatcagaggaagatgtcctctgccatatatccctaccctgtccttgaatatcccaagcccagcactccttcgagggtctctcatcccagccgactttctaggcggcaccagcaggcgacgttcacccaagcgttccaggagctatggaacactagctccagtgctgataatatcacagttggtccaccatccatgcaaatcaatagcgtgactcaatcgaccgtttcatcgaactcctctgccgagacgaactcaagtcccatgcatgtccccacccagttcctcgatcaaacagatacaatcaggcgcgaactcgagccatgggagttcgacttttcttcactagatcaagagaatgtatcgaagtcaacggcggctctgggagaccttgctccaatgcagctcggtttcttttcttctttgcagctcgactcgaatcaatccttatcagaacctttcctgatttcaattgggcaaccgaatgaatactcgccctcatcattggctcaagagtcaccctcagtaccactcgtgacttcttcgactgaagatcgtacagctactttgaagacatatattcaagagcatggggatgttccgataagaattagagatcttcttcttggggctttctttaagcagatgaaaacatcgggagttatgattcatgttgaacgattttggaggtatgtctcgttatgaaaggattcaatgagaaaatccgttcttctaatcagtgactgagctaacaaaacaagttctggaacaatattgtggttttacctcaatttactgattcatcagtaagctcaaagatccagtcaagaacgaacgaccacatcctgctttcttgttcgctatggtccgttctctcatataccatgactcccctattttcgaaggttcaagaggttctcgttcatcaacatcgttttactcactcaaagcacaatgttgatttcgtatgtttgacggagatagtatatttctgccagtcagctctatccagacgaatctgttcaggcttcgcaaagtttgttttatcacacagctaggaaacatcttgaggatggaatcgatgatcaggacgagcggatgattgacctgatccgtgccgcgacagttctgggcactgtagcatgttagctctttctctataagcatatctgatgaaatcacataatcacgggtcatgttatctgatactgatattcgatctcggacttgaaccaagattcgaaagcgagattccgatcggcttgggtcctaggaggagtaagactatctccattgcgttctcgatgtgtctatgatttgacatggcctcgtcctttcaatcctactccattgttgacgagatgtatgttttatcttgtacagatcgcaatgcggctttgcgctctcgctcgccttcaaagcattagttttccattctgtcctagttcattccagaatcacagtttgggccctcctaatccattcagagcaatgctggccagagtcaaacgtcaggttcggcccccaaaggacggaatcgaatgcggagagtatatatgggctttctggcaagcttgggtgagtcaactcttcacatccaggcgcatggttgaatcattccagagattaccaattcgtcgtaaactatttctgggctgtctttgtcatcttacatatattcagggtctagagaggtgtcattcaacggctgctggatggacccctgtaagttcttggtaatatcctgtgaccaagactgagatacatcaaaaatctaattaaatcaattgctttttgaagtcaatgcactggtcagagattgagacacccttcccattgccgctggaacagtatgaacacgtaggtcgatcacgtatgatggacaggatatgacactgctccgtattgaccatgcactttgtttccttcagattgaggttgtcaacagtcgacctataacggcggtgtatggtttgtttgatgactcccaacacaccctcgttggagacctgtatgtttttcgatttttgcacatctcatccttctagtttgcatctgctgactgatctattgggctgaaacactaggagtgcatcatgtcagtttatcggaaacctgttgttaaacgaagcagctcgactcttggatgaattcatacatccttcgactcgtaataaatacctttctcaaatgtcgaaccgaacagattcattcagtccttcttcgcaggaagaggtgttgtctgaggatctgtcgaccgaatctgacagctctgctggcccaataactgaacctgtaccatctgagattttgcggttgcaagacgcgcttttaaaattcgtacggtcacttccatctgaccaggcagaccctgcgaagaaagttcgggggggaatgccccctggactctggatcctatgatgagagacagtctgggtatgaaatcctcgtgggattcatggggagacacttggggtgtcgactctgaagttgtattgttacattgtgaaatccttaggtatttaaatcgtacattgtgattggtcaatcatgtcgaatagagacatactcatgtcttctgtaaacgtcttcactcagtgcattcgctttggtatatcgacaacgagcggtgtttgatacgagtgcacgcgcgaaagccgtgtcgtctgctcgatctatggtaaagctcatccgtgtcatctcagatgtgaacttcaggcgttgcagcttcgttatgctagttcgtttttttccaaaattctagaaagctctctcctcttttaagatatctaagatgatggaatgaactgatgcccggatgatatggttttatcgataactttgtaggtctcttggcgaaacgcagctcatattttgcttgaggaagtgagacgtcttaggatgcttggaaatgaggaaggtctgtcaatatttctctgtctgcttaagctagctctcttttcttacagaatcaggtatctcatacactcgacaacattcttgctgatgtttccttcacttctgattgcattttcgcggtaacagaagcattgacagtatcgattgacactgagcgtacgtagagttgtaaacttcactttgaagcaagacaccgcaccgctcacttttttttgtttttgttgaatgcgatgcagtcattgttctcgcaatgcagcgaatgggggaagtgtacaccgttgggtaagcatgctagacatcaaaacttcttggtttgagtttgatcatgtcgcctgacgtaaatcctgttcaaactgaagtgatacctgtcagaactctgctatcgaggcaatcaaacgctaccaaagcgattagagaaggcgtctctttcatatatgacctagtcaaactgatgaatgccataggtcgtcatcgtattgccagtaatgttttgtctcttcctcgaaatgattgtttccatccggcctttatattttgttttcagtcacagactttgtgtctgatcctattcatgtgctgttcattcccacttgacgtggtaatttttgcgcacattgataaaaatcaaaagaatatcagacaaggtattctggtgcctttcgaaggttttgttatatttgagatcatcgatatcacaacaagtatacaccaatcatatataaaagtgtcagccaaactccttcatacagccttgaagaaggaagcatcagcgtgcttcatctcgtcgagcaggagctgacccttaggctgccagccgaatgttttcttagtccagctagtactaaagtcttgatgagcctgcaagaggatgccgaagaagccaaagtccttggcctgctctttggtgatggccttggtgtccatcttagtcttctcgccaagcacctgagcaatggccttcagttgggggaattcttgaacggcatggacaatagttccgggctcggccgtttcaagagcgagcacaaagagaagagcggcgtcgtccgcgttgcaagccgaccagttgagcccctcgacatatggaatgaaccctgcgtttctgcccatgccgaggaggaaggtgtgaaacatgtgaatctcgtccgggctgtgggtattcattgccaatcggacgacgatggatcaaattcctcgatccttgtacgccaagacagccttctctgtctcagctcttggtccgataggcgcactctgggaatgctcgtctgatccaggctgcacagcgactgtaccattcgccgaaatcaataccttgccagatccttcgagtacgtcggcgaagaagtcgagagcctcgcgctctcctttcatctgactgcccaaatcagcgtccttgtggtccattgcgcagtgaatcacggcgtcattctcgttcgcgccctttctgagaagtccctggtcggcagtcgtcccaatcaatgcggtcgcacccagtgcctcaatcttcttagctttttcggtggatcggacgaggccggcaacagtgtgaccacgagagatgagatgggggataattctagagccaagtcgaccagaagcgccagtgataaagaccttcatatttgttgcgaaaaaatttggttgagaggtgtaggtcaagatgagtaggttgatatgggtgagagtgttgttgagatgtgtaactgagccgtcatctacaacttggatagagcttccttatatacgaagtatccttgaatgtatatccgtcgatctcttggacaatctcgggggatccgctgagtatttcttagcctttgtaatagaatccgaatccgaatccgaagccgaagccgaagccgaagccggatatgagttgcgcccgacccggaaatgcttacctgaggggaagtggtaagtgttaacaaggctatggggtgtgaactggaaccaattcacatgatcggttgctatgtactacaagaattgatattggattgtttttgaacagaagaggtggataaagatcgcgtgatatcagtcagcagttgttgttgtacaggtcagcaacggtcgtttatgagctgcacgcggcccaatgaaaccgatcatatctagcggaagtacttcaactttttttctctatctctttgtttgttctcgttcttgtctgtgatctgaaaagctatcacagttggccttcacagcgttgtttataaaggtcaacgacaaatcggattgatcagagaaagtctctacgagggaggaggcatcacctcaagagctgatgaaacgcaaagaagctgaagtaatgggataatctttcacatcataaaactcatcagttgcgtttgaaaaagctcgatcctcttgtgttagcaataaagcgcaagagaacagctctggccatggcaggatctccccccgcctctatgcctgacacttttagatgtatagcctgacgtcaatctgttggataggtcaggacttgacatcgctcaaatcataatcatttctatggatgattcatcttcttaatttgcagaaggtgccgctcggaaatatacgtctagcgagaatggaaacgctggtatataggtccagaatgatttgataccaaggatcttatgtggatctgcttatgtaaacccctgtgatacattacctccacattgtcttgtgtagaggaaagatgtgaccgatgcttcgacattgagatacttcgccgatgtctcatcaacgatgttgatatctttgttggtagatggacgtatggctagtccccttgattgggttactttacctcatgtcgatggaacttccaacgagtgttctagtacgaatatatcctctgtagtcttcaattccgagaagaatagaacgatcactcagtatcatctcggacgcgccgattgtatctctaattatacttctacttctgatcatttgttcatataggatgagatatagaggatggattgcgatggatatatcctcttattaccccgtggtaaaccacattcggacgtcgatcgaattcagtgacttataacatcgaatgtattgctattgtctcgaacgtcgtcgacatgtaaaaggatgaacatccaatgaacgctgtccatagaagaacggaagcgctcgagagccgaaacttttgaaaatatatatctttttccttcgtattgctcttcatcaacttcagagctcacttgatcatgttaattgagtttcttccctattatctttcctgttgagccttccgttcgcgtgacctcttgctagtcagatatcggacgtcattttggaacacagcgatgaatatttgtggtcgttcttcgcgatgtaaaatgagatgaagagctgccttcaatcctgctcttcacgcaacgctctatccgttcgtgaatgttgtcttgcttcttaaatgactgtgctatgaaacgtatggctttccactaacgccgctaagatcctatgagctggttcactacgtttccagacatttgtattgtcatacttcttatctatgagcaatgatacaacgccccagagatatgtgacctcggtcgcgcaaattcaaattagttattctgatacatgtgatttggttcacttttcatttcgatcaatgtttgtgaactttcaaaaggctgggaacgtaattgatataatcattcacgaggactacgagtacagatacaaaattgacagaagaaacagagtgaatgcggtctcgacaatgttttagaaatcgactgataggtttctaggtatctcaaatacagagagctatggtgctatgtttttctgactatatgtatgacagtatcactctataacaaagttgtgtgtgtgagcaaagaaaagggtgacaataaaacaacagacagagtaggtcggggcacttgcattcagctatcacctgaatcaaatgaaaaacccgaccttcatttgttgttcctctaggaactccctccaacaagccggcgcgacccctttttcatcaacctctctccacagcctctcgaccgctctgagttgctctctgtccagctcacttctttctccttcgagtaggccttgtcgacatgcctcacgatcggtttcggtgacagcgattgtgctagcaagaaaccagattgcgttccgcgacgaagagcggaaaatatttgacgcaggatgacgagtagacggttgagacagtgagcttgaaaggagaagaatctgagaaagcgattgacggaggggtagagcaagcgagccaagttgtgccagggatgaaaagagatagatcaaggccgcctagtcgagtatgcagctgatatcagcaaagacaatctttcgaatacatagacgaacatacatcaaagttgtgactcacatgacgccacgtttcctgcgtcgctaaatctgatataacctcggcactgttgccaggtccagctgtgttcctagccagaactgcatccgactcgaaggcttcgatgcgagttttgatcgcattcaccttcgactgtattcgctctggatctgcgttgcgggcctcggactcgtcaacgacagcattactgatctcggcgaagcagcacaataattcggctggtaggccaaggtgtaccgataacgtgcgctcattaacggtcgtcagtttgtctgtaccatcttctgcatacgtagtcggtgatgtgtcattgaatactcgaaaaaaagtgcggcgcttgctcaatgctactgttctaaacacgtccgaatatatatacgctcgaaaggcgagagattcgactgttgctgttttcccaaagtcgaattcaagatgatccgggcccagaagttcgcgaaggaactcttgcgctgtcagcaagagaaaataggctggagtggtaccatgtcgatcaatctgagatcagtgagaagagaaaggatgataattatcaacacaagtatcacaagcattgagtacggcaggaagaactgctgtagctacctgagcaagtcgaagatcaaggacggcacctagtcggttcttgagaccatacgctttgtcttcaagtagaaggacagtttgctgataatatcgtccggccttgtcatgccattcttcccacctgaagaacaaaaaggacgagaagcttagggaagcaacgatgtgtatcaaagagcttcagtacagaggatagcttacgcagggttgcgctcctttgcaagcaacatcgaataatgtgatgaacaccatgccgctagagagtgcccacagatacagtgcgcatggagtttagatacatgttgtgagtcgataagatgaaagaaagcataacacatacaaattgcgccgcgattcacgtcgctgtgtgcagtcagcatcgagtcaaacatgtacttcttgacgatagttctcgccggtataggaattgaactaaagtaagattcattaagcgagttataaaaagtccaccactcattggcgaactctctcatctctatcaatgtactcgcacccagtctgtcctcggaagaatgtgttgataagtcatcctggcctgagtgctcgggttgaacagcggagaacccagcaacatcggatctgatttgttgaggggatgcagcgtgcctcgatataaagggcgcagcattaacagaagagaaaacatccatagagtagaattgtcggtccttttgttctccgctatccgatggattggagggttccttcgatcccgtcgttgacgttgtatttggattaggatatctctcattctggtatatctgctgtatctccgcctcacttcttggagaaagtagcaaagatggcaaggcttccatccttgacgaactggcgtcgattgtaccaagcagttcggggagcgagaggtcagactcgaagccagttgggaacaggaaagacggcagtggggagaaatcaatcaaaggatagttggataatgaatcagattgcagcgaagagacagagaaggaattattgtgatttccctggtcgtatgaagaggattgaagtgacggtagtgacgaaagaggatagacagttgaagattcgagcgtcgaagggagctttgatgagccggccgttggttgctcaggcggattttgatccgagagttgttgcgatgaaacagggcgtagagacgattcgtctagtaggtttggagtcgctggcctatccagctcacgacggctacgtgatggcctggttgattctttcacgcatgtgtatttgccgacccgacatcgtgtgcagattccggctctatcccactgttcatcacatttctttttgcgcactgtgatgatgataaaattagcagaatcatttaaattgtcaaaaccttcacttgattcaaagcgcgaatggagttgagactcatttgcaagtgtcgcagcctatataatacgaatcaaccgtcaaccacatgtgtaatatttgaacaaagccattctgatattcgtttgattgaccaacctgttctcgaccgtgaaggtgtttgaccgctcatctttgtgctgctgactgttgttgtcgtttctgtaagtagaagcgactcgaccgagttattcaaactagtcaatgtgatcatggttgagggtatggatgtatcggtgacgatgatgtttgatcaccccgcatcttggtcgactttctatagccgcggctaattgtatccatatcttttcggacattttgctttgatcccgacgaactagggtgaacggtcaaggttgagccaatcttacatcttagtcctcaccgtcagtcgtgtttgcacctaatgctctctatttcgtgttatgttatttcctttatcgagcgtcactatggggaacaatctcgtgaatgtagagattatacaaagtgtttgcaaaagggtcttacataatcaaacggtatcgaaacttgcatgtactggttcaggcctcaaaccatcattttcgtccagcgatgcccacctcttacgttatacatcattcgccttttactaacgatgtcacggagtgcgcaccaaatgctgagacttctagaatttctttccactctactttgagtataaaacttttgctgttttttcctttgtctgccacgttttcgagaaagtacgtgcagtcagaaacagttcgtcttctgacataccactcggttctgtgcaatgaggtatatatattcattgaacgaatattcgatcatagatggatgcaaacatatgctgtgttctttatcacctaagaaacgatacactgaaattgattgaaattgtatctctcattcggtctttgtgtttgacttccgtactgtcgcgttatgaccaagctttactgagaatcatgacaatagacacaacagaccgccctgattctgaatagaataacggcggatggaacgtggcttgactgctgctgaagcgtctgatacagtacgaaagtacaggatctgaaattgaaaagaatagttggcgatgaggacacaactcttattctgttttccctgactccaatgaggtcaagtgagtagaatgactcttttcctctacaggatgaaagagttcgagacgagtagaatttttttttgtcaggcagtgctccttaggctggccgtttgaggaggacgatcttgggaggctcctgaagtgcttcgtttcgacttctgtgatctctgccccttgctcttcctccgcctctgcctctacctctaccttcgcccccaccatcaaacccacagcctcctcttcctcctccacctctaccgttgccaccaccgaacccagatctactgataagagaaggtgcaatccaaaatgtctcgaccccgtatttttccgcagccggccccacatcttcacccgatgcacggactgtatgatcatacttgtccgattcgaatcctccgtcttcgtccgtgcctagtgattcgcccgcaagaggagatgaaatgagcagaataggttttgaagatgacgacgatggtattgatgatgatgatgcaattgatgaagaagccggaggttgagccaagtaaagaacagtgcctatgatagaccgaagccaattgtccatgggcggagtatcatccgagcaagcgatatctggcacatcggttcgctcagaaggacgagcgacccgaagcccacgaaatgattgatgcgacggatttatggagttggagatggatagatgagtttctacgaatcgagtggcgatacgaacggcttgggggagggcagaggaaccttttttgagaaggtcgagtgtatgaaggactagagtttgataacagatgggccatcatgaatgataaggaaagaaagaaagataataaaccagtgtcacaagtcagatagggagacagagatattggggaacaccatattaagcaaatggcatgggcttaccctcagcaggaatgatgatttctctttctctgcgagccaaaattctctttacactgggcaaagcccaaataagcgcactcccatcaaccacaactggcccattaccaggaggcatggacattgtggatgaagctgtgaccgcaggcaaggggaaacctcgaatctgaggagaaacgctcgagcctggaatagaaaccgaggtagatgccgatacgcctttgggatttcgaaggaggatactgggagaaggaggaagctgtggtgacttggtgtatgatgtatctattatgcgagtcgttttcccaggcacaccgtcttcttgtctacctgacggtctggttgaatcacttccatgacgacttcctctccctcccctggtacctccaggaatgaggagaaggcctgctctatcagagccccttgttctcgagccactgtggcgatcctggaaacttggcggactagaataattagaacccacgtttatatcttgtatctgttgttgaagctcttcgacttgatgagcaagaaacgcggcagcgagcgctttgttaggctttggcaaagagggtgaatcggtccgcattgtttagtcctggagaaaaattgattcgtgtcgacagcgggatcagattaggacaagagacgcgatagcactagtgtgaaggatggaggaaggaaggcaagcgatgtgactggcagtgatcatgactcaagcagatgagagccacggaacgttgaagagctggatgatagtctacgagtgaaaaaaggaaagtcatccggatcgcttttcgttgaaatcgcagccgccagatgtcgtcagatgtgattacagcggttcgtgtatatttttgatcattttcttcagtttctcaatcgtcatttcttaaaatccaagtttcaaaaggcagcaggatcattgataaaagtacagtctaggaattacatacaagccctcgacgtgccggtcaaaaagaaaaagaaaaaaaggcagaaaaaaaagaggaaggtaaaaacccctttgaaaagaaagaaatgatacgggattgtcaagagacagattctagtttccgaaaccgtagagcgttcgaccctgtcgcttcaaagcgtagacgacatcgagagcggtgacagtctttcgcttggaatgctcagtgtaggtgacagaatctcggatgacatctggggaaaatgaggcaagatgagaaaaaagagcttggtcagcaagaccgtaccgaagatggtggtgaccaaagataagagtatgactcactctcgaggaacagcttgagaacacctcgggtctcctcgtaaataaggccggaaattcgcttgactccacctcgtcgcgcaagtcgtcggatggcaggcttggtgataccctggatattatctcgaaggatctttcggtgtcgcttggcaccaccctttccgagtccctgaaagagagaacgtgagacgtcagttgtatgaacatttcggcaggagtgggacaaaagagagatcttgaggagattacaaacctttcctccttttcctcgtccggacatgtttgtttgttaaagtagggttgggggtgggt

SEQ ID NO: 325 - DNA, 5577 bp, Xanthophyllomyces dendrorhous
gtaggtagttaagttgagaggaaagtacagtaaatgggtgtttgggatgagggaggagaagaagtcagaaaatcgcaaagaatccagagactctttatgcaaagacgactgtgacccagacgaagactaaacgcgtccggatcaggaacggtctttaacgcgtgtgttcaaacacgtcgaatttattcgatgaatattctcgcgttagtggacgcgtaaaataaacgcgtcctgccgcgccgattttatttcctatcattttctgttccatgtaatagataggcagcatattttgtagtgatgctatcagaacgcgttcgacgcgtcgtgaatataatcgcgtgagataaaacacttggtgaataaaacgtattcgaatatattcctctttatcatcctctaatacatttttctcttctcgcgtcatcccagacgcgactttttccttgacgcgtccctttgtcgcgttcctcacgaagctttaaaagccctcagtattccaatgcgattcgctttccttctttctcttccattcattctactccaagacttaaaccatcccaagcttacttaaattccaacccacttttacaaatcccaactcatctcaacatggcccgaactaagcagaccgcccgaaagtccaccggaggaaaggctccccgaaagcagctcgctaccaaggctgcccgaaagaccgctcctgctgctggaggtgtcaagaagccccacagatacaggttagtctttggatttattcaacttttttttcctgctcagaataagcttaaactgacgtgcctctgcggtgctcctctacagacccggaacagtcgctcttcgagagatccgacgataccagaagtcgaccgagctcctcatccgaaagctccccttccagcgactcgttcgagagatcgcccaggacttcaagactgatctccgattccagtcttcagccgttatggccctccaggaggcttccgaggcttaccttgtctctctctttgaggacaccaacttggctgctattcacgccaagcgagtgacgatccagcctaaggatctccagctcgctcgacgactccgaggagagcgagcataagcgtctgtccgtagagaggagaagtagtagtgtttcctggatcagttgccagttgtacaaccctgtaccaatatcgttatataatcaatttatccatccattctctgaaacatcacattaaaatgattgccgacaagataacagcaagttacacaaaagacacgtgagcgtacagcacgtgacattgctgatataagcgacgataagatcagacggccgatcgagatgaatgactgggcatagatcgtatcaacatcgtcgatcggccaaaattgggcgagatggccgaacaccttgatttttgttcggcgatcaaacttctcgttcttcgttcttgtttgcacttctcttccacctcttccaccctcgccgaatctaacttgacacataactctagtatctatactcgatgggaaaagaacaagatcaggataaacccacagctatcatcgtgggtgagtgtcaggccatcaccttttgaagcatatacccatcacttgattgatgggttttccatttgattcaaaccttgtttccgaatggttctcctagtttaatccgtatcagctaacattctcttgatcacttgttgcttttgcttactcgttactctttccgttcctacttgttaggatgtggtatcggtggaatcgccactgccgctcgtcttgctaaagaaggtttccaggtcacggtgttcgagaaggtatgcttcctcgctcactcatgaaatgtacctcacatcggtcaaatatggaatcgagatcgtacaaaactgatcgacccgctattcttattgtgtcccacctctttcttttccctctcatcattcgtccacatcgctaatacccgcttgtcaaccttagaacgactactccggaggtcgatgctctttaatcgagcgagatggttatgtcagttcctccgatcatcaggcaagagcatcgttcatttctccaatactaacccagcggccttttctctctctctccgtctcgaccctccgatttaacagcgattcgatcaggttagaatactctcttgcgctgtctctcaacacaatatcaaaagactgacctcaactttaatgcttggccttccaggggcccagtttgctgctcttgccagatctcttcaagcagacattcgaagatttgggagagaagatggaagattgggtcgatctcatcaagtgtatgtctagagcttgtatcttcagaatcgtcttggttgctcatcctcctctcatttccttttctttcaaaacaaatataaggtgaacccaactatgtttgccacttccacgatgtatgtaccctcgtaggctcgatatcattcctctttccaagaccactgacatcctacaaccattttcaccgttcaggaagagactttcactctttcaaccgacatggcgttgctcaagcgggaagtcgagcgttttgaaggcaaagatggatttgatcggttcttgtcgtttatccaagaagttcgtgaatgtttgtcatctcactcatgaccaagtggtggttctgactccatcgcattacggtctataggcccacagacattacgagcttgctgtcgttcacgtcctgcagaagaacttccctggcttcgcagcattcttacggctacagttcattggccaaatcctggctcttcaccccttcgaggtcagtgacatctgccaaacatattcgtttcacatggcctttttttgactatcgatagtgtgttgtcaatatcaccagtctatctggacaagagtttgtcgatatttcaagaccgacagattacgaagagtcttctcgtttgcagtgatgtacatgggtcaaagcccatacagtgcgcccggaacatattccttgctccaatacaccgaattgaccgagggcatctggtatccgagaggaggcttttggcagttcgtgctcatcctgatccttatgtttggttctttccgcttcagagaattaacaattactgacagaaaatcgtatcaacgcacgctttctccaatagggttcctaatactcttcttcagatcgtcaagcgcaacaatccctcagccaagttcaatttcaacgctccagtttcccaggttcttctctctcctgccaaggaccgagcgactggtgttcgacttgaatccggcgaggaacatcacgccgatgttgtgattgtcaatgctgacctcgtttacgcctccgagcacttgattcctgacgatgccagaaacaagattggccaactgggtgaagtcaagagaagttggtgggctgacttagttggtggaaagaagctcaagggaagttgcagtagtttgagcttctactggagcatggaccgaatcgtggacggtctgggcggacacagtgcgtagtccatcccgcgaaatcctctttcaaaatcgtaagtgcagaggctgaagtttatttttacactttatctagatatcttcttggccgaggacttcaagggatcattcgacacaatcttcgaggagttgggtctcccagccgatccttccttttacgtgaacgttccctcgcgaatcgatccttctgccgctcccgaaggcaaagatgctatcgtcattcttgtggtatgtgctattctctgtactttcgtttttcgcccgccatgatgtctcgattctcaaacatactatatcgaaccccccttagccgtgtggccatatcgacgcttcgaaccctcaagattacaacaagcttgttgctcgggcaaggaagtttgtgatccaaacgctttccgccaagcttggacttcccgactttgaaaaaatgattgtggcagagaaggttcacgatgctccctcttgggagaaagaatttaacctcaaggacggaagcatcttgggactggctcacaactttatgcaagttcttggtttcaggccgagcaccagacatcccaagtatgacaagttgttctttgtcggggcttcgactcatcccggaactggggttcccatcgtcttggctggagccaagttaactgccaaccaagttctcgaatcctttgaccgatccccagctccagatcccaatatgtcactctccgtaccatatggaaaacctctcaaatcaaatggaacgggtatcgattctcaggtccagctgaagttcatggatttggagagatgggtataccttttggtgttgttgattggggccgtgatcgctcgatccgttggtgttcttgctttctgaagcaagacaacgatcgtttcttagagttttttttagtctcttcctgtgttctctctatatacatactctgctcgtctgttctcttctcgagggttcctctttactttgtgtcagagtcatacccggtctctctcaacgtccgtttgagggctagacaattgttagtctcgaaatctccatcacctcaagtctgatgttcatcatcttttttattcgttgcaatatacatgactgttatggaccgccttctcgatcgtcaattgataagtcaaaaattatgtttgatttgataacaacatcaagcgtatatacttgatgagaaaaggaggaggagaggtgtctgaacgcatctaaacccgctcaatagtcggttcccctagaaaccacctctttgcacgtgggtcggagaaggatggtgtgctcgtactgagccgtcatggatctgtcgtggtcaatgaagaagagtacaagagtgagttgatgatcggatcggaggtttatgagatggatagaagaagaggagccgtgtctaccctttgatgtcggtcaacggcgggtagtccatcacgattccagtcgagaccagctcgttcaactacgtattggcaagagagagagacatgtaggaagataagagcgagaacaggggtcagaggaggtaaaatgaagcagaataagagaactgaaagtaagaagtgaaggaggacgcacgccgaggagatatccgctttcacctatccggtcgagataacgtctacagaacgggagcgagtcaaagttcttgttgattgtcttcagaagtgacttcgaggattcacgtctgagtgaacgatatgaaatttgtctcagttgaacctgttcgacgcaagaacgaagataagatagcagaaacattacctcagtccattggcgttgtaatctttggatcgggcgtagtgtgagcatacaccatcctcgatgactcggcctcgaccggtggaaccgaatgtttcaatagcaaagtctgatgtgccaaacgaagacacgtccccatattgatgacggtgaaaatcagataggaaaagtataaggggaagacgaaacagacaagtgcgtcttacattcgccctcttccatctttgtttcgtcgttgttcttgacgatcgggaccgatttgcctccgtgaatttcataagggttgatcgagtgcccattcaagttcgcaattgccttgactgatatagaaaagtagatatg

SEQ ID NO: 326 - DNA, 22605 bp, Xanthophyllomyces dendrorhous
atatagaaaagtagatatgtgaaagaactttgtcaagagtagatacaaagagacatggaaggcggcgcattcggaacaaatcaatactcaccttgcttcgtttctgttccgatgacgacctcataggattccataacctcctgaatagactctccaatatcacacaatctcacatctattccagcttctttgattccagtgttggtagcgtccttcacagccttcaacaactcgtcatacgtgggctcgaacgacatggtgaaagcagagtcgacgattcggccgttgacgtgaactccaaaatcgaccttcatgacgtcctctctacgaagaactggatatagagatcggaaacaactaattgaaaccctgcgctccaagtgggagaaacaaaacataaatcacataaatcactcacttgtcttgtctcctgcgtttggacctggagaaagcgttatgccatgaagagaagcgtatgagctgattatatcccgtttcgaaaaggttacgtcaaacaacgtactaaagtgggcagcgatctcgttcaagttaactccggtggggaaaccgattcctctatccaacccatgctcttccacgagcgccctagtaccagcctcgatattctctgcaatctccgtcaaagtcatccccggcttgatggttcggttcgcgtgagctcgaacaagtctgtgaacttcggctgctcgtcgaatatcctggtacgtctgagcaggatcagcctgaagagtcttctctagcgctcgaagttcagaggaggagtatcggtaggcattgctataaagatgatccggacacatggcgaaatagccatttagttgactgaattgggtagtagaactggcccccccccaaaaaaaaaagaacagaggaggacaaactcgttggtatactccattatctctccttccggatagataccatcggtatagatcttgctcaaaccaactctaggtggatcagattggacctgaggacctccgttggctgccttggaagccgcagacttcttcttcttgggcttctttttcttcttcttcttggtggcttctccgttgagaggagtagccgagatggcctcatcgtcttccgaaccggacgagtttgggtcatctttggtgatcacttgttcatctatggcggcagaagccaaagcagactggatagtctcaacgtcggcagtcatgatgtggctctgagtgaagaggtgtaggatggtgaactgtctacgttttccatgcggattcgaatgatatgaatttgagaattctgctgactaagccaagctgccaaatgtggtccgcatcatcatcattatcatcaatcgcattcgcacatcgtatccgctggtgtaggatcatagaccggacatcaagacatttgtatgaaagtatctacagagacacgctcagaccaagacttcgcccactggtttccaggcttctggctcaatccccttcgtaacacagatgctcactctgtcgaaggagaccgtttctatcagtgtctcactctgttccgcttcggaatctcccaagatgctgggtgagctgacgagagctattcctccacaaggcatcgagcgcactcttttggatcggtaaagctcgtccacaatgatctggcggtcttcgagagagatgtcggagtacaacagcgaaatatgaggaaagtacaccggccgttcggatggtgaaggcaggaacttgagcgttagatcgtggaaaagcataagatcaggatgctctgtattgtatgacaccccatgaagaatgacagtcacagtttagatgaacatccgttgaacaaacacttcaggctgacacgaaccttccaaagcaaccaacacacatcgaaaatactcttcgcctctccgtacatccttgaaccttactgtcagttcattcttgtgcctatccttgattgagtttctccactctgccaacgcatcttcgactcccttcatgacatcttcgagggatgttccgtgtggtgcggatccgaggagtgtagcatgtgccggaaaccgagggccaggaagagagctgatcagagttcggaaggtatcagaagcaagagatttcgaaggcgtcagccagagggagtatgaaggttctttcgtcatatcaattgcagcggagatagtttttgatgtcgtcgactttgacgtactggctagctggcagtagatgttgctacaggtgatgttgttagacgtggttagggttgcgggacggttccgagtttatttccttctcactcatggtgccatcattctccataagcaaacattcatcatcaagtgttctgacttgggtttgtcgttcgtttgtacaatacataactcggtctgatgtgctccattacacaggatggtcaggtttgggatctatcctcactctcaaacgaaaagtaggcctgaactcatcgattagatcaaacacgtatcatctctgatcgtaaagctcaccattttctgtggctttctctttccatacgcctcagttttgattacaacttgacaacctcgagcggaacaaactttttgttgaacgtttgtagaccgttagttgccgagttatggagagttttcgatccggataacacgatggccgtcatcagaacttctcaaggtgataggtctattgggttcgtgtaggatgtttgctcatgtgttcagttcacgttctcttccttcgagggaaacatgtttactcatcatacactgtcatcatatagcgcgctcaatcgaaattttactcttgcaccaaccttgccacccacgccgctattgactctaacttcaggcgctccgtgcccttcagcacctgatacattgatctcaacattgatccattttgtctgcgccgctaccgatcaagccaactctcaatcaaacaaaccggtcttgataggtgctcttccggtgggagctaaggaggaagaatcatgtagctacgtcttcgagtggaagacaagtcatgcttgctcaagctcggccggcgcatcgggagtactaggtgatttcggagcgatcgccgtctttttcgtactgttagtcctctgcctgctcgattggtgatctattatattttgtatcgattgagaatacaatcaactgatgaaacatgttttctttgttcagcgcaattaccgtcgtcctggcgtacttattcggcaccttcctatacaatcgatttattcttcaacttcgcggtctcgatcagcttccttctcttccgtctcttccaaaaatctcgaatccatttaaaagacaagggagctcgggatccgggtctggacgaagtctttggggctcttggagatcgagtcatagaggggatggtgttgggggatactacggaaacttggccactcatgaaagaggtgatgatgaagaagaggggctcgtgggtagattcgggcttgatagtagcgacgaagaagacgatgggttcgtttacgactttcattttctttcataatcttctcgacataccctatcgctttcacggctcgcagaacgatcagcttactaattcatattttgacaatgtatctacagtgacgcacctgccttgtctagtgattcgagggtgtggaggactccagtaataaactcaaacccttcccaggcttctgatggtcgattggtcaacttgtagtgcatcttttcctccgtaatcaaaatagaggcactctgttcccgaaagagttgctcgtggtgttcttcgataaggaagacgtatgcatacaatgttctcagaaagacaaatgttgatcagttgattttttatgtcccaagctatccgatccagtaggtatatgtataatgattggaagttatgatggattagagatgctctgaagatgcgttacagataaaaccatacaattaaacagatatacactgacaggaacgagttcagtttggtcagaacgtatgctacagaaaatgatgtgttggaatgaatctgttctaaagggcaaaccacataaagctctttggttcccctatctagattacgtctccaatgaagatacccaaagcagaggtcgcattcttctggtcctcaagtgcacaggctttgacaaagtcaccatactgatccttccttccttgaatataggtgataaactcgtcggtaggacaagtcgatccaggaccggactgacaatcaggaataggaatcggagcctggttgactcgactgaattcaatgcaacagtttggccatcagctacaatgagtccggttcaacaaaaacgtaagaaaatatgatcacgcacactcggatgtaagaagttccattcaacggacagctcaggaactcaagcccgacgttacccaaaaaaggcagaatctccgaggttttccaagctcggtctctatcaatcgactcggtgctcatcgtgttgttgatgtctccagcaatagtcagatttccggcaataccaacagagttgttgaagatacctaacgcggtggccaggaaggcgggctcttctctgtgggtgaacgaaaggaaaagcttttgctgggaggcgatgtcaatagtcgtgttggtagtcgatgtattggatggagcgagaggtgaggatagcgtgatgttgaggagctggtcaacagaggctagtacccaaggaagtcctagggaaggagactcgggataaccgtaacccaaagaataatggtactttaagctgagacgacaattctgatcagcgggctatcgataaaataaccttgcatggtggaaaccaaacgatatagaaatgaacactcactcattagcgtattcaaatccgagccagtcctcattggtgaaagcatcggtggtgcagaacggagaggtatcgtttccgataacggtatcataacctatacgtgcgcagaggttgagtcagacaaccttttagacacgcaagacaaacaaagacttaccgcaaagctgctgcatcgcgtacacgtcgtcaacagtaaaattgaaagcaggtatctcggcgttcagtcgttgaacaatcggcgaggcgtacttgttcaaccaagtggtcgactcgttcgtttcagatgtagcatcataagtctcgcaggaatcctaccggtaacgaaaggggcataactcttctcaatcgttgcatttcacaggaggtcactctgaaactatgggactcacatgaggagtcaaagtttgtgcggcctgtagctcgccttcggctacagtcacgacctcaatcaaggaagtgtcattgacgaagccagagataaaagctcgagtcgtgtcttcgtctcgatcggcagaggcagtccagacctaagccgagcacacatcatggcgtgagaacaatagtttctatcgctttgattgaagaacatatatgaacaaaccttgaacgcggtcaagttgtcggtcggaaccaggtggggaatatacgacgagaacatacggcccaaatcagccgcgtcgctctgtttgaaggtagaattcaaaggtcagaatacgctaaggaagtctgaacagtgatgtctatactcacaagaccgatgggggtaacctcggaaacttgggaggttgcatttgtaatgtttagcaaaggcacgtaatcggagaggagggatagagatgtattggcgaagtctgctctggccgtgaagttgagaagcttcgataggaaaggctcgagataatattcgtagtcataactgtatgaaagatgagagcgataacttcagtatacattgtagaaactgatactccaagctaccgagctcactcgttggcataactgtaagacagagaaggaacaacgagtgaagcatggcatcagaagaggctgggtatgttatatgactcgctcaacgaagactcacatatcggtgtgtcggaacagatacgaagcactctcaatcatgcaaccctcgggaggggaggggtttagctcgactcctggagactgtgaatagaatgaataagcttctgcgctatggaaacggcgactgtatcggtgaaagatagcgtacgatgaaatatggagcgattccagccagatgatgaagaggataaaactctggatcacttgcgttctgggtattgtgaaagaacgtggaaatttctggtctacgagcaattggtagtccccgaaggttgggagtagggcctccaagcgcaaaagagctgaatgatgatagaacggcaagcaggacgatacaagacgacatgaccttgagctagtacaaagtagaatctttttcctcttaagatggatgtttgaataaagaaaagacttttcgactgatcaagttgaaaccttttacggagagagaaaaagacttgagggtaaaacggcttaagcgacgtcccgagtgacgtcacttgaagcctcacggctcggaaggttttaccttgccgtggatattctccggcatttctggcgttgttacagagctttctttttatagtggccttctcttccttatatcattgatcatgttgtctgcaagacggtggctatgtttcaggtcaaattctagtatcatcatctactctcagtctacaggcaacaacctaggtttcccatccgacacaaaagccagacttcccaaccgttcgttcttgcgctcttccatccctgcagcgaatgcagactttttttttttaaaagaaagaaaaaaaaagccatgtatgatcagatgcaagattagagaatatttatccgttcaatatctcaaagttgaaatactcacaggaacaagaattccacagcagtccccaaacccttcggccttgatatctcctaccgtcctcacatgcttgtgatcaccatggtcaaccacatccccctcggtaacatcatccattccctcaggcataggtaaaagagagccaaacagaaagtgctgcatgacaggtaatcgaccgagtacctcagcagtgaacattttgatcatcccttcgttcacctttgaccaggtcttgacggcggagatatcgtcaagcatgggcgaatgccaccgaagagtcgcagttttgatctaaggacagaagaaagagcaagttcgaacatttgtcgttgtctccgtcacaaaacgatgcaatctgaataagacatacagagttgataaactggatacatgcaagatacatataatccggagagaactgctccaaaatctcgggatcatgaattgacttgggtcgtagatatttgtgtgctgaatggttgaacgaatcgttcttgattcatctttcgggacgatatgttatactaacccagagaaaggagctgaaagacagacattacctttcaattgtcctgcgccccataagaatggcaggaagtgatagctgttttgattcagaaccagattgagcaggaagtcgttactatctttgttgctgctttataaactcaaataaatcgtataaaaggaattactcgtccaaaccccaaactccgtgcgaccctgctggctcaagccagtaagatttctggagatgtcgcatagtttgagtgtatctgttgatcgaaatgggaagaaagggtttgaacatgaagaacaatgggaggtgacctaagccaatatcaagcagagaatggcacgtacctccaaaagacccgaatgacgagagctctcgaatcttcaacgaagaaaacgttcaattttcgaagacataacctatccaagaagaagtaatcagcaaatttcagggacaggaaaacagtaaaggaacaaacagccagcaaacaaagtttagttccatcccacttccgtaatcgacccttgttcggtttccccaactttcgttgaaatatccagcaagctcagggatagccttcgacggtacgtttggtagagttgaaataagatcggccgagttcttgttggcgttaatgagaaaagaaaagtcagctatcgattatcggtataagtgatggtatgtttgctcgaacttgttgaatcttgtcgtaaaagtctcgaaaggccgggtttccaaatctagacattttgttgtccaccggtggagtggatcgtgctaatgattcaacttgatcaagtatgaggagagcagcctccaccgcctgcgatacgtcgcaaagaaacagtctgaaaatgtcagaaatccatcacagagcttgaagaacaagagaaaaaggaaaaaaagggttgtttaagcaaggaaaagaggacgaacaggtgaacaaggaattggctcagtcagtttcacaccgactattgcatcgttgagattctggatgaattcgagaagatcagaatgaacagtcgattgaccgaacttttctagatgggactgagtgacaatatatttctggggagcaatgaataccatgctgatgatgatagtgatgatagtgtttgataaaaaagcgaagtgtgatggaggttgaagagtaaaagagaaatagtgtttatcttatctggcgaaggatcccaaattcgagttcacctagagaccacaacatccatggtccatctgtcctcttcctccttgccagtatctctggctatcgaactccagaaagattggccatatcgaacacagctcattcttcagcctgtcggtcactcccctctcagtcagctcagagacgctttgtttagcttgcctgatgtcgaagaacgtcggttcaactccgttttcttcgcagccctcctcactctggcccaaaccaagatttcatccgttccctacagtcaagttacactctcttctaggtgtttctatacagaggtgataatagtatggactatccatgaccttctgtattcttcgggcaaacccacagatgacgagcactgggagactgctgtggctaggctcgacatgacacttattgttgctggcgcacccaatcgagaggagactattcatactcttatcgagtttatccaaaggaattatcttcctccatctgttaggacgtcatctttacctgctgagcctcgaaacaaacggacgaagtttacgcacgattctccttcggaagaacatcagctcctactagcgcccaatccaatcttgtccttcgatcacgctccttcactttcggcctatctgaacaaatattctcaaacaccgttcatcgtccgttctcatttgattgaaacaggttggcctgctatatgcgaacaagattcaacctggaaggataaaacttatctggttaaagcagtcggtagaggcagaattgtcccagttgagataggaggggagtatacgagcgaagggtggggacaagggatggtcccttttgagcagtttttggatcgggtaggatggggcagttgtgctgcctggtccgagagatatgaaagcgatcaagaagcatcgaaggaaccagctctatacttggctcagcattctctgctcaaccaattcccagttcttagaaaagatattcttttgccagattatgtcttttctggaccggaggaagacgttccaaaaggatacaagcctccctcaaacgaagaggcgctagtaattaatgtctgggttggagggaatggaaggtctagtccatcgcatacggttagtctctgctccctacttccagatgcagctgatctgaagaccgctcatttctccgagttgattttgttttatacgggctttgaataggatccattctacaattgttatggttggtcgattctttatcgatatcttattaatcaacaaggatgcataatgacatgattgaatcaccaattttctgttgatagcgcaagttgtcggccagaaacgaatatttcttactcctcctactcaatcagacgccatgtaccctttctcctcatctacgtcgtctgctttgtcggactcttcttcgaccgaatccacatcgttcacagctcatctactatccaacacctctcaagtacctatcttcacaccggataatcgacctccagatcgagatacttatccaaaattctattcggacgcgctgggatgcagcttggaaggtgtgctgaatgagggtgatatgctagtcatgccgttcgtccttaagtcactctaaacaattttcttctgcagatatacacaccaaagctaacaaatctttgataccaaactccctgtccttttcttctgttcaagccctgggtggtggcatgcaatgagacaggaaggaagaggatggggagtctctttttggtattgaaaaattaaaattcataaaacgtgtacgaacatgttgtcggagtcgatgcggtctctgtattcaaaaagaaaaaaaagaaaaaacgtgtcaagcaaaaagagtaagaaagaagacgaaaggctgaaacatccatgaataaagacacaagaccgataggatttcaaggataatttatccgatgagaaaattcaccatggtacacagacggaagtgagggtgtggaaaacgcgacaagatacgataggaatacacttgacaagaaagaatgtataggcagaatgcccgcaagaaaaagaatagctatacgatgttttggttggaacagtcctacatagagaaaagaatcaacgaacgccaagaaagttcttgtgtaaaccgctcatagctagagactgagggagaatgtatattgatcggatgttgcgaaaaacaggtttcgtgacggatccaagaagcataagacttagacgcgacgggtagagaagagtaattgaatgagtgttgtacagatggattattgaatacatgaaggaaaaaatgaccagccttgtggaacaaggtagaaaactactactaaatggaccaaatgaaagaagggtcttaatcaacgtgccaaagtctctgttgctactgacagatcctgaggaccaaatcttcgtatagcatatccgtctcctgcccctgtctcgaaacttcgtacaagatcggcgatctcgggatgactggcgcttcttgatcttgttttcggtggagtgggaggcaactgattgatcgtcgcgtgagaagtggtcaacctgttcagagttttgctgggagaagatgagagactgaaaggtaatctcgatcttcggctcagaggtgaaagaacaaccgaagaggaggacgagggttgacttgagaatggctccgaaggtgatgagatagtgggaaggtaggacgtggttgagaacctgagcaaaccggaagggcgaatgggcttggagatggacgaggacgaaagtatggaagaaacagcttgtttttcagccggcgagctaaaagaggcgctggcctgacgggaccgaggcaagctttcacaggggtcagcaatttgcaagctttcgtccttgatctcatgtccttccaaaggagtatgaagctcgccatcatcaacagtaatgtcactctgagccgtcgaatttgttcgttgaggggttacccgctcggtgaatatagtcgtgaagacatcgggaagactagtcgtttcagagctgaatttatctttgggcgtctcgttctgcatcttggcgtcattttctccatcggacgattccatatagttggtctcttccggtagagggacttcctgacggtcagtattgacaagcttcgattgggatgtagacaattcgctgtcgagaagatttggtctatcgttccgttctgatgaagaggatcgcgagaattgattgggaagcgcagggagaaagtttaaaacaaagtcgcgctgggactcgaacgcgattttggtactgtttgtggtcaaatattgaaaaaagaatcacagaccaacatatcgattgagaatcacaatacaaaaaggaacagtaccaggaagaaaaatcactcacgcctcgaggaaaggaaacgtttggaatacatggacgcaatcctcaaagacctcatgtctcaccactgtaccgctcaaggtagccttgtgcgctaacaaagtgatctcgtcccttagaacttcggcttcaccagattgaatgagcaaaggagggagtcctttgaaatcaccgaagagaggagatgcgctgttgagtgtaaagtcaatttgtaaaatgagaacatcttagttacggccaagcaaagggtgtgatggacttcagaacctactaaggatgagtgaggtattttttcaccccttcttcacccagatagcagtataccggattcaagtgatcatcgagcccaggtctgggaacaatatcgaaaggagctgcgcgaaacataaaggatacatgtcggtcatgaacaggcggcatagaggaaaatcttccgcaaaatactgaccatttgaatcccatgaatcgcacgacatggtcaaatccacccaaggagacatcaatatagctcccgatggaagcggatatcctgagtagagagaatcgtgatagaagccgagaggttcaggctgtgtatgaggtcaaagaaagtcatgcaacagaaagggacaaacaacttaccattgtctctcaagtacagtaacgtacccagtaccaaccctccaccggcagagtcaccggcgaaaagaatattttccggctttacaccgagctcgtctgtgagtctgaaatatgcgctaacggcgtcgtgtaggggacccggaaaccgagtttccggagcaagtcggtagttaattgcgtacactctggcctgacattgagacgagatctgtgtggtgatagatcgatgggttgccgctgagaatacgtagtaggcaccttaacggatgatacgacagcgaatgaacgatcaacaccaaaaaaaaaacgagaaagaaagaaaccaaaaaacaagcaaggaagtgtttagatcaaggagattaagaggatatcatggggtttgtaatcaggcttctgagcatgtatcaaacaaaccaaacatacctccgtgcagatagagcacaatgcgctctccaccctttccgccttttctcctctctttccactctctttgccattttgcccagagtaccttgtcgacgacccattcacctccaacttctcttccgctgccgaaaccaccctcgattgaataagggtcatagttttcacctcccagttcgtaagaatcgaagtcggctaagagacctctcaatccgcgagactttacacggaacgaaaacggagtgacaatggcagaagaaggaagaggggctaaagtagacagcgagacgaggccacgaataaacggctgaggtcgagatcggcggttgttccacatcccaggttgcggtgaagaaggtaaagatataagtcataacaaacgggggtcagactaaacttgagatttcatgcaaagtgaatggttgattagggaaaaatctttcacggactatgtctgccagatgagaatgtgcaccaacatcccgcatcatggatgtgatgatagtcatcctttttcgaggagcaacaaaggtacaataaattcaggcaaggttaatgaaggactaggctagacaaacgaggaagaattgacgatgaagatacatggcatgaaagaagacctttaagataagccggggtaaaaagccttactctaatccccaagatttcttacgaggtccatatatggtatgggttgcgagttcggttgccagatgactagctatggccgtcaatatttgtcacaagaaggatcagaacatagcctctaggattttaccaggagaaagatttcaaaatacatggacacatggccatgcaatcgttggaatctttatcttgcagagtgcaagggctgataaataaacatgtgacttacctttggcgacgacgaaaccagcgagcttgaagacctcacccacaccccagccggtgaggaagcgcttgccttgcctttgtaccagactattatctattctagcagatgctggtgtgtctggagacgagtagtgagccaacctttggtacaggtcggaaggaaggtcggctgttgagccgacgggagttgccgacgacgtgctagacggcgtggcagaattcgccggcggtttgcgaaagaaccaacccatgctggggaaacgagaaatacccagaagagaaccgacgagcgtggggagaggagaacgagattcaggtgaccgagagaagcagagcgaacaagcgagtatgagtgtatataagaaaaggttggatgaccgaaacggcaagaagcggctgaataagagaaggtgtgttgagaagaggattgagggtgaaactcgagaccgattacgtcgtgttgttattgtaacccatccagccgaaccggccagatagccgggggttcacacaggttcacacaggttcacaagggttcatctgggttcaggcaggttcgatgtcgaaatagagtcatacacagccacatgatgtaatcaaagttacgctatccttacacttcacgcccctccatcaatcctctctcatcgtttgccggggttcgctcgttctctccatccttttctttttgctccttctcagatcgtccgccatcccatcttctcctttcgctcgtccgtcttgactcgtactcttgatcttacagtccaatatcgagagcgttgttgtacgtgttgtgcgcgtgccagtgtcggttgtttcttttttcttcttttcctcttcgggcgctctgttttccttgcgccttctgtaaactctacaacatcaccatcaggtttccattatgagcacgaacaaggtctgtccgctcttttgtacacatggctgacctgatcagatctctttcctagttcttagcctggatcattcctacgagacctatcaagcatctgatcactttctgttctctcaccttgtccttcatccgggccgacataggctacgttcctcagagaatataaactcgtcgtcgtcggtggaggaggtatgtctgtcatcctgtctcgcatcattgcatcggtcaccatcttaccaattaatttccgtcttttgtgtgctggatggtcatctcatgattcgctcgattacggaacgtgctgtactcgccctaggtgtgggaaagtcggccctcagtcagtcctgatgtcttcatttcgcaattcttgcacgcgtcaggataactttacttcaagcctgaacgtttctcatactttccgctcttccttctcctcatcaattaatttgtgtatctgtgacgtcgtgtcaactacatgcccgtcgtatcaatctccctcgcctggaccacggtcgatgctttgaccggacatatcttcctgcgtgatcgtgaacatgttcttcaaatatcatgcgacccatctcttatgttacaacgtccagccattcaattcatccagtcgcatttcgttgacgagtatgatcccacaatcgaagactcatatcgtaaacaaacaacgattgatgacgagattgcattactcgacgtgttagataccgccggtcaagaagagtatgggtacgtggttgattgttctcaatttaatcctttgaggggaagaagttccagtcaattcttgactgtatgctcgaggaattcgtcccgtacttctcaagcttgtataagaccacaagtctttgccactcaaagaacactgcgtgtcaactttctggacatatggcgctctatctgacgttgatgctcatgttttctgattctcactccgattcaaattctatatgtttgtcacagtgctatgcgtgaacagtacgtatttgtgcaatattgtatatcttccttgcggttatcgatctaatggaatatgatttttgggccaatggtcttctctttcacactctgaccagatatatgcggacaggcgaagggttcatgttggtttactccatcacttccagaaactcatttgaagagatctctcagttccacgctcagatactcagagtaaaggataaagatgtgagttgtaataatttgtagtttctcggagttgggttttcttccgcaaatgtgctcataaataccctgtctatggaacgccaccgctctaaggatgtgccttgtgtgattgtggctaacaagagtgacctggaatacgagagacaagtcgatgctcaaggttgttacatttcaaaccatagtctagcccctttggttgtgtcgtatgctaaatacgacgattacccctcacctcatctgcgccattcttcaatcagagggacggcgtcttgcccagcaattgcgaacgatttgcatcgagacctcggctaagcagcgtgtgaacgttgatgaggctttcctggagctcgttcgaagcatccgaaagcacaacaaggtctgtcttccagcatttatgagccggctatttaggatgatgtaattgactgttgtcatgactttccttgcaatcaccttcgtctagccggtagaaacgggccgcaagacagatcccgccgctgcgtcgtcgtccaaagccaggtccaaatcatcgggcggaaaagattcccatagtagtggatgctgcgttatcttatagatacctcttcttccctctttcatatccaatcttttgatttcttattctacctgtctgtagctctcacatacttgtccatacctgttttcttttgcctctcggttgcctttcggaaacatcccttctcatttttcatctcgttagtgacgtctatctctcattctctctatcgtccttgtcgaattcgttttgatcgtcaactctcctttggttctgccatcagacctgttgccgttctgaatcattagaagggactagttttcctcttgcttctgcaaatctaatcctttttctaactttttgctctgctcctgtgttattttttccctctttccctccgtcaaactcacccaatccagaattcaaaaaatacaaccacctccgttaatgatctgttcctagtttgctaagggttaatacgtccgacgatgccatgtttattcttccttattcgaaaaatgtttttccattgaccctcaatttgtgcttggtttgctacgtgtatctgttggctggatgcaatctatcggctggtctttgccggttgtttaatcgagagatgcgtggtccggatgtgatgaagaaaaagaagagagttgtaaagatagaagacagtagagtctaatttaatctgaagccgtggtgaggagaaaagattgacgatggactcgggtgatttgtcaacgtcaatcagtcgctatcacttccagatcccgttcctacagaaaagaaagaataagaaatcatgttagtctagtcaggacggtatgcaagagataccccggtccagagaatagttacctggtccatcgtcctcttctgcgagatcgccagaatcaaacatatcaatgcctccttcctcccctcgtgcctcgtcctcctcctgttgttctttcatgatctctatgatctccacgtcggacggtcgggaaggtgacagtagatcaactggaagctgcctatatttattcggtatctgcgtagaagatccggcttcaagaagcgagcgcacttaggagaaccgagatggtgaagtagagggtgactgtaagtgcttggaactgaatacggaagcagtggatgaggacaaaccaagatatattctcagttcttgatcttgaacttgcatagcgagatgaatgggagtcaagccctccaatcttgtctgcagatcgacatcgcaatcatcttcttccagaatgtgatccaagctacatatcgtcagggccgagtagaacacagtaggtgagaagtaaaaataagatgtgctcgggctttagaaaagatccaaagagttgaaagagcgtgatctggccttaccagtcagttgatcctcgttgaacagcgtagtgaagagcagtaaagcctagactaagagtgagtgtttatgatcatgtttatctttgtcagatgaaatttcatctccaaaacttctatcctgatgatgcggaaatgaataatggacactgacccatcttgatgattgatgtcaaaacggcccgtcagagacaagacggatactgatcatttgtgattacaacagaaaattcagggatagggaccccaatcgtaagttgatgagaaatacaaggcgactctcgttgagacaatgaaaggaactgacacaaaagttcttcattatccgtcttggctgcattgagaagctgctcatctggtaatacagatagtccgtatcagcatgttttgaggtaagggtttcgcaggaagcgatcactgaaagaaagaaaacttcgacacttcataagtgatagactcactgggtgatgcaccttggtcctgcatgagtgagatcataagagagttagactggagatgaaatctgaaagcctcaattgcgatgtctgatgagtgcccaagatgatcagaatgattgttaaagtgggcgtatcgttttgttgtactcacagccgcagttggccgacgacattcccaagccgcctgcttctgactgtaatatatttaccaagatacgatgacgaaaaggaactcttcgttctggcactcgttcccagtcatctcctcactggtttctcaaatttgtttccaacaaccatgtacacactacccagctgtctcagccaaatgcatcgagaaaccaggaaaacagaggagagccagctagaaagtctatagctcattggagagaaacccttggaactcggcgcagaaacaagtagaaaaaagaatctgtggctttggctactagagagtaacctcagccgatggtggtcgatacgtgacttttctggacttgggtgccctcagtccacagaccaccaaatccccgttggtcatgggtctggtttgccttcttgatgagctagtgttagcttcagtgacaacctcaacatgatcctcaacattcaaagcagcagctgtgtcgtcaaacaccaatactctcgacccctcgttgtccacctggtgcagggttaggtggagtatgtagcgggatgcatcgacactcatatttcaccaagtctgagagcaagcagagaaagaatgagaactcgacattttgtcctaaaacagagacgaacatgaaaggaaatcatcagaaaaagagacaaatgaacagaaagactaatagacaaggaggtagtagagtaaagaaggatcttcttcataaggatcacaagtttgtctctttgtttctctcggtctctggtttttctcatccttctacttatccagttctctatctctttgtctgtgagctgcgcagccttcaccaggtcgttcatcataacccaaagccagtcgaaccgatcaagagggattcgttgcgaacaaacaggcaccaagcttaacagctggtagagacaaaaaaatgtcggaggcaatgaggacaatcgtccgccttgaacactcatcagcggtgctggtaattatcactgctgcttctgctgctcttacagctgctgccgccctgttgacaggaaccagactacatctatgactcatgggagttttgattgtctaaggtctcgagatacccaagttcgatatagctatgtatcgaccactgtcagttgaggtcacttacttgtggccaaagccatacgatatatgtttgtaaatgtacagtgtaccaccctgcgatggacaaaacgagcgcattgactttatcgaactgtaagcgtatcacagaactcacgcgaacatatcatcgttgttgttgttagtcaccggttagtaaccaaagtacactccttgtactgttccttcctaccaattcattttcgatactttgacctccactccgttcattctttcattccgttctcttcaagcttcttttactcttttgttgtaatgaggttttcttcgattttttcaggagcgctcattagcttcgtcgctgcgagcttcggtttagcctctacactctcggatggctcagtgacagcgaccgcgctagaccccaatcttacaagagtacgatgaatatttgttgttttcattgatcgttcctaactatgtccatcttactgaatgttgttgcaactttctttgaattttttttggccatatagtcttttcatgggatagcttactccccatcaggtttgatttctcctgttcattcaaacatcgaattaacagtaaagttcttggcgccgagtccaaagctatgtattctattctcttgctaacacacctctgtggcttcctattttgttgtaaatgacatgtcaggtgtgattcttccaaattgtatgtcaacgttctcatttacttgtatacacaactatacagcatcattgacgacttctttgtctccataggtggtgctacccaggaagccgtcacgaatgatgttctcctgctcgctcagctgacccctcgaattcgtacatagtaagtcctactccatcccccttcctacctctcctttgcagctcgtacgcaactgatgcttggcgctattcctcttagcgcctccgactgcaaccagacgctctacatctttgaagccatccggcagacaaacgcagatctcatggtatggatcggcatctacctctccacaggtaccgatatcgataccgtctacgaacgccaatggactgcgatcgagtcagtcatcaatgagtacggaacaaaaaacatcggtggaatcaccgtcggaaacgagttcctcttgctctcttacggtgacggcactgcaactgatgccactggagtcgccgccagaactacgttgctgagctacgtgaccaaagccaaaggtatttttttttgtacgactcgacctatgctaggagcttagaaactccgacaaatgattaaacatctctcgttggcatatacagctgcattgagtgccctagacctgaatgtgacgatccctgtgggaacgtctgatgccgggtctgccgcaacgctggctctttgtgaaggcgtcgattactatcaggccaacgttcatccttggtacgctcattgctgcctttggtccgagctgtgggctttcccaacatctgcttaccctcgtctttgatcttctgtgtcgctgtgcaggtttggctcggttgactaccgtggtgctgcagcatggactttcaactttttcgagaagtttgatgtcgaagtttgcgctcccgcttctaacaatccgtgagtgtgctgtcatcgcgagcctctgaatcgaaaaggtagatgactgatcagccacacactcttcttcgtgttcgtcgactccagtactatgtacatcgcagagaccggatggccgacggttagttacgtcttttgacttatttcaccgctgtttgcctccatctgacatatcagtatgatcttgaatctttttgatatagtcttcggacaacgcttccgacgtcagtccttcactcattttgcttggtcagacacctgatcctctacgtttgtttggctgactatctgatctgtcgtcatcctggaatacaggcgaccaacggggcaggttcgcccgcttcgatcgttggacttcaaaccttcatggacgaattcaactgccaagctaacgcgaacaacaccgaatagttcgttggctatgttaactgtagaggcctgcatcccaatcatcacagtgccagcgatgctcatgcaccttgcttggcttccgctttttgttcagcttcttcttcgagttcaaggacgagacctggaaagagatctacggtggtgtcgaaccccactggggactcttctacccgtgcgttatccgttctactctgatggcccatatcccaaatgtccgaagtcagtttagctaaaaacgatggagacaacttggatttgaacaggaaccgaactctcaaggctatcaccgtccgttttgccgtcttcttttttgccatctcgtgcttgtgctcatgccgactcttgtttcgttcctggacatagatcccagagtgtgaagtgagctccccactgaatggaacggtcgctcagcttgtcttcccctcatctggatctacggcagctcagacctcgtctggagcgtctccctcgtcgaccagctccacagacgcaagctctgcctctaggagcggaactcagctgggtgcgggactgtctaccgtcttgagtctcagcatgggactggccacactccttctctgagcatgcgcaatcttccagcaacgcgggctcgatcgatccactcgttattctctactttattgcatttcactctcctttttcactaccactcgatctttctgcctatcatcgcgtttcatcttgccgagaacatacctctggacactatatcgaacacacggactcttttagagatacatttaccatccacatagctagctaccccatctcgtttggcgctctcgaacacgatttcaactgaatttgctcaacatagccttattccggtaaaatctttcaggactgtatggggttgtatctccagttgtttcgcacagttcgactgtcggatctggagggaagattttgacgatacgcactttgcttattatccacagccccgacagatatacttggcaaaaaagtgttttacacaatggctgtgccatccttttccaccaaaactttctgtggcgttgaacggcggccgtcgagcgaatgccaacttaccgcacttcaaggcggtgcaggggtcaaatgaattatattacaacatcgagctagga

SEQ ID NO: 327 - DNA, 1604 bp, Xanthophyllomyces dendrorhous
caccgctacctcatctccaatccgtaatgagccacttgagctttgactaatgagcggtactgacggcggccgtgagggcgcaacactaacatctttctgttgagcatcccttctctccgacttgcttaaaaatgaggtgtctagtagagagcatggaagaagcaacttaccttccctccgattctcattgacactcgctcgcaattcagctcacctcggcacatacttgaacaggaagaaacagatacctcaatctcgaagatgccctctcacaaggccgagatcaggctgattaacatcatccatgctatccaattcgttcttactgtcgctgtcctcgccatcggtctggtcaagatgtttatcatcaaaccgagaacatcaagctccagatggttgctcagtgtggtaagcattgactgatgttctattcttgataggacggactgtccagaagccgacactgatatccttatcgcttgtatatagtctgccaagtctctgatcacactggcatacatagtgttgagcgagaacgtgtcctacttccatcgatgggccagtttgaaggcaaacatgatactcaacatcttggaagccgtcttttggatcgccgccatcgttctaacaaccatgggattgatcaatggaggatgtgcggcaggagtcggctgtggaacaacatacgccgccattgccatcggatccttgcttgcgtgagcggtcttattatattcgaatgcatgcgattgtcgatcatcatgagctgacgatcatctctcaccttctaacagagctttggccctgccgatggcgtacctctctataaaacacttcatgaaccgaaacaagaatcagtatcaaatcaatgacgattcgagctctgatgggtcgaccccaatgataacgaagaactatggccatcaggttgtggtcaacccgacctatgcgaaccatccatcccgtgtttaaacatattttcccctgcctttcctcgctccactgagcctgcataaatactgctattcccttttggtctcgtttatagagatagatagttattcatgattttacgagcaaatagttcaacaagctaggacatcacccagattcagcactaaatttcatacagtcgcagatattgggtttgatgagctcaacctcaaccaacaacggtcgatacatggtccttcttggtcttaggtttccttggactagaatctaacaacggccagtgtctttagagtagcctatccttccaaattcttttttcattcaagctgtggccgctttggaacaccgccagcagagacaacccaccggatttcatgccttcaaaaacacacatcacgagtccgagcaaatgcagtatgtgtgatttttctgcaaaatacatatcattctgacctcatgatacgatacacaaagctggcaaagacatatctagctaccgagacctgtactacacgctctcagttgagccctcctatcctctcgcccacccggaccagggtttccatggcttgctcgcttgatcttctgatgtcttcatcccaggtcgtacttcctgtgggcgtcacaaggatcaccgtgctcccaccgta

SEQ ID NO: 328 - DNA, 879 bp, Xanthophyllomyces dendrorhous
gcgagtgccagaggccatctcggtctggcgatgttgaccggtcgcggcgaatgcaatagtgacgtcaaccgagatacgcttcatgccagtcgcgacggatgaagttcgcctgtttttctactcaactccttcgacttggttttctatctagtagaaaacacattctgtctcagtttctgcccgaacatctgtacactgttgcaccggaagcgatgtccgaatatgagctagctagacaggaaaacatcagagccaaccagcttctgctagcgtcgctaggtatagatcccgttcaggtagatgctgctattttgtgtcgttcccgtaatcgtctatgttgctgatctctcgcttcccatgctgcatacggctcgatcatcagacgaagccagctccaacaccgaaggctgagcctgatggaaaaccaaagaaccgaaggccggctcgatccaagccgtatgagcgagctcgagcagtccctattcgacagtcagcccgaatatctgctctcgatgcgcctatatactcagaccacctttctatcgctgcatcgatggatgacaagcagggcagtattcgccgggtttactcagactcacctcctgcagtaagaaaggcgatccggcagctacctcgagcgccttctccgtatgttgaggacgatgtcgactactcgatcgtcgcgcctcaacctgcgagagacgacgacgggacattccgtttcgaggctggctacgaaggcttcacaccaaacatggctccgtgggagatgcttcgagagggaagctttggtggatcttactggaggtaagttctgtactactcagactaccgtgctttggtcgatgtctgtctcaagctttcctctattctacaaag

SEQ ID NO: 329 - DNA, 737 bp, Xanthophyllomyces dendrorhous
gcagtgtggccaggcccgccacatgagacgtgacctggatgcggtgtcgttacacaaggctgtgtgattccaacatatagcagtctagacaccaaccaccgagtgttgcgagttggttgactttctatctcttcggtttctcgttcaacatgttatttcatttctattttctacatcatctttatttcacttctctctcgttttatttccattctactttatttccatcttgtttctatatcgtttccatcttggtgatctcgaatatacagtagctagtttgttttcttttctctctcctcctttctgattctctcaatcaacttgctcactttgtgtgtgtacaattgtttgagggaatcagtttgttggaagaacttgatcaagtgcaatcagagaaacaggattaagagacttggaaatcagaatcaacatcagagaccaagggcataacgattgtgcttccattgaaggttttcatcaagtgaattccctaccaagtgctccctaattttattatgtcatacgctcaaacaacagcagagtcagcaacatatgcagcaacatatccagcagtccaacgatgtgatcgtcagatcgactcacgatccgtccttttccgactgcatcttttctgtcactcccctgctttcccaggccagaccgactttccttctcgactcgggctgcacacagacctgtgtgagcgaccggtcgatgttctggtcatacgagga

SEQ ID NO: 330 - DNA, 15143 bp, Xanthophyllomyces dendrorhous
agtcatacagacaacaatgtacttccagtttccgaatgcctcaatggtgtttctctcgttgagctagaaaggtttcctcaatagatagacccgatggctagttctgattgcctgattctgatctgaattttctaatgggaaaacaaactagctactgtatattcgagatcaccaagatggaaacgatatagaaacaagatggaaataaagtagaatggaaataaaacgagagagaagtgaaataaagatgatgtagaaaatagaaatgaaataacatgttgaacgagaaaccgaagagatagaaagtcaaccaactcgcaacactcggtggttggtgtctagactgctatatccaatacttccatcgtggctgtttctcttagtgtctttttagcctctttcttcttatctttcttctcatccaagcacattgtgttctctcacatatatctgcgctcgatactttcgtttcttttcttttctttttctttttctttctctttttcccttcctcagtattcacaaaagactgtgttatgggcgcgggcaagggggctgagtggggacggtactctgtgcgcttgagctctcaagagggaagggatcatgcaatattgtagagggatatgaggagatagatgattgtacggagctatgaggagttaacgaggttccaaggtttggagagaaaaggggagatagctaacgactacctagtatatatgtcattcgagatatcaagccaaggaaacacaagcaaacacaaggaaacacaagcaaccacaagcaagagcgaagagataccaaggaggagctgagagataccaaggaagagtcaagatataaccaagagagagttgagatataccaagagcgagttaagcagtaccaagaggctgttgcaaaaatcggtctacattgcgcaaggtcaccctgcgcggatcaaaccgagtcagatcatgacatcatagtcccctacaaccatcctcattataactactctgctgtgttgtatgatcctttcctgcccaagagcctaagggcgccaagtacactcactactcagcccctctgcctgcgtccataacacaatctcgcgctataaaaaaaattctactgattctcaatggtctttttacgaattctactcatcagtatagaattcgagttacagatctcagcgttgatctatatcccttgaaggtcttatggcctgcttcgtgattcaataccacctaagtcaacaatcaagcaatcctagcaaaagctgaggaaagataagtagaagaaaacaacagaaaggacgaagagatgaggagacgagaagaaaagatacggtcaaacgttgaaatatatgtcaaagaatacaaaacggaacatggatgtgaaaacaggaagagaaaggaaggtatggggagttcgagggaatgaatacactcagaggaaagacggccaggatgtaagaagatgcctgctggatttccctactgaaatttgccgaacttcgataacttctatatcaaccaaaatcgtatctttgcggtatgctgatgccaatgatctcctaatccgtgaacatattctgagcttactgaagtaggtgtcatgtgcttcaagtcacgaactaaagtttcaaacacaagcgctgcatcaacttcaatgtccagcgtgcaaatcggcatcttcttgtttagctgcttttttcatgttgcgttccagctccactcggcgaccacctagtccaaatacaattggcttgcctcgaaagtcttcttctgtacgcctggtcaacaccaaccaaaactgatataagtgatcattggtaattgcagaacgaaatgcggaccagtcctgatgtttcttaaggctagttagcttaccgtttaatcttgctcatttcctccatgtcacctatcagatgatggatactcccgggtgaagattgaactatggatttcatggatgaatcatgtgcgagccagaccaaaatgttgggctcttgatccatccttcccagagaggtttgagtcctggctgaacgttctgtacattgaaccatacacagtcaacttgaaaatgcagtgcgagggatgaaaaggtgttttgaatctatagtaagccttacctatgtcttgctcaaaagactggtctttgtttccctctgcctccgagttccacttcttagcaggattctccccagccttatatgtaccaatagtggctcctctcagaagtgaaatatgatgcgctgcgtcgcctgcaaggatgtggtaggtggggcagggatatagagaagtcaatgccaggagagagatagatcctggatgatgctagttgatatacaaatcatatgaagaaaattagtccaatattgatttgtctcagaaaaggcgatattggaaagatgtatcggaaaagaacgaaaagaacggactccaggagtggacagaatgaaaagagaggagtcgccataataatcgaaccctaggaggccaaaaaatgcttatatacgtcatctgcctcaatgtaaaggtatggtaggtataaagggatcgcctaccgacccctaagggaccaaacatacccttaaagcaaccgacatcaatccactggtcttcatcgtttgaaagaaacctatatagtggtacttgcaaatctaagtcagttccgacacggagctagcttcattttggccatcttgaatgactcacctcacttcgcgtccgtcaatgccagatctatcgaccttaaactcgttcattaaatcgtctgttgagggctccttttctctagggccaagtacgattgatacggacttgggaaaggcagaaatatcggagacatgatcgaagtgggtatgactgagagaggaagtcaagagggcaatttgagaagagaatttagtatcaagagttgttatcatcaaacaaagttcgatatggatatcagtgtacctgaaaaacacagatgtgatcgagtcaagaggtatgttttgagaagacaaaacatttgccaccgacgtcggagcttctccgtggtatgccttggcagcatccttagtgatggcgtcgtatttcaagtcctggaggcgcgatcatacatacaactgattattagtatattcaacttcaagagcattctccaagtgattgctaatcttgatacaaatgtacaaagagagcatggaaagaacgatgaagattcggaacggatatgacaacagccaacctgtcttaagccaaggtcccagatgagtctctgcccatcagctttttctatcaagaagctatagtcctcgagttcggcattaccctcgtagccctccacaaagagggagccaggaattgataggtgcccagcaggaatgacggacagtttgaacggctttgctgtggaacgaggcgttgggatggcatagaaggggatgtcatgaggatctagcggatgtacagatatagaagacatggtgagcgagggtcaatgtaaagatggttatccagaggagatggtaaacaggtcagcgatccagacccatctttatgtcagtcagttcaaatgcagctgtggatgggcatgatggcatacgtctatgcggtgactcagttgtatcgagcctttctacgtaagcgagcaggcgatcgatcgaccccaagcgtcacatcgacactcgcaacttgtatctttctttcgataactgatttctcatatcgagcatgatgaaaaacatcagaggattctgacaagacattcatatatatagatgccgcttgaagaccagagaatgtctgactggttctggatcttgcatggtcggtagacggaagatcaaccgtgtgccatgatctcatacatttgaatcattaaagaagaggaaattacagagagtcgtgatgttgagatttattaacacaaggatgaaggagaccgcagaccacaagccgcaaaacaactataacgcaataagaggagggaaagcaaaaactgggtacatatcagcacctagcttgatactcctcgaaggctccaaacacattttcccctgaataagtgatctttatgtccaattgataagtcaatcgatgcgttcagtacgaagcttgacgaaacgttcaaacgacggtgacattgactaacatagagaaaaccatcttcgtccttgtgttcttcgtacactgcgctgatcaatgcagccgttggagggagaacctaaatagaacagaagacagcgacggatgtttcaaaggacatggtcattatgaaagtttatctgatgagactcaccctctgatgcgttttgcagaaacagagaaatggtgaaatggcgattttgtcaggacgtacctcatctacgaagataaaaatggccttttcagcaggcaacttgattcgcttccgaatcacatagacaaactggccgacagtaagatcctgtgagttggcaaacaacgaaagcaaaaggcaacatttgacatgagaacatagcagaatgatatagtgtaagacgaatgatcgcacagatggcaccaggtacttcttcttatcgatggtagggatatctgagttatctccgaaagaacaaaaggtttcaattgaagaaacagactttgaatcagttaaatgcaggaatacactgcgacaaataggtgaacacaccagtcttgtcccctttctcgcagatgactagatatatgatcatgttgagcaaaagcaaagggccgatgtcagtttcatcttcaacaaattttgctgagaacgccgatcatgaaacggacctggtattctgagaagatatcacggtcaatcgagacattgtcagtcttgattgaagtctgagtgatacgtggatgacgaacttcaggccaaacacaaaagatgtaagcatacctatcgctgtatttggccctgattctctgggcctctgcctgtcgcttctctacaatggtgatgattagtcgaccagattttcgatagaagcggaaagtcaccggtggaagcagatcagacagatatgatggtaagtgatgatgtacggctgtataagaagggattgaaatatctcgtatcaaagcggcccatgatcacgaagacaaaactcaccgaaaggatgttcgtccttgaactttgatcgaaccatggtatgttgagtcaagaagaagttttgttgaagagtttgagagcaatatctctagatacaccagatgaacagaggaaacacgaaacaaagccatgtcggtggcgataacgagaacacaagttgcgtaatatgcgagagttaatcgtcacgaggacgatgggtcagcgagatcattgattcggttgcacgacagccgccacgaacaattcacagaagatatgagagtattctgatcagtcaggcgtacacttctgtttcagaaagttgaagatgagaatgagacgaacggagagagatgtgagatgtgatgctttgttcggtgttgatggtgaaggacaggataaggaacgacaatgaactgtttctaggcgatgggatggatgcaagtcacatatagagactgctgcgggtctacgttggaacatcgctgactcagctgatccttattggttatcttagaagtataagctaatcaagaaagtgtgttgagagacatttccactcaccctcgcgtcatacgtgtcaacgcgtctcatctattttgtgcaaggttaaaaagggcgactgattttttcgcttgttgtggcccgttttctctccccacctccattccctcctccatcactttcatcagacatactccacttgaccagctctatattcctacctactcttcagcagaaacttgattgaacatgcctagtcttactccttcttcttcctctgcctcgcagcatattgctcctcttcaccatcccgggcaagaggccgtcgttgttcaacctcatgctcctctgagcaacagttcggccggtaagtagctttccttcctttatctcgacttgtgccctttctctctattctgccgtgattgtgcatcagttcggatctgcttcatacctccttggctatcagcaaggaaactataggtgcttaagacaccaaaaagtgtgagcataggtggtttgcaaagctgacggttgacttggtggaagatagagaaaatgttgttggaagaatctattcacatttgtccttaccccgagatcaaactaagttgtttgctgaagccttatcttctattacttgtctcctttttccgcttttctggtgacatctaggaaacaacatccctccttcggtcaagaacaccattactatggggtctcagatgggtgctggccagaaggctcttcttatgaaacgaatggcatccaagtttgtgtcctttcgttcaaagctgcttacattactacaattgcagaaatatttcggacccagaacggcgatctcatcagagctttcttcttgacaaacattctcatgttctctacagcaaaccttcaatggtatcgccgacggacaacatgatgtcgccttgtaccgccaagctggccggcgcaaagaagaagcactttgccaagtacgttctaatgctgcagttgatttttggagaaggtcaaacacactcctgacaacctcgggccgcatttactgacatttttgtcttttcttgtactgtatgttcagaggtcgacctatggctcttgcgcagtctttctctgcagtggctgattcggcagacgatgtaagctttcttttctttcttttgtttgcatgttcaaaggcgacatcgatcacttacagcctttttcatctaccgtgacgatcaacaggatgacgagaatgttgctcccaagtaacagtcctttgtcatctcctttctgggcggctcccagattctatctattcacttctcttctccattcctcaatttttgttttactataatgatgtacttttatcaagtatgttgattgatttctttttccctcttcatcttgatttgagccttgacagttctcgctaacaaacaatgctttctccatccccgtctttctaccgttttctaggatcattcttcgttcatatttgttcagtgttggtcacacacacacacacgatctttatttggatagcacctcgcacgtgttccgcgcctttcgttttcgcctttctagatttgttcttttttctcccttttttttcttctcgcgcgacgacctcctttgtcttctcagacacctatttttccggtatatattatctgtggcttctcattcatgctcggcttgctaaattgctcatgtcttttcctgcagtcgatgtgaaaaccgtatgttgattttcgatcaaagtatcatttgatcaatagtaagacattctatttaacggtataggaggatacaaaggttggcagatgcaagttctgaagagggcaatacaactgccagaacgtgtcgaacggagtgtagaagacgggctgggccaatcgtctcgttctttgaaagatgattcattaagcagaagcgcgctttccgttgccgatagtgctgatgacctgttcgtagacgtagaagacaatacctccgctcaactgtaatttgacgagagaaagggaagtagatcatatcagccgtcactagctggtaacagaaattcatcgtattgaatgacatttgatatcgtgaaatggtacgtacagtcaatcgagctaaccgaggtgtcgttcccttccaaaaccgaaggattccctcctcggtgaagattcggtaaccacaatgaatgaagttcctgtattcagtcttggcggcaagcgactgcatacgagttttgattacgctgacgtcggtgaaaaatgaaaataaaagcaataatgtgagaagactcgttcttgaattgtattgttagaaaagggtagtccatactcaaagggcattgtcgaatctaccagataaatgatacgatagtaacgcaaacaagacaaaagttaatgactatgaggagaaacatacgaagattgtagagatggatgcacttacagacagtaacgattccagcaagggctccgattccaaaagtgacgcctcctggtagaggctggccggggggaccgtttccttggactagctgcttcaaagtagaataggtagtgaatctgacagcagaattcgctccttgtcgaagcatctagcagagagacgacgtattttcagttcaacccttactcataactctgaatgaatatatagagagagtgtgaacgcacgacggccgatagacctcgataaattccagcaaacccttcacttcgaatgattgaagatgttccatgcgcaagacctctgaactgaggatctggtcgtcttgaatcctcaatcagcttggtcctaagttcaccagatgacaagaacacaagtcagacatatacgatatgaaatgaggtcatcgagaatgcgccgtgcctacttgatagtctctgatggtgttactgcgataactgcttcagtcattcctgccccgagaccagctgttttaacaaaaacgattcggtgagaaggattatgcaaatcgatgataactctaagcagttgttacaccagatgcaatacaaacctaacaagctccgaggggccgtcaatttgccctgtatggcgtgttataaagcaagaacgcgtcaattgtcgtcgtgatccccggttgatttgaacatgggggtcaaaatatgccagacatatgaagctaacgtacgttctcatcttgaagcaagctcttgtagtaatcataactaagaaatctcactccagccttgacagcatttccagccacgagagctccacaacctgcgtacagacccaaagggcccttagcactgagtgtattccgaatgatttcaactggacccggaggctatgaaacccgaccggtttcatcagaagcaaaagcacatgagccttctcaaatcgattgatgaatttataagtaggtttatataccttctggccggcgacggcagtgaattgagcttgggtcttgacaaactcggtaggataggtcacaactccttcaaccatcccggctatcgttccggccgtcaacgatgcccaaagaggttccttctttggtatagcggacatgtatgcgtagattcaaagctagagaaacaagtgatgtcgaaagagacacgaaagcaagtgagggtgaaagagaagaaagtaaaagcaatgaagttaagttgatcgacttttcataattccacaatatggaacaagcttgaaacggtgaaaaggcgatcgaatatcgtgacatcggttacggctcttgcacagcttctatttgcgttttcaatcacagagtacgtgctcaaactattacatctatattgatctctactttatcaaccctttccgacatatcgactcgactcccaagcgttccacaccatcttgagaattcctttgcctcctccgtcaagcccgccaccgaccatgacagaatcacggtccttctctcccaccattccgcatatcgcaaacactcctggctcaagctctcgtctaatcaacggagggacagtcgtgttcaggtcagtcaataatcgagtatacgctagcagcagatacggcgcgtgttttgaaagtgggccagcgagcgactcggccttggtcgaagcagaactagctagtctggtgttcaatcttggaattgttttggccgtcagggaagtcaataatctggcaagacaccgagcgtcatcagcattcaacggttgatcgacagaattaatccaaccaggaagagtggactcgacaattcgaacttgtctgcctcctaggttcgatcgaactgtctggaagcatccgatcaactgagagagcagtgcggacaagtggacagctgcggaagacaccaggtctcgacgatgacgaacaagatcggtcaacgagcttactaccatccggaacaagtcgtgacgagtggtcgaagaggaggcggtaccaagcggccgaggtgcaacagctcgagaaagtgtagcaaggagttgatcgacgtctggcatttgcagatgggaagccttcaggtttttgaagggaaatttaagtttaaagaaacttagaaaatttgtgttcaaactagtagacagacttgacaaggcaaaacttaccttgtctgagcatacagtatgagctatggaaagagcctgagcaactaccccacaactattcttgtcattgacatatgcccctgcggcgatgactagtttcgagactatggctctgtttgagactgacaacagcaaaggccatgatagagtgttagtacggtattttcaaatcagctcgcaaaaatcacttactttcagaaccctctttgaggatgatgtttgtggccaacaacttggcctctgttatggccggttcggcctcttcactaagcaaagtctgaatgagactttgcagcagactggtcctttcttccgaatctaaagctttgctgaaggaaagaagaggagcggacaggatcgacatgcgttgatctgtagagaaggcaaattagtcatgcatcagctatatcgttcgagtgcatgaatgtcaaatcaagaaagccgtacctcgagcagtgaaggccgagctcaaagcaagccagccagccatgaaaactgtacaagcctcgcttttaagggttggatctcgtacagtttgaacttctaccacgttcaggcgtagcatagacgaggcaagtatctcgatttcagaaagattctgtatagtagaagccttgaggaaacgcaaacaagctttgacgagctcttgaggcaggatccggacacctaacgacatggcaaacgccagtgagcaagaaaactcatggtttttggtactataaatgaagccaatttaccagtagaaagggttcccatccagctctcgaaagttcttgtgattgctagagcctccagtaggtctgcaaagccgcggaccaaccttccgtcgataaatgactgatgaatcttctcaaaggcatagctgagagccttctgcagtgggttgacaagctgttccagataggtttcttcagagaatctataggaacaatgaaggaagtagaaaaagccgatttagatgtgttgttttgcaaagatgttcgaaccatgatgactgaacttacttttttgagtttttgacctcttccatgatggcctgaagtaactgtaatctagatcggattgagaagtccagaatgaaatcctccgcgtcctcctcgttctcatccatctccattatctcctctagagaagtttgcgcatcattcgaagtgaatgtctctgttaaagaagctaacccgtctgatgaagtccccctgatgatcgatcttaagaaaaagaggggaaagaatgagaacatatcgttactcagcaccttcagttatataattcgactaacatacctgaatgtgagattcagtatcgaaagggtcgattgctccaacgttgcattgaatgggctcgaagcatgcagttcgtcaatcggactttggagtatgagataattcatgattttattatcgattgtctataagaatttgaagcgtcaatccggcagaacacaattcaatcaacagtgaccaaatgttaaacgctgtacaatttgtgacaacatcggagaaaggtcagcttacaaagtttgcgttggttcctaatgcctttatgaacccgaacgccacctttctcagcaaagctcttgcccgcaacctggtttcccactcctctccaggaccagctcgggtcagcttcagagccttctcaagactcaaagcccgagcgatgagctcagacttttgagagcgaggtgtgtattcagaaggaagtgcaagaaggagctcgaaacatcgcgtatcagtagcagaaggtgatgctgcgatagtggatgtcaatgaatcgatcgacttcagaagagagtgccggatattggcaagttctggtagctgaggttgtagcatcatagcgatggtcagagagtgtaaggtgaagggtcggttggcctcattcagagcttcatctccattggaaatgagagagaaagagttgatgatgatcgagcaaacagcatctagctgagttcttatgttcaagtagctatggaaatgaacaccagtttgatcaatactaggtatcttgaacggaataatgcgtgaccgacttactctatgacaccgatccaacgtccttcttctcccgtgagaagagcccagagtgccacagcaacagaggaatcgatcttgtgcccctcaagatcaagatctgctaatcggccagaccaagtggcacttgctacagatcttgagatgaagcctagaacgtcactcagtgtctttgaacatcgagatttccgtatctctgcagatggatggagtgaacttgaccggatatatgttcgaatctgttcaaagcagagacagaaaggaaggttaatgcttgttgaaaaatgatcacaaaacccgaatttgtgattagaaaaagactgactgcctcaacggtggcttctccgcctaaaccatcagcatctaacacgtcacccagcttcaaatcttcgtctttgcttaactcgatatcatctaggatatctctcaatgcctcgaagattctaagcccagagactaaccccatctctctagcccaaagatttcctttgctcttgtcatccaaacctagttcgaagagggggacgactacttcggagtggatggcgcggagatcctccttaagcgagttcagaagcccctcaggaagggaactgattaagagtgaaccagatgcaattatcaccgaagaagcaaatctactgaaaagagatagcacagctgctgaatcatcgatttctttgggtccaagtctgtattgatctagaccgccgttttcgccaacccttctcttcttccttgatctctctctatcgccttcgttggtcgaggatgatagagcgcgctctaaagaggcgagacaatccttcaggataaggcgcaagcttctcagcagttcggtcatttgaccttggacaccgagaaagctcttgatagtgcccgtcaagcagtccagccactgtgcatcaaaaaggggtcctgcagccaatgtttggtaatccgtagaaggtgtaggagcagtgatgatggcctcggtgagaaggtcgataaatgttggaagtgttcgggtcgatcgatgatatgctaataaagtgtttaggagactctgtccggaaggcgcagaggatggcatctatggacaacagtatgaaaagttcagatttgagatagaggacagtgtaaattttacaaagagccatgtcaacatacttttgagattgagatcagaagccgggatataaaggggtcgcagagtgtgcggtccaggcgcagaagaattgtcagggtcatcaagattgaatcagtcaaattgacgtcttcttctggtgaccacatgcgattgaaaatgaaaaaagttagaatcactacgaaaggtatctataacaatgtttgttttccgaagacgaaccatgagaagatccttccagctcgcctaacccccactctaatacagtcttacccaagcccaaccacccttcctcgttctccccctcttgatagcctctaccgactttgcctcgatcttctaatacttcccaaaggtctcgctcgcaagcccaacgctccccgcgcttacccttgtctccgatgacttcttttaatgctctcacaaacctcaatgtacatttgctgatttgctcggaggaatgaacctcaactggaaccttggcattgagcggtagcggaaacaatgtgtggcggtgtatagccaaaatcgaggtgaatatgcggagtagatggggcaaatagagcagtacccatgaggtcgtttcaggggcttctacaagttttgaaagggccttgtaaagctttggggtggcatctgactggccaatagattgagttgcagttgaaggctcgatatcttttggggtagaggcgataacaggaggcgcttggatgttctgagttccaatgagtcctcgaacttgtttgcgtggtttgagttgtttattagatggtggcggggggagatagattttgagattctcgaccggaaagatgatggatccttgaaggttgagaagcttaatgtaaagaggtgaggtgcttggtttatgagaaaggtaatggatatatgctgggaatatcgaggattggagatgagtttgagaaagctatgaggcgcgtaaagacaatcgaaaggtagatgagaaaccaaagccacgaatacgcatacaaaatagacacaaaccttggttcgagccaggttgttgggcagagttaggtttagtgaatctgctaaagcggccatgacagtttcccagccgctgatgagctcttcattgctatccaaattttgaaatctctcccagcagtcaagcgcctctcctagaagatccataagaccctcagctgtggtggacagaagttcgactatgatacaagaagcttgggcgacttcgtctaggagttgaggctgatttatcagactttcaggatgggaggggagttgacggaaaaaagaactgaggagggatgttgctgcagcaggaagagagaacacggaagacgacgtagcggacgacgagagagaggatgggacgggcagaagattgacaagtaagttccaatgaggctgcgagagaatggagggtgttctcggtacactgtccgaaagacaaacgatacgaaagagcacgatgcgtcagtacactttgctctggtcatcagaacgggaagacttatagcagcctacctctcttcctgaaccttgcccttgccctttgccttgctgcctcctccttgctttgtagccgtcatgtcggcagtcagccactccataaggacctccctcttggctgggaggtacagttttgcatcgaaccatgcaagagtcgccaaccgaattttatcggtcgatgatacggtgtttgacttgagtgtcctgaccaaggtggcggacgatgtgagctctactccattcatcgtctgtattgatgatggtaagattgaagagagcagcagttgaagcaaagctgagagaagctctgaaaggtacatgtaaaataaaatataaattacacat

SEQ ID NO: 331 - DNA, 2257 bp, Xanthophyllomyces dendrorhous
atatatgatatcaccttaagttagataccttctgcttttctttcgtcatctttttggagtttacttcaaaaaataatatatatctgatcctcaagatagtgtttctttaggctctctcgttgcatctggctttcatgatgtggaaactgagaggaagagtggtacggcttttcttcaagacggcttgactttctgtcgaccgaattccgagtaaacatcgatataaactgaccgaaagaccatcgcttcgatttaacgacagccaaagcattcgccgaatgctcgctcaatccaacacacctcgtcatcaacagcagcctcttttactaggcctcagaatttgccttcaacacggtcaccagcatctttgcgtcgtatattcgaaccaatcctttcatcagacatctaccttgcatcttcatcaacaccttcaaatgattttcttggtgatatagacagtgcttctccttacgaaactaccaccggcttgatccgctcggatgactcggatgagggaactcggttttctgagaagaggatcattgcgttccatgaacagctcaaatccgtcgcgctcaaatcaagatggcatgtgcaagattcacagccacgaccactgtctgttgaacaagctcgctcaagtataagcacggtgccgctcaagcttccgaagccttgttctgctcccgactccattcctgctttcttgacagagtcgatatcacagccatcatcttcagctactcccgcatctcactctacaactcaaccgtctacccagtacattcctgtgacactgtcgcaatctacacctgtacagccacctcaacgcacgatcacatcgtcaacaacatctgatcaaacttcgaatcccgcttcaaagtccaaatccgaatcgcaactggaatccaatctaacactcaaacctgagcttgagcctaagcctgggctcgagtggtcaagtcaactgcaaccagtccgagaggaatcacctttgacaccgtctatagtctcaacaattggttctccgagaattcctccatcatcatcttctcaggttcacctttcacgaagacctgtgacctcagtatcaatcagccgcaacgttcccattgcgagcccgaaattaatgaaggctatggctccgacttatggtggaaataaggcgaaaccgccaaattttttacttcctctcggaccgcgcaccccggtcgctcctctgactctggcacaacttcaacttaccaagtcgaaggccgcggcatcatcggaaaaaaacctattaaggaagaaggtgctcaaggcatggaacacccatcgaaggccggagaattcttgggacaagtcgtcccctaagacgtccaaacatgtgtcagttacggagaatgctgattcagagaacgagttttccataaacaacttgggtatctctttaagcaggcgcaattcttcacctacttccgctgtgcgcaagctatctgagagtgtgaatgtccctgcccagtttatgcctctgtcctcatcttcagatacttcacttgtattcaacaatcctcatactgcgctatccaatacgttgttggatcatttagtgcgcgagaaacgacgtttgaaatcatcaatcagcttagcatacgcccaatactgcatcgacaccctgaatcagtctctcggacaactcgaagtcatctcttcgcgtgatccctcctcatcgacctcccaggctattccgaggttgctaagacagtaccttcatcagtatcttctcgttcccgcattccatactcaaactcggcaagaggtcttggaccgaatgttcaggctcggtctccagccaagcgtggacctcgaaattctcatactccgtgcactcttccttcgtcaaaaaatctactcaaaagactttgctccctatggttcgttcattgtagaattatccagcctccaaacctacttcgataagcttcttcttggatcagatacgaacggacggtcaaacaattcatctgaacagggcacaattgatcgtcgtagaatctggtcgaccatgtactctggatttcgttcgatggccaagaacccgattcctaccgacttaaaagctcgcctcttggctgaggcacaaaaagaaccggttgatctagtcttgatttccaaactctccactgtgtgatacccacaataatgatggcagatctcaagtgagttagtgcgaccgcgcccccgtcgcggtatccaattagattaataatatatg

SEQ ID NO: 332 - DNA, 11873 bp, Xanthophyllomyces dendrorhous
ataatatatgtaatgatttgtttaaatttagaagccttgcatcgagatagtttgtgggaaaagaaccagctgtcgacagatccgacgcaataccacaacttttgtatgttgatagtatttcgctggttcaacaaattgtcgtgatttcatgtcgcatgttatggagaagtttcttagagatatctttggagctaagagagttagtcagtcgtaattcttttcagttcacactcacgcgactaaaatgaacaatatttgtgacagagccgattgggcccgtaggaaatcaaaacatccaccattttatacagcccgtctcccctcactgtcatcagatgaacagctgggtatagcgtgcgagagtcgtgtgcgacgggtaattgtagtaaaatagcttagtagattcggaagggctatatgaaaagagaagaagtgaaaacacgctgcgtcagtaccgataaaagaggtcggcagctgaatgattaggacagagaacataccttgcccatggaggacttgatgtggagggatccaacgttctgccactgcttcttgagcaaagagacgaggaagttgatggaaagcatgacgttggcgaggacctggtcctcggtcatgtcacagtgtccgacggcaacaccgaggcagagaaccttcttcaactggaacttaatggtggccttaacctcgttgaccttaccctggaggtcgtcagcgtgggagacgggggtagggaactttccggccttggacaatccgggtccgagaagtcgggggatctgcttgatgagggcctcggaagccaagaaggtgttgtacttcttggcgagcttcttgaccaacttcttgttcttgttgagcttcttcaagtcatcaacggacatgtactcaagctcgatctgcttggccctgtcaatgtcagcggcatcagccaagatgcagatggacattcggggtcggggaatgtagggaagcttgacggttccagagaatctacccaagaaaaacaagaaaagtaagtggactgtccctatatggcaaagagaacgtgagacgaaccgcttatctctctgaggatcgtagttcttaagaccgatctggagctcgatggtctcaacgaagttcctcttcttaccgtcctcaagggaggaggcagaaagaagggagttaacgaatcctcgcacgctggaagctagatagtttagtcggaacaagacgacatatcaggacccttaaatcgctcgagtccacctctagtatcgctttcgattaacaactcatcgagaaaattcgggtagtaatacgaaccagacaacttggacatttctgcagaagtaaagcaacgggtgataggtcagtgtgataaacatccctcgccttatacatgctctgctcattcaaaaagcagattgcaaaatactcacttgctgatggagaacaaaaaggttagcagaacagagaaaagaagaaaaacgactcgcaaaaagtcttgaattttttcgcccacaggcgcagcggggcgtgacggaatttcaagtttaggctcggtccgaaaatctaggccatatactcctgttcacgtcacgtgcattgagacactattcaacctgagaatgaatcttgccaggaatacgatcatctctgttatcaccatcattcatattcaaactccttggaaagccatgacgcttttctcgagatggttgaactccaaatgataggcacaatatgtttacaaggttgaaaatctaaccatgaagctagaaataaaattcaaaaagagaaaagatagaccttgagaaggaaagactgctgtaatcgggaggggatcggttcaagcgaagaggctaaaacaacttcgatcaaggaaaggaagacataggatacagatttatctatcctctcatttcttgaacaaaatggttgcgtcagctggtagctcagaaggacagacaaaactttgtttgctattttcttcaggccatttttaaagtgttttgagctctgtctttagtgaagcatgaagtggcctaaacagaggcttgatgttaaatttgagatcagccgtatatccgtataactatcgcagaggtgaattgtctgcttcgatcttggaattgcggcaatttatgcagtgtgcttgactaggatagaatctacagtaagatctatagtgggaactggaacataactcatggagaaatttgagatgaattagcaggagctgtctgtaggtgctcaggcgcatcaggagctaagagaggccataaaagatagagtggaaacaggatgccgaccatatcacaaacgaatgagttcggtgacgataccacagaggataacccaaggtcctgttctggaaactctttcatacgtataaccaaagcatggtatctatttagtcttacacatttacaattcggatagactacaaaaaatattgcacggcctatggagaaacagaccaaaacacacatagacaagagtcaatatatagaaaagtagaaaagcgttagataaatacagaggaggtcactgaccttgcccatctgcgctgctgcttgattcggaccatccctacggaaataagagcaaccgagtttcaatcatacgaccggtcaatcatgagagttcaatataggtcaaagactcttctacagaatatccatgaagcaaatatcacaactcacgtttcattttctggtgcagcagagaaactaccggagaagatattcaaccaaaagctcaatattatcaatcaagctgacgataaatactgttcaagatctcaattagagtatatgtattgtgttacgtacatgttccaatgtttttgtccgtctggtccaacctccagaatactggcttggttgccacatcgataacaatactgccccgacaaagtacgatgattttagacaaagagatggttactcaagtttgatgaatacagtacttcaagaccagaccgccaaagaatatgagaagactcacattgggcgcactccatactgtgctcaattgtttgtcgaacagttcggaatacccatccatacagagctggtgagctcgaagcatatgatcaaacttattcaagttcaagaacttttttacaacctgagacccaaacgtgtaaccagcgcctctgatgatattcataccaagcccatgaccagacaatacagaaggcaccagaatcagcaaagtctcgaaatgaaggacagcagaagaagaagaactttacctaggtgatattgcaaactcctccttgtctgcatccggatcagaccataccaggtcggccatgggaccttcatgcggtatttctattgcattgaaacccaagtatatgtgagtcaaaccatctatttgaagcatcacagaaaagtcatctacaaacctctaaaacgatcgatgatcttgatttgatcaattccatgtacacttggtgacagccctgaagatacgtcagacaaagaaaacaggcccacagtaagatgaacgcaatccaaatatgagcatcagacaccggataacattagcgcagaggaagataatattgatgggcacggacctccatgcacacagaatatccgatcgtctataactacacttaacgtcaagaaatcgaacatatcggtgaaatattgccaaactagaggtgatccgtatttgcgttggcactcagtatagaatccgtatgtctaatgataacaagccgggcccagattgccaagaaatcagtacgtttcgtaatcggacacaaaggagggacgcgtgagcacaaaagatatccacctgggtgacagctcttgattcatggttcccccgaatgagctgcactcgttccggatatcgaagtttcagacatgtcaagagagatattgtctctacactgaataacccacggtcaacatagtcgcctgaagtgccggtcatacgggtggacaaaaacagttgagctcggtccgtgaacaagatcaaagttgaccaggtaagcgtacctagaaagagatagttcgtgtcgggcacgaagccacctatacggaagatctcgaccaaatcataaaattgcctgttgtttgaacccatggtcacaatagtttgagttagaacttgaccgcgatttacgttgaaggcactcagagtcatgcactgcgaacaacggcaagatcctacgatatcacagacagaagaaagagttagagagaagaaactcacccatggatatcacccactaccgtcaccggagagctcacatgaacgacattgctttctctcatcaggacctctttggtcttctcgcaaatctctctgagaagagcttcacccaagagtcgtttttgaagtaatttggagatacaatcatcaatgtcaaacacacccatgcctagtacggaatgatccactggatcgttatgagagaggaagatgtggtggaagggtatgagtgaggcgatcaacagatatatcggcgtcgttgtcttaaatccgaaacacaaaaatctaaagaaacccaatgagccttgaagaggctagaggaggatgaatgatggaaatgctgagctttcactcccctttcggtcacctccaccgggcgttgatcagtttcttgatctgattatagaaaattgtaattggatcgcgtcgattttctagtatatcgtccttgattttcattacgaaagtcttgaacattctgtagtggacatggcgttgtttctgattgtgtggcaagtctcacacatggtttccgggctgtgtgtcaaaatcgcaccaagccctggccaccaccactttgagccctcttactgccaacacgctcagttgacctctacaaattatctttctaccacacaaccatggctcaaaactcttctaacaagcttgcatctgcctctgggtctggaggtcgaaaaaccaagtcgaccacaaagaagggagccagatcggttcctcccaagaagcatactgctgtcgtgagcagaactatgcagaaggtaagccactccttctcatgttcggttcatagtccgcattttaactatactgatcagaggccttcatccgcttgtacggttctctatccatcagaatctgagtgcaaagatcaataactctattgagcgacagatggtgaacgctgcctctggtggaaagctcacaatcatgaagggtagtggagaccctaccgacaaggccaagtaagttctcggtccttatcaaagttctcattaaatccgaacgaatgtgagaaagaaacttaacttattcttctctaatctcgatcttccacatctcatagggatacgaagggtgtctcgaagcctacgaagtctggtctgaagttcgataagcccaaccctcacgaccgagccaacatctaaacgaaagacgcgtttccttcttcgcttctatatctaccaattcactgtaacgggtaggaatagattcaggccaagttggtcgttctgtatattatgtaactataccggggggatgcctgtttggtagatcgaacagaaagaatatcgttattgtaagtattgcacgcatctcaagctcttttatccctctttactcttttcatatatcttgattgattgtttttttgtttcgcttgtgtggtgttctattatgaccatatattgttctggctcaatagatacatgcgctccagaatatatacattttccgttaagcttttcattttactttatttcggagatacatacagttcagtttttcatagagcgacatcatagagactgttatgcgttagcttttagtttctgttctgaactatggatttgcgagaatcaaaatcacgagaaagaagaaagtggaaaggacaagaagaaaagaatcgaagtgactctgtcgatgttagggttaacgctttcgggctatacccgactcactaacctcaagagcgtttgttgagtccaccatcttcaccaagtcttcggtgcttccataggctttatcacaatgtcgaccgcccgaaagcgtaccgagtggaatcgtgatttgatcgctcaatcaatccttcaaggccaacttttgactgtctaccatgacaaggttctcagattaaactcctggcttgggcaccatcccggtggagagctcgctttactccattttgttggtgcgttatttcgaaaattccatcaggttcaccgatctagatcttgactctatctaagttttgttgaccaaattgacgctgaatcttcattttctcttgtcatcgatgggatcaacttataggaagagacgcaacggatgagattgtcagtagtctcaacctcaatggctaagccggtgtcactactcaatctgacagatgccccttcgtcttcatctaaaacacactgttttttttttcaggaggcatatcattctgaagaaactcttagcgaaaagattgatcgatattgtgtcggggtgctggctccctccgagaaaaaagtacgactgcttcttacggaacgagagctgttcaaagatcttgtatgctaatggagtctgaatgtccgaaacaatcggatagtccttcgtatctttgatccctccgatcatgcttggattcacattatctaaatcttcatcaggagattgcacctgggttcctctcggtggatctatccgggctctctctgataatcgtgcacttcaaacaccctccattagctcggcaacgccttgcgacacaccaccagtatctgaaccagacagtaagccgatatcagacacgcttcaaattcaagatctgtatcccccttctgttccggctcctctgtccactctcgaacttcagcaagcgcatacaaagtcttaccgtcaacttcacaagaaggttcgagacgccgggttgtataaatctccaggtttcttgtccggttatggtggtgattgtgttaggtacattttattggccgtgactgccatatgggcttggaacaaaggcatccaagctgaggctgggtggacgagaaaaggctggctaagtctcgcggcagtatctttggggctgttctggcagtacgtatatcttttcctctcatatagtctttcgcgcattacctgtcttactgttgaagatatgtacgctgaaatcagttgaacctcctttgctcattcttcatgtcaaaagacaattgacatttgttgctcatgatgcaggtcatacatctatcctcggcaacggtgattatatacaaaaccggcttttaggaacatttgtagccaactggattggtgggctgagtctaggatggtggtgtgacgttcgtcctttcattcaattcggactgtggcaatagattatacactctgctgactagctgactagctcacttgcaaaatttcatcagaaccataacattcaccacttggtcaccaatcatccagaacatgaccctgacatccaacatcttccttttttcgctatttctcccatcttcttcgattcgattttctcgacttactacaatgctcgtaaaccgctagacaaatttgcgcagtttgtcatcccgtttcaacataaaacgtattacgttgtcctcctcctagccagattcaatctttatgtgctctcgtacgcttggctggctaagtgtgcgctaggtgcaggcggacggaagaaggaaagatggtttaatttcgaagtgatgggtctgatcatattctgggcctggtttgggtatggcgtcttgggctcattggatgggaagggagagagaacactcttcctgctgataagccatgtcatggcggccccggttcatgttcaggttcgttgtatcaactcatctacttgtgtgtttctctacggtccgctatacagagaagaaacattgacaagtgagctaaaaccggtcctcctcatctttcgcggaatatcattctttagattgtactctctcacttttctcgatcgactgaagatctcggcgttctagaatcattcgcacaccgtcaactccgaacgacgatggatgtgcgtctgttctctactattcttccttcttcttttctattcggaaattttgatctgactggtctcacaccacttcttttgaatatcaaaaatcaaaaaggtgatctgccctccatcaatcgagtttatccatggcggtctcgacaaacaggtgactcaccatctgttccctcggttaccgagacataaccttcggcaagcttctcttctcgtcaaagagttctgcgaggaacagcaaatcgagtttgcagagtggacgtttgtcgaaggcaataaacaagtccttggtgtggtaagtctttacactcttttattcttcagaatgtatcgttaattaagcaaagctggaagagagatgttgaccgtctccttattcaatggtaacaaataaatcagcttcgggatgttgccgaccaattgaaattcatcggcaaggttgctcaagccgaagctaaaggagaactcagccaagggaaataagaaagaattccaatccttgtctgtttcttctagatttctttttgtttttgcttcttatcgcacatatatacgtgtcttcaaagcattgggattgccccctattcatacgctctttcctcacttcaattgatttcagctggctaaatcaactattaaatcaagagctaccaactcaggatctatcaaaataagggcacggacttcctctttatccatctttgccaaatcttttgcgactggattgattctggttctatttcttcatattgtctggttttcgaggaaagtaaatagatatagatggaaacttgtgaaacaaaaactttctttacatatatgagatcatatgagtcgcttctgggagaacgatgaatgaaggagagtcgtcttccgtggtcatcttgcgttgtaggctgacgttcaagctcattgtgctcaagagaaccttcagaatgcgttgtcacgtgacgtttttgttcagtaatcccatctagcgacgttttcatctatgacaagcctttgtctcgagcgcaatctcaccttccggtgcctatggaagtgcttgagtttgtgcccatccgtgtacttacatgtgtactgatcagagttgagacggctgaatccaagctaacaaggatcaagctaacccgccaaggatcaagatacatgtcactgacagcccagcctgtcgtggcaatgtgcagcatgtaacatacgagctcggccaagttcgatacacaggaacgattcagggacggctgccgctcctagtcgttcaggacgctatcctctctgtttccattcccgctcctgtcctcgttcctgccctcttcctccccatgctgcatcccatcgcgctctctctatccttcacaccgacgaacggcctggcttgcttcgtgccagacgaggagagctgtgatctgcgttctgtgtcctgtagtctgtactatgtgctctgtgctatgggtcatcgttgatgccaggctgtactctccgaatagacgctcgatatcgagctagtcagttggcccgcctattcgcccacatacctgctccctctcactagcccgctctcgctaactctcaaccgactgactgaccgttcccgtcgacaccgtcgtcaggcgggatgttctgtgagcactctacccgcctgctagcactgcgacttgccttgttgatccgtatggtcagccgaagtatttctgctggggtataaagagcactatgctatctttgtttcgtgttgtttcttgatccgcgtttgttttctctgttctgtgttgtctttctatccaaagcaaacgccaactcatctacggacgaccgatacccaatcacctgttcaccgcttgcccttctcttcttcatccttagccctgttcttaagcaacgtttccacctgtataccatacacatatataacccacttcatatttcgaactgtttaaaaatccgtcgtctatcacttgtctcccggctcacgctatttgaacgacacttaccgttcgctcatcatgataaacaccaacccttctacttgcgttgaacgagtgtcctgcccttcgactccaccccgcgtccttcatacggccaaagttgccctccatctcaagtatgcttccatggcgacttcggccctgcctatgcccatcaccgcaaagaagacactcggccgaacacctggaaccgccgctaccaagatatccggttctcgacaacccagcaggataccgaaaagggttcccgtcaaaaagaaagcacatgtcagccattcacccatcgcagttacttcggcacgatccctcgggcggcactcagtttcaagatcttctcctttgcggaaagaggtctcgctcttcgagttggctttcgataccgagccagcttcctttcatgaccttcacatcctgcccactgccgtaaacactccaatcgccaaggattgtcctgcaatctcaatcggctctgcgcaacttctccaatttagcgttgagcgccctctggtttcaaactttggccccccgtcgatcagtaaatcctcctggtcaaataagtccgatatacctccgatggatctgaaggagaacactgagcatttagaggtgcgctttccctctttctacgatcgtttggctcgtcttttattgcgtagatcctgtcgttactttaggacagcattttcttaacacttccctctttctgccttccttctcctcatacatcttctgttccttctcgaccgatagtcttctaacgaagatattatccacgagctgctcccaacactgtcctctttcctccctgatggtccgtccagacgaggttcacccagaaaaaagcttcttttctgggtccggtcacattcccgaggtctctctgaatttttgtccaagcgctcgttgcgatcctccaaagaagaacactgagaagacatgtgaatgaaggttcgctagatgtgaatatatctggctaacttttgatatcccataattacactctcttgcttccgtttcgatcatttcggttcctccgcccctttgcctgtttatcttcctatcttcctctcagtctgttttgttgaatttatttcttggtctttttcttggctagttacgtttctcacccgtccctcctctttgcctttctccttcttgtctcatctcatttcttgttgcgtcttcatttctctctctttcattcatataccccctatccatcgttagcagtatacccccgatttcaatcggctttgctatcgtttctgtctttgtcattgtcctcatgtcaatatcagtatcaacatacacaaagccttatagaatgcttttaagacatacaagctgatgcgagaagctcacgccaagcgctgtcaattaccgacttttttaatccaatctttcttgaataagtaatcaacgtgtgatggaagtgacattctgtgtgcggatcctagaggaaagagtgagaagaaatgatttaaacggctccagaagtagaagccaagatggaaacgagaatgaatgaggaagaagaaaataaaatcatggaagcaagagaggaaagagggatgaagagtgaaaactatcacatgaaaacatatatagattgaggtatactagacaaaggaagaacaaagacaccggtgataacaaggtgtaagagcgaacaaaacaaaaaggagaaagagcatcgttttttgtttcctgaagtggaaggttgagtttattcttttttttattttttggttaagattgctagaaatctactaacagaattctcaagtgagacccaaaacaatcaaggaaatcggcggaaggtgtctgtatggcactatctggtcggcaagagtttaggaaagagatgaagaggacaccgggggggg
